United States Patent Application Publication US 2008/0114160 A1 - sequence listing, part 53

SEQ ID NO: 16768 - DNA, 13158 bp, Oryza sativa
ctagaggatcccccatcgtttagaacatcaacacgtgcatggttccattatagttgtttcatcattacctttttttttaataaataacgcagttgacttttagacatgcttaattattcatcttattcaaaaattaagtaattataattcattttgatatgattttttatcattaaaaaatcggtggcgctaatacgcatagaatgcagtttgagcgccgcacaacgctccctccatccagttttctctttttttaccaccccacctttactcagtatcccaccattcctctagattttttctgttatctcattttagtaaaatatttaccatatggtttttctttccgagttttctgcttttcgagtgtctctcgacgtttcaaaagtaacaaatttactctactaagttttccatttgctcccaacatcccacctttgcaccttcaaaaataacaaatttactcgcatgaatgtcccatcaaaagtaacaaatttacttgcatgaatgcccctacaccattcctagatggccgtaataaaattactaccagcttacaacgctagtaattcttttaccagtaataaatattgtttagacttcgtagtatgtgagtagggttgtaaacggatggagaagagagagaagaagtaccacgatagataaacaggtactatagatagctttatatgttatctaccactcaggtaatagacgaatatcctattattgtccgtacagttacaaccattctattcttgtttatggactacaactttcttcgtacacacatgcacctccacaaatctctcttggcctaaaattatgcagcaccccttcacaccccattcctcatagccatctcctctcctcttgaccccatttcggtgcttaaccaaactcaccataatatcagttcatccacaacaatgtcggcctactgcggcaagtacaaaggtatgatccatccacaatcatccttctctcttggtgttcttctctccagtactagggtcatgcgcatggatttgtgtggtcttagatctagttttggtgataggattcgggaagagttttccattcagcatctgtaaatcgatcgtgtactttaatttatctcgccatatagtgcatgtacttattaatctaatggagattgcttttatcataaaaatacgttaagattcattttattaatacaaatggcatctctagtgataaattgtgcattattttgtgacacagttaagttgatctagatggcatgcatgcatgacttggttggattaaataagcatctatcaggcataatttacactaggcaattgggataaatcaataattaaatccacaaggagatgctgaaattgtatttgtatgctgtatatcttacagatgagctcataaagaatgctgcctacattggcaccccgggcaagggtatcctcgctgcggacgagtccactggcaccatcggcaagcgcttcgccagcatcaatgttgagaacgtcgaggataaccgccgtgccttccgcgagctccttttctgcacccctggcgcccttcagtacatcagcggcgtgatcctcttcgacgagaccctctaccagaagaccaaggatggcaagccctttttccttgtcctcaaggaggccggtgccctccccggcatcaaggtggacaagggcaccattgaggtcgccggtaccgacaaggaaaccaccacccagggccacgatgacctctgcaagcaatgcgccaagtactacgaggccggtgcccgctttgccaagtggcgtgccgttctcaagatcggacccaaccagcccttccagcttgccattgatctgaacgcccaaggccttgcttgctacgccatcatctgccaagaaaacgggcttttgccgatcgtcgagccggagatcctcgtcgatggccctcacgacatcgatcgatgcgcgtacgtttccgaggtggtcctcgccgcgtgctacaaggcgctgaacgagcaccatgtcctcctcgagggcaccctcctgaagcccaacatggtcaccccgggttccgacgccaaaaaggtggcgccggaggtcatcgcggagtacaccgtccgcaccctccagaggaccgtccctcctgctgtgccggccatcgtcttcctctccggtggacagagcgaggaggaggcgacgctgaacctgaacgccatgaacaagctcagcgccaaaaagccgtggtcgctgtccttctcctttggccgtgccctgcagcagagcacgctcaaggcctgggctggcaagacggagaacgtagagaaggccagggcggccttcctcgtcaggtgcaaggccaactccgaggctaccctgggtacttacaagggtgatgctgtcctcggcgagggcgctgctgaaagcctgcacgtcaaggactacaagtactgatctgcatcaggcgctggcctgctatggcttggctacctgatcgatttcccattctggggccgttacataatgcggttttgatatctagaggctctaacaggattcacaatttcggatcggaatttcagaatttttccctttccgatagatcgaaccctggagcacaatatatctgtggttatctaaaagccttgtcttaataatccagaacctttttttttcttgtaaaatatttgctgatgaacatcagctggcccggagtttttatttttatcaatcactttgtaactgtctgatttgcccggtgctgtgtgattttgttgaatgaaattaacttcacttctttgagtttagtcgattgagctgctctatttcaatatgaagctttgaagccttaaaattgttgaatttataagcctataacgatttaatttattccatatataaatcatgacattgcagatttaaactagcataaacgcatcattagatctacacatataaactagacaataaagcatgaacagggagcagtcgtgcgaagcgcttcccgaaaaccttattgccgccttctcctggtgctgaacgtcgaaggcggaggttccgaacttgatcaggacgcctgcacgatctccactcagcttatatagagatatcagggcgcctgcacgatctccgcttagcttatatagagatatcaggacgcttgatcaggactcctgcacgacgtacgatctccgcttagcttatatagagatatcaggacgcttgatcaggacactgttgatggtcgtctgcgatcagtttcgcccgtcaatattaccaaaataaaggagaactagttatacttgcaatgcatatttatgttaaaataataaatattctactagcactaggattactaagctcttgcagagaataaacataaaacggaggagaattgacatcaaaataggcgatcaatcaatcggatgatatcgagaatcagacttatcaataaatgagccaagaacgcagaaatgacacgattaattgggccaaaattcacaagtctgaagtgagcaatagaagaggtggccgccagccaaaaatgggctggattgggctagcccctagtttggaaacggaatctgtcgatcggattttttttcggaaacggaaacggaaacgaaaacgaattggaaacattttcttggaaacagaatcgaatatgataagggcagtttccatcggaactcaaaatcggtcggaaactttccgaaaaatttatcggaattataaaggcccataccatagtctataattcccccccaccccggccatcccaaaatttgagacttgggaattggatttgacatagtttaaaacatagtttgagggatttttgaattccgataaattttcgttaccatatcaacgccggtccgttttcgctccgttttcggcttcgacaatatttgattccatttttatatccggggtttccgattccgaaaaaaaatataaaaacgaaaacgataaatgttgtttccatccgttttcgtaccgatttcatcctacacataatactattgcactgtcatccctccctctcatctctgactcgagttctatgctattcgttcctctccagtctcctccctattttcatatactaaactactccctccttcgcaaattgatcatcacatatgtttatgcaccaaaatcaaggataatttaaatcatatcaatcaagataccatgcacacattctcccacaatatatgcatcgattaaaacaccatgccaattacatcttagcatgtgcatactcacatgctatattaattgtagtctaatgaaattcgtgttcatgcggttatatgataattaatttaagaaattttaaattccattatatgatgatcaatttgggaaggagggagtatttgcctaattataaaaataattttaagctacacttgtaattttctaatctaattgtttctttatttataattaataaagcaataattcaagatccatgtgccgatatttatttatataaaaatatgacattttggcacattccaccgtgcactttgcaggtcacccaaagagcgatggaatactaaaaagcattatcaacatatatttccttattatacatcaatctagaaatatgaatcgctaaattaaatcaatattattaaaaaaatgtaaattcatgttttaacggtgcgcaacatccctaacattttacgtgtcattcgaatttccactaaagattttggaataattcaacatcataagttgcactatcatatattattttgcaaccatacgtaactaaactaattagacattccgtacataaaaaatagctcgaacacaaatagtccaagcgactacgtagaaataaattcatagggacaatcatccgaattgccaaaaaaataaattaattcaacaaacaggttgtaagtacattgtttcgcaagcaaggtataattaaattagatatacactacataaggaaaataactatctgaaatctgatttgtataaaaaaaattggtgccttcagttagagaaaataatccgattacttcatgattacttttgcaattaatatgctcaaataatcaaaacaagtcaaatgatcttctgcctaagtgttttaaacttattttatttatcatttaatcgactttagatgatggttgctttttactataaagccaccacctgttaccccataaatactcctaggccttttaaatcgatgaactcattatttctaatggttagaaataatatttatgatacatcgcattcaaaaaatatatattgcacaactatatttcttcatccagcattattcacactaggttgcaactctatatggaacgttcacatatggattctctctcaaactaaaaaataatatttggctatataaacccatatatttagtggagcctcatatctcaccgaattcatccgtcaatgaacaatgacaacctatattcaattaaaaaacttcttacttttgactttacacttaatttggtatacatgttttattacacaaaataaatctaccttctttttagatggtgaaaaatattataaataattgcttggagggattaattaaatatgatatgttataaagctaattaatagctaggttagaaaattataaaagcaatgctaataaaaacaattatggaaaaatcgtatacatgagatgttcatacaaagtctgtaacacataacacatgttcgcgcgaatgcaaggctgtctttctagcttgtcccaaagtcatataaaaaaaatagggggagtaagtattacgtaggtgtaggtggctcaaaatagcaaaaccgtttttcttttcgagaggaaggaacactgattgcaactgtggtacccatgcactgtgcatacaccaataagatcagcatgcagccacgtggtagatgggctatcactatcagcacccacctatccttatcgtcggcaccctgtatctccacgtcgatcaatggccaccacacagctgcatcggctgctgccgctcctcctcttcctcccattcttctacctcgccggcggacgggggcacaccaccacctccccgccgcgccggcgcgacgcgccctccggtggtctccccccggtcgtgctgctgccggggagcacctgcagctagctggaggcacgcctcacggacgcctacgtgccgccgtcgccgcaatgcgccgcgcaccaccacgaggccgacggccggtggttccggctgtggaagaacaccacggagctggacgaccccgtcgtcgcgcgcgccctgcgtcgccgaccagctccgcctcgtcttcgaccacgccgccggtgactaccacggcgtccccggcgtggagactcgtgtcctggacttcggctccacccgtgggttcatcgccgacgtgcccgccaacagttcagctcgccgagactactgtctcccatgaattgcgccaacaaaaacacatcgatcgtgacgagaaatactgtggtttgtacacgcgagcagagacctctgcatgggaaggctcgtcgaggcgttggagaaagtcggctaccgcgacggcgagaccttgttcggcgcgccgtacgacttccggcaggcgccagcggcaccggggaagccgtgcagggcgttctcgcggttccggcgtcagctccgggcgcttgtcgagcacgcgagcaggacgaacggggaccaaccggtcgtcctcgtgtcgcacagccagggcggctacttcgcgctcgagttcatcaaccggagccccatggcgtggcgccggaggcacgtcaagcacttcgtcatggcgtccaccggcgccggcgggttcgtgctgggattgcagtccctggtctccggcgtcagcgacgcctccccgatgggccttgccgggaggagcctcgcctgcaagttcacgtcgctgccgtcacccaaggtgttcgaccgcgacacgccgctggtggtcacgcgggacaagaactaccggagctcctgacggcagtcggtctcccggcgtacgaggtgacgctatacaagacgagggcgctgccggtggcgatgaatttcagggcgccggcggtgccgacgacgtgcatcaacggcgtcggcgtgccgacgacggagaagctggtgtactgggacggcgacttcagccaggccccggagatcgtgtacggcgacggcgatggggtcgtcaattcggcgagcatactggctctcgacacggtgatcggcgaagatccgaggcaggggtactacaagtccgtcaagatcgccggcacgtctcacgacggcgttgtctctgatggtgccgccttggagcgtctggttagtgagattcctcgggagaattttgtgcaagcttcgaaggaggaggatagtcgggttgctcaactgtaatttatcagcactgggattcctattagttgatcacttcattctcttcaactcatcgtacacggccagacaataattccgccgtgtttagttacaaagtttttcttcaaactttcaactttttcatcatatcaaaactttgctacacacaaaaacttccaatttttccgtcacttcgttccaatttcaaccaaacttttaattttggtgtgaactaaacacagttcattagaaataattagacgggtgctcgggcgtactttcccctaatgttcggctgtggtcctttctccatcaaaagttgatgaatttttggataattgtgacgcgttttttaaactgataaatagtgtgtttcgtgcgaaaactttctatatgaatattgctctaaaatatcagattaatctattttttaagtttgtaataattaaaacttaattaatcacacgttattgccacctaatttttttataaaacacttaatttttatctttatatctgaatatagagattcaaacaccaccgtcagcatcgaactgagttggggcttggactcctgttgttactagtcgggcactcaaggcctcaactcgctgcagcctagcaagtagctgggccaagtgcaccactgtgcggaatggatccatccgccacaaaagacgctcttaaaagagcaaacactcgtgggtttactttaaataaataggcctgttaaggctgtgtttaaataaacacttgtcggtgaaaagtttcggtgtgtcacatcggatatacagattgtattaaacgtagactaataacaaacaaattgtagattccgcatgtaaactgcgagatgaatttattaagtctaattaatccatcattagcaaatatttactgtagcaccacattattaagcaaatgtttactgtaacaccacattgtcagatcatgaagcgattaggtttaaaagatttatctcgtaattttcacacgatctatgtaattattttatttatctatatttaatactccatatatgtgtctaaacatttgatgtgacaaggtgaaaaaattcaccaggaatctaaacaggccctaaatagaaatatccaaaaagaaagtccgacaaacacgcagctgcacgtggggtcgtaggatcgtacgatcgcgtgggatgttggactagcgatcgatcgtgcattagacatacgcgtgcattacccaaacggttgccctttgggatttttcaccatacgcgtcgtacagtcacgccaccattctagattaatcacgcgcctatggctaacggctacacacacccatggcccaatgcctgccgcaagagcagcccagccaacgaaccagcactttggtcagcacaaaaaaatcaaaaaaagccaatgtctgatggtttttgagctagctttgccgagaattaaaaaaaggtaaaattttgatgttttaaataaataaacaaaccatcagacaaaaaaaagcaaggatcaattaaacaacatcaaaaaaattagatcaaagcatatgaaggatatattgaagatttccccaccagcatgtaaaaacatctccctctctctacgtcacctgcattaaccattaagtattctataggctttagcacgtttatggatgaaaatattggaaaataataaattttcagttctgaaaaaacaatagtaaattcttgagaaaatgtgaaagcaatacgggcacttgataagcttaggaactgctaacatgctgatcgaccttgggtgttggccaattgagctggaagtcactacaccggatcggtcacctctgacgggtctaaaccctcacttttgacgggttcggcctggtcagagattagtggtcactgataattttgagttacctgtgatgggtgaaggctcgtcagagttaagagtcacctcaaatgggccccaattaaaacctatcactggtgaaagtcacctctgactagtcctaaccaaaacccgtcacgggtgagagtcacctctgacgggtttatattttaacacgttactgatcataattgggaacgccactggtgtgaaataaggaaaaataaaaaagagaaacaccagcctcctaacttaccatcacatttatttgtattgaatgcatctggcattcacaaataaaaaaattgtcacaattcttcttgtgtccatcgcagttgtcctaataacgaaaataaaaaataaaaatcacgggaatctcaccataggaatcaaaatacagtagcaacaatgcaacatcccccaaattgattgataagagtagactttgttaataacccttacgacagtcaggtggtggcgactggcgactggagcttgggcggggagccaacatccccgaaattgattgataagagactagagccccaaattggtggcgactggagactggagtcacatccccaaattgattgataagagaagactttgctaataaccctacgacaagccagggcccgaaaacggtacagatccatctcatacagttggcctaatactgcaactcactgcgttttttggtccgggcaaccatccttataagctgctccctctcttctcaaattggcgaggtgggactaaagctagctacagcttcacagccgctgctctctgctcgctggctgcactgccgcttctttgctgctgctcctgctgcttgctcacatgggccggccaaggcccaaggcatgctgctgctgggctactttgctgtgggctgcacgcatgggccaaggcccaaagctcatactaggaaattaacttagacctatatattaacatggggaagatccgtactgagctggtcgcctatctctaaattgctctaggccaagcacgcttaacctcagaattctttagagatcggcttccgaaaaagaagttgcaacttgttgatataagtattctattaatcctattaagccctgggtcgggatgtcacacacgtcattgcatatctctggtaagcaagctacacaattatatcaagataaatgtaaggtaaagtcggtacttaaataataagagtgaggtaaaataccgagactgaataaaaaagattatttcattaattttacaagtcttacaaaaaaaagagaaaagctactagagtcatacccgaattctcctgaagactcgaggactaagaaaactattttattttctacaccactagcactagaatactaattaaacttgagaagagcttgattcttgttgcttgagtgtgtgaagaagtgagtgaggtgagctccttttataggttcagtatgacagttatgatggttggaaaggttagaatcctggacgtccacgctaaaccctagcctgaacggctgagatgggggttcagtcgaatcttggcctggcctagaaggcccaattttttgcaggcctcctcctggttgattccttagtccagtgacgtggtgttttgggccttttgagattatttctttggatttgtaggcccatctatccacaagtctacctcttgacgacttccaattgattgttcgtttgtttttcgtcgaactgcaatcgaatagaatccaagtacaagtggaaataaattattctaaaacaaatatgaattgcaagcatagctagttctccattattttgtgtatattgacagttgaaattgctctataacgaccatcaaggaaggccgagagccccaagtgcagggtgacgagtggctttgggcagagggtgacgagtggctttgggcaggatttggcgcaaggcggcgtcgaccaaggtgatggcacggcgtggctagagcggcagctagaggtggagagagaggtagagcgtggcgacggctctagggcaaggtaaaaacttgggaaaaaggtggaaaagggagaggaggtccagggcgtgctatttataagcaaagagggaggagatcggcttggatacggtggggtttggcggcagaagagttagggttcgccggcaaaataggagatcaaaaccgttcctattcacggagataaatcacgagatttcttcgattacttgaggggaaagaaacaggaggataagggaaagaaatcccctcaaccaatttgtgaaatggaacaacgaaacggccaaattaggaggggaatcaacaccgggtcgggcactgcctcaggccggaggttgaaaaggcacggtagcaagagggatgaaaagtagactggggaaaaagacaggcccgaaaggaaggaggaaaggagggcggcccgagagagaggagatgaaggaggggcatgcgggccaagggaggggtggtagacattgggaagaaaatggcccaagaacccaagagagagattttatttgttttccatttatatttaattggtttaatgaactttgtgatattaaaattagatattgagctccgaaaattcacaggaaattctagagagtattttagagcatgaagaatattacaaaaatatttccggccatgatttttaaaggaaaatttttaattccctcaataattgacttgattaaattgctttaacttttaatataatttctagaaatgcattattattatgatttttaatcccgaatgaaaatcggggcatgacaagtattaagtattgtaatacaatgtgccatgcacttattacgcggttgataattttataatagcttaaggagtggaaatgttatactatagttgtggtagtaaatgaggcaaaatcatttatacaggtttaggctgcgtggtgcataataccctactcctgtggggttctttccgttatattttttttcagagactaaaggatggtgcaaatcctatggagtttttttgtgtttcctacaaccctttctgaagtccttggctctccccttgtagtcaatgggaaaataccacagttgtagaaccctcgcgactgaaccgtagcacagagtggttagatatgggaagtcttattgcttgtagaagagtggaccaagatgcaaaaccgccatgcacccccccctcctcctacctctagtggcaacattgggaagatgctgtgatgatctgccatgcatcctgcgcgacaaggaaaagcttggggtagaaggctggtgctctaatggccaattgttgagccccacttgttagcctcaggaggtggaacatgtagaaaggtgtaggacttgccgggaagcacattagtcaaccgtgccacttaacagcccacgcccctccccgtagggatgatgatgctgtgcaagatggctgtgcagctgctatcccgttagactggtcgcatgtaaagtgtcatatcacatttaatgcaaagcctacacacaaaagagcacagcaggacactgtgtctcaatgccattaatgcactgctattatcctcgagaagctcggtacaccgatctcggggacaaaagatgattatgccccgagctcagatcctggcttccaacctgaagggagaccccaagcttagccctgcttggggcagccaaggttcccgaccggcctccttcatggtgtatcacaggcactgtggcagactatcgattcattgggtcgtctaaataaacacacacacacacatacgtatgtatctcactgaaacaccttaacaactgctcggaaggcatacttttattaaccaattggtcacactgttatactcattcatacaaatataacttattaatgtgcatactttctatgctaaacatagttaatgaaatataattgtttccatgaat

SEQ ID NO: 16769 - DNA, 1481 bp, Oryza sativa
gtcaaccccaaaagcatgggcttgaccacatcaataaccttgataatcactacaaacaatagcctatagatgacaatcatgccacaaagtaccgcaagatccacccatcttgaatgacctgtttccacttgaaataactcaacaataactttttcaccactcactgtttcctgtcctcctaggttactttggaagactaaccctgagaactcattcttgtaaaacccctgcagtgcatacttgtgaaaggaaatgtagtacattgggtacttccatactatctttggaaggttattaggtatttggaagaatccactagtaagcatcataataccttgtataccagcacctgtgattatccccattaggaaatctggtacaatggttgctacgatcatcattagggcttcgactagcattgtgcatgcacaaagtactagcgcaaaatagacaaaatgttcaattttcccttgtaagccagtaagatagtatgcaattgcaccatgtactacagcattaaggagaaggtatggtatggatgacaatgtattggagatgacaaatgcggccacaccatagtgtccatttagtcttttcctgaagatctgagcaacatgagacatacaagagtttaaatttcattaggcaaaatttgatgcacaaacgcaaattcatttgataaatgaatgttttttctaaccagattgataaatgaatgttgtcttaaaatgaaatatttagttttggtcaggctgcagaatgttaggagctttattctaatatttttggttgtaagcttggatactttcctgtaagatatcttggtatttctatgcattttaggaaactaaacaacaagggctagaaaacaattgaggaaagaattgacaagaaactttgtagttgtctgtagggggggagattggtgttaattaattctgtgctttctagtttagccatgtttatcatatatttttttgagatttcaaaaggagttcttcaaaaaattgattattataggccacgtttcttttggcaaggtgatgagcataagaagaaatatagacttacaagataagatattatatgtcatcctaaagatcagggtggtcttggagttcataatttagaaaatcaaaattaatgtctttttagcaagttgttgtttaagctaattaatgaacagggtgtttggcaagatctatggaaaagaaaatatttgaataatcaggcttttaagtcaagttgagtggaaacaaggggattcccatttctggtcgggctttatgaaagttaagagcacatttctaaatatgggttcttggattgtgcataatggtcagcaagtgagattttgggaggataattgggtaggaaatctttttttaaaagataagtacccctcacaatatgctatagttcgaaggagaaactcttcgattgcaatattatggcttatgtttctctgaatgtttctttta

SEQ ID NO: 16770 - DNA, 9037 bp, Oryza sativa
agttcgaagaaaaaactcttcgattgccaatattatggcttatgtttctctgaatggttcctttaagagagccttagtaggtcaggatatgactaatggccatatttattgtgcttcaattgttcatattcatttgaccggggataatgatatttttagatggaattttcatcaaaagggtcaattctctgttcgttctatgtatttagttttaattaatcatggttatgttggagaggaataagtttatatgaaaacttaagatgcctcttaagattaagatttttatgtgatacctacttaaaggggttgtcttgacataggacaatttggctaggaggaactagcatggtcgtatgaaatgttgcttttgcatgaaaaatgagactattcaaacatttatttttggagtgtcattatgcaaaatttatatgctctacagttttcttgtggtttatatgctccacatagtatatctcatattttttagaattggcttgtgggagtggataaaaaaagtagtaaacttattcttgttggagcatccgctatttgttcggccatatggctacataggaatgatatgtttttggcaagtcaccttatgtaccttatatgtaggttcttttcagggcaaaatactggcatgtcgtaatattgattcaatggttaactattgttgttggagcatccgctattcttgttggagcatccgctatttgtcatgggctcaactactaatgtttgatgatgatatcaagctagtaaaaactgcatgtcgtaatattgattcaatggttatgcatcttttcgccaactttggatgaagattcacaaatagaattcaataatcatgtgttcttttaggttggtttttgtttgtgccccagttttgaaaggagtgtgtttttaagtacttgtgtgtgctcctgttttgtgaggagtgtgtttctatgtctttgttttatttagttcgagtttggttgaactggtgtaataattgtctgtacctctttaagtaaagtccgggatttaattccattatctaaaaaaagaatgttgctaatttgattatttcatatgtcataaaatgtgacctcttgtgcaaatggcaagtatttaaaatattttaataaaattatgaaaatcatcactctatatttattaataaataatttattgcttcaaaatctatatatactaattagagaggcttcaccaagaggaaccgacataaatcccaataaaagatagaaaagttagaaattccaatattgaacttgtgagttcatctatcaaacctatggccagatatcgtccaacaaataatatttggatttattaaaactcgagttagtaatgagttagtaaatacctagttgtactcacttggagttctctgttgaagtattcattttagcaatccaaatttcagaatcaataaaaattaataatttcagtttgttttttcacgatcaaataatattgaaatcagaaaatattaatcaaataatatttgttactccctccgtttcaggttataagatattttgactattgtcaaagacaaactgctttaagtctgactacgtttatagacaaatatagtaatatttacattaccaaattagttttattaaattataattaaatttgtttttacaataaatttatcttgcgtaaaaaatatattactatttttttctataaatttggtcaaacttgaagcagtttgacagttgtcagagtcaaaacatcttataacctgaaacagagggactactggttctaaaatctgatttacaatattgtaagccgatattaattttgtaaaatacgtagcatgtatggatggacacgttgatgtagttaaagcttaatggtaattcagtatactcaatccagtaaaaaatagaaatgagttagaattattttatctccctgaattttttcaggatactaagagtttttttaggtttttctatgcggaacctaaattggaaatgaatttatttttctgttctttctctcttagttaaataatgttcttccttttcctctatgtaagaaagtttgatgaaactttgtgcttcagttaaataaactttaataaaaaaaacttcaaaatcaacttcaaatttatggttcaaaattcaaattttggcagcggctgatgatgaatgggggaaacgatgggagcctcggttgcgttgatactttgttgaatcattataaagtattatgattttgcactgttgtatacacaaagtgctggtgaaatgcataatcgattccagacatcgcttctatgctcacctacaaatttatttatgttggtatatacggtcgaatttaaaaaatcatatagagaaaacacgtttgatctttctgttcataaatatacatataagttaaattcataataccttcatgtcctccacgaaggaggggaaccctccaattgccataaaggttagcagtgtggcaataaacattagcatgtgtgatctagcctgaaagaatcaaaattaattaattaatatattaatttttaattgttgatgcatactcgatcagcaatttgcgagagaacaaccaatgttttatcttcacttacttgaattgaatcgggtccatagcccacatggtaaaatatggtcccaaggcaaacagttatgcaaacgtaaatggccaaccgcaaccaataatatccaatatctctatacatattgacaaatgaacatctagtaagcacaagtgtcttagtaacaaaaccaggtcggtttcttccaatcatcgcccgatcctgaatgaaaagaatatgttaaacgtaacttgtgatatataccatgaaaatataattatgctaatgtttacatgtaattatatacgcaaaattagaatagaaaccacctcgtttacgtaacgcatttcctggttcgcaacttctgatgtattggaggatttgtatgagttcaccaaaatgtctattgcttcctcttctggcatgcacgggagtccttcttcactctcctgtatgtgtgtcagcaaattgaaagacaacaattccgaaacaaagaaattatggcatctatatatagcatagatatgttcactttgtcgtgctgaaaaccattcagttataaatgctgtcgtccaatttccaattatgctttacttccagattagagaaaatcctacggtggtgttactcgtagcctatctttttaacttctcttttactgttgggttgtatacatagtatgtgcagaggcctgaggtttaaacaatttttcattatctaaaacaaattatgatattccattaactagttatactgcgtatgaattgtgaaagagcaatgctacacgtactaaatttttcttactaaacttttactaacaatcatctcaaccgtttgatttaagtagatagaagttacaaaaaatctagatgcacttatagcatgacacatcagtgttagtaagaatttagtaagaaaaagttagtacgtatagccttttccattgtgaaatgcatgtaccctagtggttgcagtgacctgagtagcaccccaatgtctgagtcaaatctctataggagtgaatttcaaattggattatttgagggctaaatttcctatttgataggctaagttactaatttaaaaaggctgcatatatccggttggatatagaggccgggtaaaaaatacccttctctagataaaaatgaattgtattcatctaccacactatatatctaaccttatcaaaaatgaatcggagtcacagaccacactatatatatatatatatatatatatatatatatatatatatatatatatatatatatatatatatatatatatatatatatatatatatatatatatatatatatatatatatatatatatatatatatatatatatatatatatatatatatatctacccttatcaaaatctttgttcacagtcctcaagaaatgatccgatgggttcctcattggcgggcaagggtagccattcgaagcaaagaactgcaaattaaaccaattagaaggtaaagacagtaaacacgtacatacatagacagtatatatgggaaactctttaatcccagggactgatgtatcctcatttgttcaaacatcctccaaatagttactaaagattttcaatcaaaataacaacattcatacaatatacatatactctccaaaaaagtcaagccaaaaatcaacttacacaatgaaaaattaaaaagataagtccatcatattagcaattccaatgctgttcacattcatatttgtcctttttttctccatatgtagatcaaatttgaaattgatttttggtggagtggtcgctagctatatatacactacattatcaaatttaatttttcacaaccatcacgcattaaacattgaagaaaacggtacacgagaggatacctcctaagggattagaattcaattcccactatatatatcacagttagatcgactaacctcggcagcagttgaagctgggccaaagaagatggtactcccagaggcgagcaggcagagaccatggaagagctcgaagacctcgctgcacggctggtgcacgacggcgacgatggtcatgccctccctggcagcgaggctggtgattcggctcatgacatggaaggaggcagcactgtcaaggccgctggtgggctcatccaggaagagaaggcggggacaggtcaggatgtcgaggcagatgctcagccgtttctgctgcccgccgctgattcccttgctcgaccgcccgccgatccggatgtccagcgcgccagtcagccccatctccctcaccgtgtcgtcaccgcgcgccagcttctccgccgtcgacatggtgtccggcagctggatttgcgccgagtagtaaatggcctcgcgcaccgtcagcgttgtcattagcacgttgtcttgagtcacgtatgcctgatcggtccatgtgtgcataagcatatatccaatcatttacgttttacgatcgccagttgctcggttttttctctgcttaagggtgtgttcggcgatacacttttcaaacatcaaaagtttttttttcacaggcacgcttatcatatgtctaaacaacgtttttttaaagaaaagttctatagaaaagttgatttaaatatttgtgcgctgacctaccaatttgttttacgttccggaaagggttcccaactgcaaacgaacactaccctctaaaaaactccaaccgaacacaagcttaatatatggagcaatttcgtttatgccctactttgatgtctaatattaattttacccagttttcgtttttgctcctattttttttaaccgaactatcgtttttgcccctagtttggatggtgaaatcaacggtgttaagtaattggtaaaaggacatttataccctcttctttctctgttcattaattgtgtttttgccctattttatacatgtagctttgaaactttatttggttagtatatttaaaattaaatgacgcacattgattaatataacaatttagacagattctgaatttgatgaaattttgacaaaatttaagcagcattttaactggaacttgaccaaaattttgacaacatttcaacatcttacacaatcatatgaaatcatagtagccaataccaacagagataggagagtgtataaatatacttttgctaattacttaacatcgttaacttcaccgtccaaagtaggagcaaaacgataattcggtaaaaaaaagtgggggcaaaaacgaaaaccctaaaaagtaggagtaaaatcaatattaaaaatcaaaataggggaataagcgaaatacccccttaatatttctaaacaagtgttttagaaaattagattgtccagttacactatagctaaatattctagttctttatagtataattgtttatgtcgtcaactttgactaaacttcaacttattgtagacaaacttgtagtcatccatctatgtacaacgactcatattgtagtgaacatgtttgcttcttcgctcctatgtagaaagtggcatttatttgcacagtgcagctcaataaaagctgactaaaaaaatcaataatattcaacatgatgtgtgaaattttggttttatcaattaaatgcttcaacgtattttctaatttgaactcaccgaggttccaaatgcaagtttctgagatcggccataattaaaatttgtcctctcatcttcaagttcaagtccaatcttcctgcgtatatcaacatagtaaaaataaatacaaattgaaataggacgcattatgggccgaacttagatatacaccaacaatgtaatataggaaaaatttgctgctgaacattatgactcgtgactttattgttctcgtaggacactgtaaaaccaaaataaatctttgagagaaatactattaaaatacgttatttgctgatggatactgtcaccgttattttgttattgtcagcatgacaagctaagggaggacaccaacaaggtcagaaataggacgctaatgccggagaagagaagactaaccgcgcgcgagatgaactgccgaccatatcgtgcttacagacattctcttacgggacttagctcgaggtaattaacttaagagcaagtctaatataggatagcccactactaacttcaatttatctatagccaatcaaatagtcaattcatataataattgcttactatactattaagatatggtcccacctatcatacacacagtgtgtcttgaagtccgtgctgcagctggctacagatctgtagtccgctgctcttctctcatcatttatctcattaaaatatatttagagctggctaatagcctgctattgtacctgctctaatgccactactaaccaaccgatgataattaattaactccctgtcaaaatttattcggcaaattggtctgtgctgccgttcgtgtgtgctgagcagttacaagatttagtttagtatcgtacgcaagaaacatgtattgaaatttgatttgaattttacttgaacatggagcacactaaaatatagtcattaaatgcgtgcttatctggcacattaaactccttgggcaagtactatatactaatgaaaggaaggggattagacaaacaaataaaataaaggggtgtttagatctacaggcgtaaagttttggcatgtcacatcggtattatcactagtacagaaccttccatatgtgacgccctctaacatgcctggaattcactactacaaaatcaatttttcatagcgtcattctacttttttctccgacggccatatgcataaaccgccattaaaaatataatgaggctgaggggttaagtaccgccagcgaaaaggccgagttaagatagccgccagcaaaaatatgtccatttttgttggcgacccacttaatgtaccgctagcaaaaatatgtccctttttactagcggcccacttaatgtaccgccagcgaaaatatatttccttttgctggcggccaacttagtgtaccgtcagcaaaaatgaaatttcacaagcagaggttaagagcaccgcctacaaaaaaaaatccttaaaatccctcccagcctgacaccttctcctcaaccttatctgctcatctcccatccccaacccatcgctcccactcaaccacctccaccgtgcgcccttcctcctccgctcctctcccttctgccgccgccaccgcgtgcccttcctcctgcgctcctctctcacccgccaccgcgtgccctttcctcctccgctccgctcccacccgccgccgccaccgcgcgcctttcctcctgcgctccgctcccacccgccaccaccgcgcgccgtcgccgtcgacactcagcgaccacgacgacgctggcggtcgggagagtggatccaccgccaactcgggatctggaggctcctcccctccctctgtaccctctccctctaccagatctggttggaagggagtggtcggcacggaggaggtgatgacgcggtggaggaagaggatgaaggggaggcgcggtggaggaaaggttggggagtgcggatcagcgacgggggtacatgagagctccagatctgttgggcggcagcagtgctcggcagtgcgctggtggcggcggtggtcggcggtgaacggacggagagacgtgcgagcagcggagctaggttgcgtgaggcagatggcggatccggcggcgactcgttcaagtcctgcattggcaagtcctccatcggcaagccattaggcaatccggcagccccaagtccttggatcgacgacggcatggagctccttcctccgtgacgagctgccgccgtggagcttcgtcctccaccgccgtggagctccttcctccgcatcgagccgctgccgggagctcggagccttgggttcagcaaccgctgctgttattctcgtggtgaggcaatgggtgatgcatgctgggattgaaacattttttgttctgcaggatcgacagcatggttggcaaaattaattttgatttttgtgatggtgaaattgcactgtgaggtcaacatatttgaatcgatgcttgaatttgtgattttggacttgtatttgtgaatttgtgagaaaaacaggatgcacgaattcgtaattgagggcatatctgaatcggtttgaatttgtatttttgttttttttttgcatcggagaatattttcgcaggcggccctcttaacaacgcggttgctaaaattggttttcgcaggcggccctcttaatagcacgcttgtgaaaaattgaatttcgtaggcggccatcttaagaacgcccttgcgaaaatcggttttcgcagagtattatgaccgcttgtgaaaaccaatgattttctctggcctttacttactggcgagctgcttagccgccagcacaaacctctttttgccgccagcataaatgttttttagtagtgattagtgggctgtcacggatg

SEQ ID NO: 16771 - DNA, 11426 bp, Oryza sativa
gtcacagatgactcatccgtgatgggctttatactaatgtccgattgagatgacttaatattttttttccattcatcatatgaaatgtttataattgtgagatgacctaaagcaaaataattaactgtagtgtaataacttattttattattcaaaataattttttgggtagtaaagaatttctaatggaaaaattaccaacaataaagttgtataacttataaagatttacaacttttattttggtcatttttctatataactttttttaacagtttaaatttaaatttaaaaatatgataacttcaaacaacatttttaaatactaaatgatttgaaatggaaaaattatcaacaacaaagctgtataacttaccaagatttacaacttttattttggtcatttttctatataactttttttgaacaatttaaatttgaatttgaaaatatgataacttaaaaacaacattttcaaatactaaatgatttgaactaaaaaagtcatccacaacaaagttgtataacttcgtcctccactgccgtggagcaccttcctccaccaaaacattctcctatattgcatcaattgtattctgatgaaatccgtgtccatacggttatatgatgatcaatttgagaaattttaaattccattacacgataaataatttgggaaggagggagtataagcttacgtggagaagtgaggtaaaaaaaataaaaagtgttggctcttataccagtgctagcttaacacgtgttccaagataaatacattaaataatatataagtgaggaagagatatgagaaaaaattgatactaacctatagctaatatattatatatattagctttaagatagactaatagtagtaagtgagctctgctatatattatctttggtgtaatctctaaatcctgactttgtccatgaaaactaacccacaggtcctacgctaagtcaatatcctagttgttagtagtaatgaaaggtcatgatgtaaattttaaatagagtcagcatcgggaagtttcttgtctattcactgtcctaatactgttggctaatcaaagggcatgcgtggctcacctaaattcagtcagcgccgcaaaatgaattcacccttcaactgcctaaagaaatacatgacgacgttgatttctcgtatatcgttcccatcattcgttttattaaaaaaaaccatataatcttttatttattttccgtgacttattttctcgttaaagaaattgtaatgttaacttttattttaatatagttatacaatttttttaataagacgaatgatcaaacagcgaaaagtcaaacgcgtcgtatattttaggatggagttagtatcttataaaattataatactatgtgtgattaatgagtcctccttactacctcattattaatgtagtttgtcggtaagtttgattatcacggtaaccacaagtcaagggaaagatatggactccttaataaggccagtcacaatgggggtttcactggtgtgtcatgcacatttaataggggtaagactgaataaaaaatgattatttgcatgaaatggggatgagagagaaggaaagagtttcatcctggtgaaactcgtcagcgtcgtttccaagtcctcggtaacagagtgaaacccccgttgaggccgattcgtttcattcaccggatctcttgcgtccgcctccgccgtgcgacctccgcattctcccgcgccgcgccggattttgggtacaaatgatcccagcaacttgtatcaattaaatgctttgcttagtcttggaaacgtcaaagtgaaacccctccactgtggggattgtttcataaaagatttcatttgagagaagatggtataatattttgggtagccgtgcaatgacactagccattgtgactggcctaacactgaactgatcaaagagcatttattatggaaagatgattgtgtcgtggtaaatatgctctcgcaactcgtgcatgtagtcgaaagacctcttaattgcaacctctcttcggtcccccttccgcacttctcctcactgtctagcattcttctcggtgacaagtagaaagggacaggtatctcgtttttctctattactatttatcccatcaatcacaacacatttcaatttttccatattatacccctcaaccaccgttttattctcaaccataaattatttgataaagttattatagtattttatttcaaaccttattgtatgccaaactacctagaaagataagtaatttgagatggagatagtactactcactaaaggttttagaagttttatatcatagtcgattaggtttgcctttgaggacggacgtttgtataactaggattgtatatctttctcaatgtttacgttataatattatactaccaacataaaaataatacatttctggctacgcacatgtgcatatatttctttatatgaataaccagaattgcacactgtttttagacggaggtagtacttgcgtcgttgtttaatttatgtaaaagaattaactagtcgaatttatcttattatcttaaaaattccagacaatattcttctatgatctgatgagaaatttgtaatctataaaaggtataagtaccatgattagcaatattaaaattttagttgtaacttatctatactcgtgctgttaaaacaatgatattttaaattttgaacatttttaaaattttttgtcagggtcaatgctgggttgttttttattaactgccaaatttggagattcttaaacgttcgttttattttgaaagggaccagggtgattccattaattggatccaaccaaatcgctggttaccgcaaccaaactacaagcaggatcaccgtgcataccagacgtggaagaccagctaggtacgcttgaatccaaacgtggcatatgaattttacagacaattcagtggtcggggaaaaacaaattaaaattttcagattgaatcttaggccattaaataacaggacccatacgaagaccctatatagttaccaacacacaatcttaggctgagttcttctctctatgtttccaatccatctctcgtattctacaagcacgtttttcaaactgctaaatgatgcgttttttctaaaaaaagtatatacgaaagttgcttaaaaaatcatattgatccatttttaagaaaaattagctaatacttaattaatcatgcgctaatggatcgctctgttttccgtccacaacagctgtgttcccgacactttcaaacgaacacagcctaaatattttggcacgcgcgtaatattacatttctagggagttccactcagctatttgacccttatataatttacagtgtagaatatactgtaatttcaatgagataattccttatatgctactgaaaattggtctgatcccttgttgccactgaaaattggtttttttcttatatgccattgttccaaatttgcgcaccctctcatgctactcccgtctgttaactatgtgttgaccattaactctcaagtaaaaaagacatatttgcccttctaagtataggatatgcctaacaactcaaaatggcaaatacatcttttttttacttgagagttaacggttggcatgagagggtgcgtaactttggactaaaacatttagtagaagagccaattttcagtgacatataagggatcagactaattttcagtggcatataagagattttctcaatttctattgatgctcttggctagaaacaggcaaatatcctgtctacatgcaaaaagaaaaaaaaactttggatgtttggacactacgtgcaaattaaaatgatgtaacactgcacattgccatgtttatggtataagcgacctcacattaaggaaaattcagttctcaaagagatgacgccttatgcttagagttaaattttgaaatgttcaattaataatagaataaaatactaggattttatatgtgaaaatgatatcgatatatttgtcatataggaacttccgtaaagttttttcttcatatagtagttctgaggcaagtagtggagattagttctatctgtgaaagtttaactatttaaaaagactttctcatgtactatcttcgttcgttttttaatatatgtcgctattgatctttttgaaattcgttttactattcattttattcaaaatttatgtgcaaaccaaccaaaatataagtcatgcttgaagaaccttcaaggataaatcaagtcacaataaaataaataatagttacataaattctagaaataaacgtatgtcaaaataacaacagtgttatatattacaaaacggttggagtatgctacttgctactaataatagtgtggttggaggatttgatttttttttaattccaaaactgtcaaaatgatatgtaagcacatgtacagccccttgccgaattcaagatgaatgtaattaagctcagatcagctagcatgcgatccatggggagaaactaactgagcaaagtgtacgtgttgggttaccggcgagggtgtcgagcagcgtggtcttgccgcagccggagggccccatgatggccagcacctcgccggggcgcgcgcagccgccgacgccgttgaggatggcggcggcgtgccccctgctgtccaccgccgtcacccacacgtcctcccacgtcaggaacacgcccccgccatcgccgtcgtcaagccgcttctcccctcgagccgcgccgacgacgtcgatacctatactatcgaacccgctggcggcggcgtgctccgtcgtcgccgccgctgccgccggatgtagcggacgaggaggcgccgtgtcgccgcggggagcggcgcgccgaccgcggagagccgcgagcacggtgcggaatggggaacgcaggaagccacggacggcggcaccgtcaccgccgccgggagaggttcgccacagcgggagcgacgggcttggcgtcggtgcccagcgtggcagcggcgatgtcgccatgccaacagcctattagcgcttcacagttattcagtacaagtgtagaactgaaaccactaactagcgttctcttacgttttttctctcatctcctcgggttcttttctaaatgtactataatagggcttattaatatagataactccacatatgtaggcatcaactttaaatacagttggttgcggatgtctgtgtttgatgtctgcgtctggcaataacactatacccaagttcgttagcatcaggatttgctagcatatttggtgcgttcgtttctggcggttgggaactcattcactgctacacgatagatttttctggacgtcacccccatttattttcatacggtccgtaagtggaaccacacgaaaaaatagagggaccggcaccgggctgtcgcccgcacgggaaaatgcattttcccgtacgggcgtcttaagagtaccgcacggaaaagttctcattatcccatgcggtcgacttaagaggaccgctcggaaaaatcaattttcgtgtgcgagctttttaagtggaccgcacaggaaaatacctccctcttttcacttccacccacttcaaatttttcacatcctctctcttcctttttcccttttattctccctcaaccactctcctctctctctaccttatctctattctcagccactcctccccaccttcccctactccttcccctcccctcccccgtcaacggcggcggtggcccctcccctcctccccgtgagggagcagtggctcggcggaagcagtggctcagcgagagcgaccaggaggaggagaaggtggcggcgggagagggcacgggggcagcgtcggcggctctattggcagggcgcgacggctgctggcggaggtgacgcggcagctcggtgagcggaggagcggcggccgcgggacgggcggcggacggcgcggcggccgaggcatcgtgcggctcggcgaaggagcgacaggagtgggacaagcggcagacgccacggctgccacggcaccgcgcggcttggcgaaggagcgatgagcggcgagcggcgcacgaggcgacggccgggcgatgtggcagccgggctcgacggcgactttcgatttttgtgttttttttatttttggtttttttattccgtgcaggtgaaataatttgaccgcacgggataatctattaacccgtgcggtccacttaacccgaccacacgggaaaatgattatcttgtgcagttggccgcccgcacgtgaaaatatttatttttccagacgcgtgggtccagacggggaaaacctccgcacggaaaaatcaatttgaccgcacggaaaaaatagtttatgtagtggtgattctctccgcacggaaaacggagcggtctattatcacgtaattttttttaaaaatggatcaacatggtttttttaagcaacttttgtatagaaaatttgtgtaaaaaacgcatcgtttagtagtttgaaaagcgtgtacacgaaaaacgagagggtgagttgggaacaccctcttgcaaacagagccggggaccaaaatcttgtgaatttcagtaaatttcaaactatttgaccaaaaaatcacaaaaaaatgggtaacaaaatgaaatttcaggataaatagtttcgtcctgggtttgctgaaattgaaagccctattaggattgactcataatggggtcttttcataaatttaatttagtggttcgactccattccgtatcaatatcttcaactaattttgacttgggatcagatgacgatggatgaatctgttccattatatagtgtacttagaatcaagtggtcaattggcaacacaattctccgtccaaataaccctatgacgctacaaatacatacatggatgtatatgctaacctatgattctaatatacgacactattgatattttagatacgcttgaccattaatcttatttaaaaaatatatgtaattaccatttattttaatatgatttaatttattatcaaatgtttttataccacgacttaaaaatttctatatttgcaaaaaaaaatgaataagacaaatgatcaatggtaaatttaataaactaatttggtatcgtagatgttgctaattttttctataaattaggtcaaacctaaaaaattttaactaagaaaaaatgaaacgacttacaatatgaaatatgaaatagagtattaaaaatcggaggtagaatatatatataggcagatagaactatatgactattcgttctattgaaataattttataaataagttattactaaagtacatatctatgcttttataaaaattgaaattgtttccgccagaattttggtatgtcatccgtgtttgaagcaattttaattttatgtttctaccaaattttttcctttttttccaactctagagtgtctctcttacctaagacatacgcgaattaattgggcccgtggcttttcacggcgtagcacgccccttgccgcacgcagcgatcgggtccgcgcctaagtccgttttccacacgcgacattgcgcaccaccgcggttgggcccgtgacgccctcgcgcatgcgatttgcccttgccgcatgtccgattgttattgtttcgccctcccccttgatttaaaaattgaagatgtttttgtcctgagttcattttccaaatgcgacattgcgcgccaccgcagttgggcccacgacgccctcgcgcgtgcgatttacccttgccgcatgtccgattgttattgcgtcgccctcccccacgatctaaaaattgaagatgtttttgtccaaactatggtacgtcgtccgtatccgattcccatgtgcgtaacattcatcacgaagtcacgacttacgagtgaactgtgaaagagatttcgtgtgatgtggatacgaagcgaatgaaattcgcagagtccgtgtggataacatacatcgttgcccagatcatccaatctattcgtattacacgtcacgttttctgggatatgctaatatgattttaagtcagtctctacacatgctcgtatgtactattaggatactgttacaataatccacaagaatcaattttactttcggaaagaacatgccaacggaaataaaggtaaatgaatattgtgataagagtaaattaattagtcagtagcaccgcaaaaacctcataaaaatggaaagataagagtagaagaaatttatttttgaaaaatccaaagggatctgtatttcaagttcacctcaatttaccattcttcgcttatgtgcacccagtcttctactaagatcagtagcatacaatgcgacaatggtcgagaggttgacaacatcactgcacagactttcttcctcactaatggcgtcgctatgcggatctcatgcccccacacgtctccaagaaacggtaaagccgagcgtatacttcgttctattaacaatattgtgcgctcccttctgtgtcaggccagccttacaggctccttgtgggccgagaccctccacacagctatccacctcatcaaccggcatcctacaaaaatcctacaccaccactcctcctactatgccctcatcaacggatttaagattattcaaaactttattaactaggtgaaaccccgcgcattgatgcgggaatttaatataataaaaataaaaaaataacgtgtaagatagatagataacattatattaagtaaattaatgtggtttatgataatttaaatttaaaagtatgcagaatggtgattcaaacgtaaaaaagtaaggtcgtatgacttagtggaagaagaaaagtagggagatagtttggaccgtagattaatcatctaaaggctaaaaacaattgatgtgatatgacttaattaaaggaaaaaaggagaaagataatttcgaccatagattaatcttttaagcactaactaagtgagggtgaactatataagtacataggatatcataaatcataataaagatatacattaaaacattatgtgaattatgttggatgatttaacatgtttgtatttaaaaagctcttaaattataaaaactataaagatatagcatgtttgcatgatgtttaaatatgatgattgttagtggatgataatgtggcatcttattaattagtggatgatgatgtggtattttattagtggataatgatgtggcatttttgcatgttaaacttatggagttagtgggggataactttacagttagataggataagcggggggaggtggctcaggtggggcaggtggcgtatcgtctggaattttccattgtgcaccattcaccgcggggtccatgtcacacaattgcgttgagacctgctaatcgtatcactgcagctctccctcctgttaaagatgaaccagaaccgattacaaggcaggtggtgaacaacgaactgattcgtcgtggtgcagcggcaatcaagtaagtcaaggttagccggcaagggcggccggtgttgcagaggatagctgtggctagatcttgggggaactaatcccttccgtatgtaaaatatagtgactcattaacacaagattagttaagcattaactttttttttgaaaaataaattaatatgattttttaatgtaactttcccacagaaattttttacaaaaaatatactgtttagcagtttgaaaaatgtgcgaaaaaaaggagaaatgtgagttagaaaaattagggaaataactcaaccctatagctgctgtgctctccttttttcgactgatccgacttggggacaagccatctgtgatggaggggagaatgttatgcggttatgccttaggatcggcagcaaccaacgtctaaaggaaagaggcccatcagggagtcgcggcccaatgttcgctgcattgtgccagatagggtggcgtgagagggagttggtgtgcgtctataaattggcaaaggccagcattgcaacgcaatgaacgcattgcaactcaaaacatttatccccaaatcaagtcctcctccccacgtcaaatctatgttcttctccgttgactctacttttttataaactggaaaggtagcccacgcatttacgcagacatgtctcatacactaaatttgaggtatttataaaagcgatatattaaccggagaacatctgacactatttctccacaaattgtttttgttagcattaattaattatttaataatattttaacctattagccttatattataccatatataagtaatatctataagcaattatttataatcttcttcatcatttagaaagaaggtagatttattttctttagaaaacatgtcaacgaaagtaaaagtaagtgtaaaataaaagttaaggtgtttttcattgttttttgattgtataatatattatcataatctgttaaaagatgaattgggtgggaggtgaagctccacaaaatgcatgggtttatatagcataatatgattgatatattttgagaggcgattcatctataagtatttcatttagagtggatgagaggctccacgcaacctaataggactacgataacgatgaaatatcattgcacaataatattttagaaacgtcatgtaccatgtataaacacttggttttttatataagatagatctaatggttagaaataatggttctaccggtttaaaaggcataggggtatttaaaaatgtagcttaaaaattatggttatttttatccaatattattacgaagtgagcatagctcaactagttaggtttcttcttatgaaatatgtccacccatgttattaatcagaaggtttaaaatctattagattcttaagaatatttgaatcagtgaacaataggtgtagttcgtagaatatttatgactaaaattaatgaacttctttaagcctgcaggtcgactctggatcatcccctaaattttatagtaaataatctaatagtgtgcacaaataaatttattttatatgatttagattgtataattgtttaaaattttttatcataaaatatttttaacatctaactaaaagaggaaaataggagagaagaaatatgtgggggaggtgatattttttccatctaactaaaacagaaaaataggagagaaaagaaaaatatgggcgaggtaagtacacatatgcatactggcactggtggagaaaccatctttcgtcggtcggccgatttccacaatagtcccggatgcaataaaaaccggggctaaagatgatctttagtcccggttcaaaagggtaacgggcatatttgatctttagtcccggtttgtgttaccaaccgggattaaagatcatctttagtcccggttcgaatgctgtcaggacctgtcaggcccccccgggatctttagtcccggttgg

SEQ ID NO: 16772 - DNA, 3287 bp, Oryza sativa
tgactcatgtagatggatcggcaatggatgtacgctgaccggcggtccaaagagtttattgacggcgtgcactattttttgagagtggccgaagctaacaggcaaaggggttttatttgttgtccatgcaataagtgtaagaatcagaaggagtattctgcatccaggactattcatttccacttgtttgagtcggggttcatgccaagctataattgttggacatcccacggagagcaaggtgttgaaatggaagaagatgaagtggaagacgacaatattccggactttgctcagtatgttggatttgaaggaaatcaaacgggcgaggaggaaatagctgctgatggtaacgacgttgcggatgatcttggtcagatgttgcaggacgccagggaagactgcgaaagtgaaaaggaggcccataaattggacaacatgttggaggaccacagaacttcgttgtacccaggttgcgagcaggggcacaaaaagttggataccactctggagttgttgcaatggaaggcaaaaaatggggttagtgacaaggcatttggcgatttattgaaactcgtcaagaacattcttccgggggggaaacaaattgcccgagacaacgtacgaggctaagaagatagtctgcccgttaggactggaagttcataagattcacgcatgtccgaacgattgtatcctatatcgcggtgaggagtatgagaacctagaagcatgccctgtttgcaaagcactacgatacaagattagacgggacgatccaggagaagttgacgggcagctaacaaagaagagaattcctgctaaggtgatgtggtatttccctataataccacggctaaggcgtttgttcaggaacaaggggaatgctagaatgttgcgatggcacgctgaagagcgtcaacaggacgggatgctgagacaccccgccgatggttcgcagtggcgaaacatcgacagaaaatttaaagaatttggaaaggacgcacgaaacatacggtttggtttgagtacggatggcatgaatccttttggagagatgagcagcggccatagcacttggcccgttacgatgtgtatctacaacctccccctggctatgcatgaagaggaagtacataatgatgccgattattattcaaggtcccaagcaacctggtaacgacatcgacgtgtacctaagaccactggtcgaagatcttaaacagttgtggaagaaggaaggtgtccccgtgtgggacgaggacaaacaggaggagtttaacctacgagcgctgctgttcgtaaccatcaacgattggcctgcacttagcaacctatccggacagtccaacaaggggtacaaggcttgcactcactgtatggatgaaacagaaagtacgtatcttaagcactgtaggaaggttgtatacatgggtcatcgtcgattccttgcagcaaaccacccggtacggaagaaaggcaagcacttcgaacataaggctgaccaccgtacgaagcctaaacatcgcagcgggaaaacagtgtttgctatggttaaagatcttaaagtagtgttcggaaaggggcctggaagccagcatatagagagcgaagatggtcacgcggcgatgtggaaaaagaactctatattttgggagttaccatattgggaattcttggacatacgccacgcaatcgacgtgatgcacctcactaagaacctttgcgtaaaccttcttggcttcctaggtgtatacggaaagtcgaaagatacactggaagcacgtaatgatctggagcatatggaacaacgcggcgaccttcacccggaaccaaaggagaaaggaagccattacttgagtccagccagctacactcttagcaaggcagagaaggaaagtatgtttgaatgcttggagagcataaaggtaccgtctggatactccacgaatatcaagcgaataataagcacgaaggagaagaagttcacaaacctaaagtctcatgactgtcacgtgttgatgacacaactgctactagttgtaataaggggtatccttccagacaatgtccgggcaacaataacaaagctatgtgcattcatgaacgcaatttcgcagaaggtcttcgatccggatagattagaagcccttcagaatgaagtggtgcaatgtctcgtcagttttgagttgatatttccaccttcatttttcaatataatgacgcatctgctttgtcaccttgtgaaagagatccgtattctcgggcctatgtacctacacaacatgtttcctttcgagaggtacatgggcgttctgaagaagtatgttcgtaaccgtgctcgtccagaggcaagcatcgccaagggttatggaacagaggaggtcatcgaattttgcgtagaatttatcgaagaccttcgcccaatcggggtacctgaatcacgccatgaagggagactacggggaaagggaactctcggaaggaaagcaataatgacggtagacaacaatttattccgtaaagcccatttcactgttctgcaacactcttcattggtagctccttacatcgaggagcacttggctctagttcgcgccaggaacatcggtaagtccgatgcatggattacacggcatcacattaatactttccccgcgtggctacgacaacatctcatgggtaacgagtcgatcaaccaacaacttgccttcctggcgaggggaccgtctgggtcgatcgcgacattccagggatatgagatcaatgggtacacattctacacgagagcccaagacatgaagagcacgaaccaaaacagcgctgttcgtgtcgatgccatgggacacgatggaacaactgccacgtattacggtgccatcgaggacatatgggaacttgacaatggtcctctcaaggttcctctgttccggtgccaatgggttaggttgactggtggaggcgtaatgattgatgacagtgggatgacaactgttgaccttaacaaggttggatactcggacgaaccttttgtccttgccaatgatgtaacgcaagtttttttcgtgaaggacatgtctagcaaaggaaagaagggcagagggcctgatgagcctaagcgtcaagtggttctcccaggcaaaagaaaaatcgtcggagttgaggacaagactgacgaggattacgatcagttggatgggcccccccctttcacggtgacgattgaccataacatcctcctatcaaatgaagacaccccttactcacgcagcgatcacaagggggat

SEQ ID NO: 16773 - DNA, 659 bp, Oryza sativa
cttcttcttgaggaacacaactcccgatggtaatgcgtctcccgaaaagcagcggtgaattcaagccaagtgataggtcagccagtagtcctgttcagacgaaagtgatcccaccatcaaaaggcagggccatgcaactgatgtgatgcaaatgaggccttctcctgatcagtgcactgaagcaaatccaccttcttgtatatggcatgcaaccaatcaccagcttcaacaggattagtggtactagagaaaataggcggcctcacacgaagaaattatgctaacttgttatgggaaggtgcacggttatttccttggttatgctggttgcgaagttgctgcatcatcatgttcattaactgagtctgttgagcaagaacttgagcaagagtgggattcccttcattgttattgttactggggccattcccattgctgagagtgttcaccatctggcatggacagggcacaagaagagacaccgggggaaactacttaggacagagaagtactttaacttttattgatcttaactgagtttcattattacaaactgaagactctcaccccactaaactcgccaacttcataacactcaaaaacaaacgaacacatgcacttacatcccaccactgatgtaaatcacatgcgagacacac

SEQ ID NO: 16774 - DNA, 37658 bp, Oryza sativa
  unsure (1)..(37658): unsure at all n locations
atattcctggtttggagatagaactgtgcagccgagatggttgttcagaatgggtgggcctatacaacagggtatgttgtatagcgttggattaatattgtttaattattacttaactgttttattaaattctgaaatgtttgctaaatgctgcttttgcaaatgaaaccctactatgccatcctttgttatcctgtgcacttgcatatttgctgcgtggcttgctgagtatgtcatatactcaccttgcaatcattcatcagaggaagagatctacaatgaggctgctggtgtggaggattaggtgtagccttggtcaagctgcctgtggagtggagctgtctgtgccgtttattttattttccgctgcttagatctttattgattgagaggaactatctacctctgtaatgacattttattcgcttattaattagagtaataattgtactctattatcaatttgttattgtgtgcctcggctgattcctggacgagggttcacacacatgtaagcgtttggaattttggatagaaattccgggtgtgacaggttgtgtatgatattagtactgatgacgaacccagttcgaccgaccattccttagagagagagagtgattgtgggggcgaagatgtaatttatctgtaaagccattgccttttcttttacttgtacaatgttgctgggtttaaattattcgatatatttttcttcgaaatcaataaagatgtgttttatttcttttcgctatttttgcattgtcacttcgcatgctttcgttgggtcggaacgtgtcggcccctttgcgtatattagcgaaataggtttttgactttttagctttcggctttcgttttcgatccgttttattctgcgttggaggaagcactcgtgctttcgttttgatcgagtgtaacggtgttcggttagttgtttcccgaaacaagctgttgtggtttcaacgttcggcgagtgatgcttcggccgattcgtttcgcccccttggcattttcgctgatcaggcgtttgccttggggtttttcaacaaattatcaatcacacaaataaaaagaaggcggaggacacaaaaattttatactagttcgggcctccatgatggataatagccctacatccagattttttgtcttttttcattttcctcttctttttttttgcattttcgtgccgaaatgcttacatagtgccgaaaggcttacataacgatatgtacatttttacaagttggtgattcgggtgccacccattctacacatagaaacacttgagagaggcagtgttccaggaatgctcgaactcttcgccttccagtgtcgctaggcgaaaggagcccatcctagacttgtgcttgatgaggtacggtccttcccacttcgattcgagcttgccgaccgccactgggttcgctttcctccttaggacgaggtggccgggtaacagctccatcggtcgaactttttttgttataagctgccaaagtgcctgcggcatatttgcgcatgtgttctagtgcttcgactttcaccccctccaggagttcgaccgacacctcgcacccttcttcgcccccagagaatatcacccttggtgaattagcccctagctctgtcggggtcattgcctcatcgccatagaggagcatgaacgggctgaacttggttggccttatgggggtcgtccgaagggcctagagaacagatagcatctcatccggccatttgcccttcgctgcccccttaagccttttctttagtgcttctaggatcttaccatttgcgcgttcggccgccccgtttgactgcgggtgcgcgaccgacgtgaacctgatttccaggttaagcccttcgcacaactctttgaacttgctagagttgaattgcttgccgttgtctgtgatgaacttttttggcactccgaaacggcaaacaaagtttttccacacaaacttctgcactgctgctgaagtgatcgctttgaggggttcggcctcaatccatcgggagaagtattggatggccacaattgcgaacttgtacccgtttcgcaccaccgggaacggcccaatgatgtccaacccccatctggcgaagggccagattggtgcgataggttgcagctcgtattggggcgcagtttggcttcggccatggcgctgacagctttcgcacttcttgacttgctcaacacagactttcagcacggtgggccagtatactccttgtcgaaacactttggaggcaactgttcttgtggcctggtgtgcgccacatagcccctggtgtatttccttggccatttcctcgccttcggcaaaagagatacagcgaagtaaaggttggagtacgccagagcgatatagttggcctgagactattttgtatttcgcggctctgagctgtaagcactttgcttctgcttcatcttccgggaaccagccgctcttgaagtattttacgaatggggttcgccagtctactggatcttcgcccagttctgcctggtcgattgccaagacatccaggccctctgcgggcacatttggtgcgtataggacttcgaaaaagatgcccggtgaatgtgggcccccataagcagcagatttcgccaaggcgtctgcttcctcattctggcctctaggtaaatgttggaccgttatgtcggcgaagcacttttccattgaccgaatagcctccaaatacctcttcattccttcttcctttgcctcaaaggacttatcgacatgacctgccaccaacttggagtcggttcggatgagcaagcgccgaacccccaatgctttcgccttttttaggcccaaaagaatagcatcgtattctgctgcgttgttggttgtgtcgaactgcagccttgcggcatagcaaatcggcaggccccctggcgaagtgagtaccgccgcaacgctcgcccccttgtgcgaccacgagccgtcggagtacatcacccagggttgttcaacgggctcgggctcagaggcgaatgccagtgtccattcggccacgaagtcagctagcacttgagactttacagcaatgtgagcaacaaaatgcaagtcgaaaggggatagctccgccgcccacttgctgagctagccagtaacttccttgcctcggagtacttcgcccaaagggtactgcgatggcaccgtgactttgtgggcctgaaagtagtgtttaagcttgcgcaaagccatcaccagggcgtaagcaagcgtttccatttcaatgtatcttttcttcgctccttgcaatgcttcggagacgaaatagaccggtttctggcctgactttgtttcttgaaagagggcagcactgactgccactggcgaagctgctaggtatagtagcagttcgcttcctggtgctgggctgattagggcgggcgggctttgcagatattgctttagctcctcgaacgctgattggcattcgggtgtccaggagaattttcccgcgccccggagggtcttgaagaagggtaaacctctttcggctgcctttgagaggaatcgacttagtgccacaattcggcctgcgagcttttgaacttcacgtacgctcgacggaggcttcatttgctaaatggcatcgattttctcggggttcgcctcgatgcctctttcagaaacatggaaaccgaacaacttgcccgcgcgaacacgaaaaacacacttctcagtattcagtttcatacccgccacgcgtaagttgtcgaaggtctcctgtaggtcggacgcgtggtcgaaagccttgcggctttttacgacgatatcatcgacataagcttccacatttcgccccaactacttgtaaaggaccttgtacaccagcctggcgaaggttgccccggtgttcctttggccaaaaggcatcctgaggtgacaaaaggtgccaaatggtatgatgaaggctgtcttggggatgtcggccgggttcatgttgatctggtgatagccggagtatgcatctaagaagctcatgagttctcagccagctgtcgaatccacgagttagtcgatccgtggcaaggggaaatcgtccatcggacatgccttgttcaggtctgtgaaatcgacacacatgcgccacaaatacgagtttctgttcatcaaagattgggtccagtaaatcaagatcatggccaagaggacagtgtaatcaggaagaatcaatggtgcccttctggtattttcacaaagaatcagaagagaagggttcaaagattgaggaacagggagcgccttcaggagattgaacaagaaattaatcatcggctgaagaaagcaaagccaaggcaggagtgacgtgttaagaatcaggttcctatagccgatgatgttgcggccgatgaggcaaagaggttggcaaaagggaagagtgttgtgacggcactggttaacatggtctttaccctgccagccgaattcgggatcgatcaaaccgatgtcgacgaggtggaagaggaatcgatcaaaccagagcaggcggtgttcgagaagcctgaaggaacagagaatcgacatcttaaaccattgtatataaacggttatgtcaatgggaagccgatgtctaaaatgatggttgatggtggggccgcgataaatttgatgccttatgctatgttcaggaagttgggtagaaatgccgaggatctcatcaagacaaatatggtgctcaaagactttggtggtaatccatcggaaaccaaaggtgttctgaatgtagagctgacagtcggcagtaagactattcctacaacgttttttgtcatcgatgggaagggttcttacagcttgttcttggaagggcttggattcatgccaattgttgcattccttcaactatgcatcaatgtttgattcagtggcaaggcgacaagatagagatcgtgccagccgacaggtcagttaatgttgccagtgccgatttagctctttgggagatggatggccttgattgtttatctagaaaagtctgggatggagattttctaaaagtgtccgattctgatatacaaccaattgaagatggagaacccaagctattattttgagggcgtcgtggagggttcaaatgtctacactaaggatactgtagatgatctcgatgacaagtaaggtcaaggtttcatgtcggccaatgatttggaagaaatagacataggttcaggcaatcggccaaggccgatatttattagtaagaactaatttccagagtttagaaccaagctgatagagctcttaaaagagtttagagattgcttcgcttgggagtattatgagattcctggactcagccgatcgattgttgaacatcggctacctatcaaactaagggttaggccacatcaacaacctccgaggagatgcaaggccgacatgcttgaaccggtcaaggctgagattaaaagattatatgatgctggttttattcgtccttgccgatatgctgagtgggtttctagtatagttcctgttatcaagaaaaagggcaaggtcagggtatgcattgatttccgaaatttgaataaggccaccccgaaagatgaatacccaatgccagtagccgatcaactagttgatgctgcttcgggacataagatttgagttttatggacggaaacgcaggatacaatcaaatctttatggccgaagaagacattcataagacagcttttaggtgtcctggtgcaatcggctcgtttgaatgggttgtcaagacctttggcttgaagagtgctggagctacatatcagagagctatgaattacatttaccatgatctaatcggttggttagttgaagtttacattgacgatgtggttgttaagtctaaggaaatagaggaccacatagccgatttgaggaaggtttttgagagaactagaaaatataacctgaagatgaacccgacaaaatgtgcttttggtgtatcagctggccagtttttgggatttcttgttcatgagagggggatcgaggtaactcaaaggagtgttaatgcgatcaagaagattcagcctccggagaataagacagaattacaagagatgatcggcaagataacttttgttagaaggtttatttctaatttgtctggaaggttaagaaccttttacaccattgttgagattgaaagccgatcagcagtttacttggggggcagagcagcaaaaggctttggataatattaaggaatatcttagctctcctcctgttttgattcctccacagaaaggaatatttttaggttatatttatcggccggtgagaagtcaatcggcccagtcttgattcaggagttggaagggaaggaacgagttgtattctatctcagtcgtcggctcttggatgctgaaactcggtattcccctatggagaagttgtgcttgtgtttgtatttttcgtgtacaaggttgaggcattatctactatccaacgagtgtactgttatatgcaaggccgacgttgtcaagtacatgctatcggctctaatattgaaagggagggttggaaagtatatattttccttaaccgagtttgatcttcggtatgagtcgccgaaggcgattaagggacaagctatagctgattttattgtggaacatcgtgatgattcaatcggctcggtcgaaatactgccatggactttattctttgatggatcggtgtgtactcatggttgtggtatcggcctagttataatttcccctaggggggcatgtttcgagtttgcttatactattaaaccgtatgcgactaataatcaagctgagtatgaggcagtgctcaaagggttggaattactcaaggaagttgaagccgatgccattgaaatcatgggggattctttgatagtaatcagtcaattggcaggagagtatgaatgcaagaatgatacattaatggtttataatgagaagtgccaagaactaatgaaggagtttcggctggttactctaaagcatgtctctcgataacaaaatattgaagctaatgatttggcccaaggggcaacggggtataagccgatgatcaaagatgttaaggttgaaattgcagcaatgacagccgatgattggaggtatgatgtgcatcagtatttgcataatccgtctcaatcggcttctaggaaattgagatataaggcattaaagtatacactgttggatgatgagctttattatcggacgattgatggagtgttacttaagtgcttgggtgccgattaggctaaagttgcaattggcgaagttcatgtaggaatttgtggtactcatcaatcagctcataagatgaagtggttacttcggcgtgcagggtatttttggccgacaatgctggaggattgttttagatattataaggggtgtcaagattgtcagaagtttggggcaattcagcgagcgccggcgtcggctatgaatcctattattaagccatggccattcagaggttggggaattgatatgatcggtatgataaacccaccattgagtaaaggacataaatttatattggtggcaactgattatttcaccaagtgggtggaggcgattgctttgaagaaagttgattctggggatgcgactcaattcgttcaagaatatataatctaccgatttggtattcctcgaactattacaactgatcaggggtcaatcttcgtgtctgacgagtttgttcagtttgccgatagcatgggtatcaaattattgaattcttcaccttattatgcacaagataatgggcaagccgaggcgtctaataaaagtttgatcaaattgattaagcggaaaatttctgattatcctcggcaatggcatactcggttggccgaagcattgtggtcttataggatggcttgtcatggatcgatctaagtccctccttacaaacttgtttatgggcatgaggctgttttgccgtgggaggttagaatcggctctcgaagaacggaattacaaaacgatttaacagctgatgagtattacaaccttatgaccgatgagagggaggatctggttcagtcacgattgtgagcccttgcaaaggttaccaaggataaggaacgtgttgctcggcattataataagaaagtggtaactaaagatttttcggaaggagaacttgtatggaaattgattttgccgattggtactcgtaaattcggcaagtggtcgccaaattgggaaggatcattccaaatttataaggttgtgtctaagggaccatatatgttgcaagggtttgatggtgaagtctatgggcgagcgctcaatggcatgtatttgaagaaatactacccaagtgtttgggttaacgcatgatcggctagtattgccgatgcatgacagccgatgtgtttacatcgcgttgagatggccgatattgttatatcgcccttagttgtttttcatggtgtaatcggttgtggtttgccggtgtacaacagccgatattgttatatcgcccttagttgtttttataattttatcaatgcttttgacattgtaaaattaggggggcacatatatatcaaaatgcaatgcaattttttttgaggcaaaatttttgagcgaatttcaaagtcatattaatcggcataaaggattgtcaagacagtaaagtactagagcatattagctgattacaaaaatttctaagtcctattacacaaaagttattgagacaagtatcgctgcatagccaaaatagccctttgcctaatttgttctttttcttcaatagcttgggcatgttgagcatcagttccagagatgactttcagggacttggttaggtcggcaacattcttgatagctgatttgagccttgatttttgttcttcaattgattttgggagatcggctagcttcttgtgttccatatctagctcggcattgcattcaagttgcgccaagagctcaatcttgcgagcttcgagccgatcaatattggatttgatcggaccttcagatagctgttcaagtttggttttttcttcatgcacaagctgtcgattagcttggattgtggcctcaatctctttgcgctcacggcgttcggctagtcttagcttggctttttctagcttgaactgatgttgctcaagataagcggctggaattaggacatcggccaaatcttcgggaatcagagcttgaacttcatgcagtcgtgtcctaattgacccacagtcaactaacaaactgtctaaagaagaggcttctagccgatgcgagatgtcttcaagtgtttttctcacatcatgagataggggagctagggctttgcttgaagtgtcttcttctgcctcatcaaggtaatctctgatgtcaaaagagaagagatcggctagaacctgcagagacaatttcgaaaagattaagagctgggtaaattatagccgatctaattgttgagacaaagggaaacttactgggatagcaggagcagctggttgttcttcctcctcgacgtgatgactccccacagccgatggagtctgatcacttgacgattgttgtacaggaggagaaggaagaggaggctgcgaaatagaccagtgttatatagagtcggttgagattgattaagtaaaagaattaaggacatcttactggtggagccgatttaacaattgttgctgctggttttttcttcacagcagttttcttcttctgcaaacacaaagtctatgagtaattagccgaagagggaagtaattttagaagaagtcaaagagagatacttactcttgtaaaatgaacaggggcagaaggagttggaggcgtttgcttgggtgaagccgatggtgttctttctgtgtcactcatttcggctacagcctggtcatcatcttcaccaatttcctcttcatctaaagctagttcaatagatggatccaaggcgtgcagatcatcagctggcttatcagtcggcatagttttcttgaatttgacctttttctttggagctaaggccaaggtactcacggccgatgatctggttttcctattttttgcctgcatcggctggttccctggttaggccgtgaaggagagttgaagtcttgggggcatgatagccgataacggggggagatagtccacctccattcagaattagacctggaacatattgaatgttcttgctattgttactttggtgaggaggggaggactctgttgtctgcaacacaggatcaagagattagtcaagtaatgaatcggctaactgattatgcgatttagtaatgataaagtttacatggggtatgacgtcagggaatagatctgtcatataaattgaagctgattgatgaaatagatgcagcttccattcaccccaccatctttcaaagtttttgcttctaaatcctgccaactcaatattatcaatgctgcccagagggggtcctggtaggttaagtagccgatccatcattagagtagatgtgatttgtcctcggcactgaatcttgtcgacaaagaataagccgattgggagttggcccaatccaagttgtctggccgagctcattgggtgataaaactcgtaggagacttggatgtttctcccttggtgaatgccgacagggaggatgcatgggctgattgcagctataagaacttctctggattttttgaatttttcatgattaatgtcttcaaatctaaagtctgatggaagttcaaggtttgctgagtcttcataaggaaaccagattcgtgcatctttcttaaaaccttcgtagaagctgcagaaccagtccttgagtagcttagccgatagcttcgctccagcatcggttggtgtggatgcatattctccatatgacatgcatctgcgatgggtgcgctcttctccgtcgtcttccgcaatcggctctggcagtgggaattcagcttctgtcacagagggccgattgacaaccttcatgactatcaggtttaaccaagtttgcagcagccaccatggtccacctgctccaactattgagctgacggctattttagccgatgcattgttcaacatttggtacagatagccgagaaggattttgcccacaggaaattctttctttgattcaaaggcttcggccacaaatttccagttggttgtagggccacaactggatccacaaaagaggaacttttccagccacatgaccaagaaagctacatgctctcgaggggtaacagacccttggcccatatatgccgccacatagccagaccagccacctatgcttttggtcttgaagtcaaattgattcttggcgttcatactcatagggttagccgatgaagttacatctaatccagtaatcatggtgatgtctattagacttggagtcatcggctcttggttgaataagaaagcattgatggtgttggacaagaagtaggtggcggcaaccatcagaggttcatccttagcagaattggctatggtgagagcgagcgcttggccgattccaatctcatcccagtgaactttcttactagccgatacgcattggtaccaggtggttcagctcttatcaggagtaggtttttcgagagatggccaagacttgaaggtattcttccagtgacccaggttagggttggctagtctaaaggggatccggttggtttcactgatgatgaaatcagtggggacgagattgccgattgggccaagaaaatagtggtttttgtgtgaaaggctgggaatcgcgactaggttggaaaggtgctgcaaatccaaaggaatcgggtagcagaaaacatgatgagaaaaggagaaatcgatttcatgcgaggtaaagggatctagctggtgaggacttacctcagtgtactcggccgatggcgcagtagaagggctggtggaagacgacatcgccatgggcggagatctggtcaggaacgaaatcgcctggggatcgccttatgcgtcggggagatcgtcggagagagagaacaaagttggtttcagcggtgaaaacggaggaggacggtgtgagacttctcgacggtaacggttagtatttaaagcacggcagtaacggtcgaaaaatggcaaagtgcgaaacttgctcggagtcgatttacagcaaatccgaaacattaccaaatattccggacttggggggcatgtgttaacaactaaaattggtaatatcggcatcgggaaagaagattagatcgaagcgaagtcgaaggcagagatcgagttcggaaacagagcaggaatcggctggagtccagatcagctacgattaggatcggctgagtctgagtcggactaggtaagccgatgcagccgattccgacaatacaacttgatgtatgatatcgggttgaattgaggcgcttcaaggtgattgctgcacatgatagagtcctgagaaggcaattgtatctattaattaggatgttttatgtaatttccttagagatacgcttgggcaaaagtctgccgcaaagacttatggtatcttagagtttgttagagatagtagtcgtgtctgttatggacatatcttgtaattcccgggtataaatagacccgagccctatgtaactttgaacacacacgttcaatacaatctcggcgcatcgccacctttttgctttagttttatttcgatgagttcttgctttcgggttgagctgcatcggtttcgatcttcaacaagaggtaaaacttgttatgatggattatgttctcgggattagtgcttccatctttatgatactctaatcttgtctatgtaattcatcaagttaccatatatcttacataatcttcgacaatatcgtcatctaaccaacaatcggctaacatctgtcaacagaagacagccgattaggttaaatagcgacgttgacctagattatataagatatctactattctatgaaacttccagcggcttgattgtctagatattgttcttcttttcatacttagtgctgcatcagttgagtttgatctattaagtcgtgcttagaatatcaatctctagcctgcctcctggttgccgattagaatagtatcggagtttcagccgatcttacctgatttaattatatttgctctatatgcttcaatgatacattaaatctgccctttatgtcaagatcttactgcatttaagtatattaggctcttgtttgatatattttacttgttttagtatcctgatatagagtagtatgggagtattagccgatacacgctagatctatctgatcggctatgctattaagatatataaggttgttatcaatatatatttcgatctaagtgattcatactgtctcggcatggcgactgatctatccctgtcacttgatttaagtatatatcggtataggaactatatattgttaatatctacagccgatcgaatagatttagctctttattgcctatttacaaccgccgatcgattcacctatgacatcggctcaaagataaatgatatgtcatcggcacctagccgatcggctatcatttatagatttaactgcggtttctttgcttctatttcttgttgattgcaggatcaaatcaactggcacgctcatacattcgaaggcgagctttggacctgcactggagttaagcatggtgggtaatttttcacctaataatctggaaaaagctcacctaaatgagcttatcagattataataagctgggctccagattataataagctacttcaataagttgtctgtttctttcagcttactcccaataatctgattataataatcccaagctgaaagaaacagggcctaagttgttgaaggagagcttgaagttgcgcttgcagagccgaagccccttctgccattgcttgtaacacttggccaggcggctgagagtgtgcttgggcagcgaccggctgagcttgcagctgcgcgtgaggggccggatatactaccgcaatcaaaggctgcccggcgaagcacactggcacttgcgtagcttgtggcggaaggtgctggatcggtgcttgtggatagacttgggttggacgtaacacatcgaatactggaggattgggtcgaagcggccttggcccgcctcgctgcctcgtacgcttgctgctgttcttgcatctgccgaagcatgtcctggaggcatgtcatgttctgtcgcatggcttccatgttggcttcggcctgtgtttcagggtcagggttgacttgtacagcggcgagcgcagtcgaggccgctgtcggctgcgacggggcggcttggggcaccagcagttggcttgtcgaaaggatctccgccctggactgaagtgcccttgccgccgcggctgcctttgccatgtcagccgtgttcggcacctgcccagaggcggtaggagccaaaggcggtagtgatggcgcaggtgcggaggcagacgacgctcctctatcttcggtgatgggcggcaaaggctctgctccctcttcggcggccatctcccccccggcttcgctttcctttcgccttgtaaccttctccttcacgaccctcttcggtggcattcgctcttagtggtttcgctcggaggtccccacgttcggcgccgactattgtcgaaacgacaactgcatacgtcgaaagacgtggttactcaacggtagttggaaaagaagtaaagtgtattaaattgagaatttttcttgtgatccccccgtattacatggccctatgagtctatttatagcctcattacgggttttactactagggctttggttatccaggggaatttacatggttgcccttatgaaagggacatttacatgggtatacagtgtaattaaggttcatgggctcctaatgggccgtcaggcgatcgtcggcccaataacccctaggcttgatgggccaagatggcttcttcggtcctcgcggggccgaacttgctaccgcgaaatcatctccctttggcatatactcttcgccctacatcctttcgcccaagaggcctcttgcttggcgaggtacccgcgcaattccctgccacccgcgtccttgttccatagtctttgccctgggggggctttcccctgactaacttaacgtctggggctggaatcctcactggtcgcatgggttcaacaaggtttggtcgaaggggcctcatgccataccgccaacagcgttcatgaaagcacatagctttgttattgttgcccggacattgtctggaaggataccccttgttacaactagtagcagttgtgtcatcaacacgtgacagtcatgagactttaggtttgtgaacttcttctccttcgtgcttattattcgttttatattcgtggagtatccagacggtacctttatgctctccaagtattcaaacatactttccttctctgccttgctaagaatgtagctggctgaactcaagtaatggcttcctttctcctttggttccgggtgaaggtcatcacgttgttccatatgcttcagatcattacatgcttccagtgtatctttcgactttccatatacacctaggaagcaaagaaggtttacgcaaaggttcttagtgaggtgcatcacgtcgattgcatggcggacgtccaagaattcccaataggataactctcaaaatatagagttctttttccacatcaacgcgtgaccatcttcgctctctatagggtggcttccaggcccctttccaaacactactttaagatctttaaccatagcaaacactgttttcccgctgcgatgtttaggctttgtacagtggtccgccttatgttccaagtgcttgcctttcttccgtaccgggtggtttgcagcaaggaatcgacgataaccaatgtacacaacctacctacagtgcttaagatacgtactttctgcttcatccatacagtgagtgcaagccttgtaccccttgttggactgcccgaaaaggttgctaagtgcaggccaatagttgatggttacgaatagcagcgcttgtaggttaaactcctcctatttgtccttgtcccacacggggacaccttcctttttccacaacagttttagatcttcgaccagtggtcttaggtacacatcgatgtcgttacaaggttgcttggggccttgaataataatcggcatcattatgtacttcctcttcatgcatagccaagaggggaggttgtagatatacatcgtaacaggccaagtgctatggccgctgctcatctctccaaaaggattcatgccatccatacttaaaccaaaccttatgtttcgtgcgtcctttccaaagtctttaaattttctgtcgatgtttcgccactgcaaaccatcggcgggatgtctcagcatcctgtcctgttgacgttcttcagcgtgccaacgcatcattctagcattcctcttgtttctgaacaaacgccttagccgtggtattatagggaaataccacatcaccttagcaggaattctcttctttgttggctgcccgtcaacttcacctagatcctctcgtctaatcttgtatcatagtgctttacaaacagggcatacaatcattcggacatgcgtgaatcttctgaacttccagtccctagagggcagactatcttcttagcctcgtacgttgtctcgggcaatttgttttcctccggaagaatgttcttgacaagtttcaataaatcgccaaatgccttgtcactaacactattttttgccttccattgtaagaactccagagtggtatccaactttttgtgccccttctcgtaacctgggtacaacgacgttctgtggtcctctaatatccgctccaatttatgggcctccttttcactttcacagtcctcgtttgcgtcctgcaacatctgaccaagatcatccgcagcgttgttatcgccagcaaccctgtccacctcacccgtttgatttccttcaaatccagcgtactgagcccagtcaggaatgttctcgtcctccgcttcatcttcttccttttcaaccccttgctcaccgtgggatgtccaataattatagcttggcatgaaccccgactcaaacaagtgcaaatgaatagtcctggatgcagaatactccttctggttcttacacttattgcatggacaacaaataaaacagttacgcttgttagcttcggccactctcaaaaaataatgcacgccatcgataaactctttggaccgccggtcagcgtacatccattgccgatccatctacatgaaatgaaaaaaaatcgtacataaataaattttggtacaataatgacagtcaaatagtaatgataaaataattaaaaactctttcgacaagcaattcttattaacaatttttgaagttctaaactaatattagtgttatacttctcttaattttcaatttagtttgttttctattttttaagattaattttcatcatattttaaactatgaaaataaaatttctatatattcttcttctccacacaaattttctctcttcaacttacaacaaagttttggagacaaaaaaaatgtgtgaaacatcgctccaaaagtaatataataacaaaaaaaacattggaggatgaagtgactaaccttttagacacctccgatttgtatataatcactaaaaaaattttacaagaaattttggcatgacctcccctctttctttgagaaattttgaagcttgctctcgggctggaggaggaagaaggcatatataaggggggatcttttgtcccggttggtgttaccaaccagggctaaagatcgccgtgatctttagtcccggttggtaaggggccctgacaacgtctgacatctctacaaccgttggtgatcacatatgtccgttgtagccgccaaccgtctttagtcccggttttaaatgaatccgggaccattgtagatttcggccgaccgaccaaagatggtttctccaccagtgaatcaacgcacctctctgtacgagcccacaataacacgcaagtttgctcggctcctgcatgcaatacctagagtgccacttgcatatacatatcgtctcatctcgccccaaacaaaccaaccaagctagccagctatctgcccgccacaatggacgcactgccattcctcctcctgctcctccagctctcatgtgccccgttcttccagctctcatgtgccccgtagtcaacggcagcgccctcctgccgctccacgatgccgccgtcgatctccaccccatcgtgctgctgccagggaacggctgtagccagctcgacgcggagctcaccgagcactacgagccatcgccatgggcgccggcgagctgcggcggcgctgcggccgcggggaaggggaagggacgacgacggtggttccggctatggaagaacagcactgcactgggcgaccccgcggtggcgctgtgctacgcggaccagctgcgggtggtgtacgaccgcgccgtcgccgactaccgcaacgtcgcccgcgtctggacccgcgtcgtgtcgttcggcaccacccgcggcttcggctcgacgatgatccctcggatccggaaaggtgagccgccggccatgtcgtacgtgtacaacattattattgtcatacactctgcacttttgactaattttgctacgtgatatacgtgggcgattacggtgtacgcactactagaaaactaatcttcgcaggcgggagggaggttcgcctgcatcataacgactgcgaaaatcatcgatcgattttcgcagtcggcgcaacggcccgccagagaaaatgcaaaaaaacgaacaaacaaaaatcgccgcacgcggctcaccgccgccgccctcccccggccggatctgagaggggaggggagccgccgccgtcgtcatcgtcgccgccgccgcgctccatgccattgtcgccccgcgtgtcgtcttcaccgccgtcccgcaccttcgtcaccgccgccggccccgccggcctcccccctccctcctccggccagatctgcgagggagggagggaggggagatgccgccggctgccgcgtgccgccccgcgccggcggtggaggaggagttggagaggtcgagttggcaaagggtggcgccctggaggtagaagcgagggtgggtggggcggaggacgaggtagacgatgagcgcgatgatgccgacgaggatggcaaggacgatgaggatgccccgcgccgtcgtcgccgccgtcgcccctaccggcctccctcctccctcctccggccagatctgggagggaggtgggaggggagctgctaccgtcaaccccgccggcctccccctccctcctccggccagatctaagagggaagggggaggggagccgctgccgccgcccagcccactctactgccgctccacgccgttgccgccgccgccggcctccccctccctcctctggccagatctaggagggaggggggaggggaactgctaccgccgcccggcccgcgccgccgccgcccggacttcagccgcgcctcctcgccgttgccgccctctgccgtcaccgcccgcggtcgccgctggggagagtataagtaaggggaggggagagtatgagaggagaggggaggagagaggctggtgaggaagggaggagaggtgtgaggacttagaaagaaattagggcccgcaaatctatttatattcaagtctattttcgcaggcggaccacttaagcggcgcctgcgaaaatgattttcgcaggtgccttccgcaagcgggcatcaaattttaccccgatttatatttttgtaggctgtcatttggctctaagggtcacgtccgtctgtgaaaataaggtcctcacgttaagaaaaatgctttttctagtagcgacgtactgtgatgcaaacgcatgtgatgcatgctgactatcgtaattagctgctccctctctttcagattacaagacgttttaactttggataaagttaaactactctaagtctgactaactctattgaaaaaaatagtaatatttacaacatcattaaatccataatcttctatctatctattattataaactaaaagtctattaaacttcctacaaacgctcctaaaccaccatgtggtatcctacaaacgctcataagccgccacatggcacgttcaatctcaccgtcgattttcacttaaattggtggactctatattttagatcattagattaaatatactatttaaaaaattaataccttcatgtgggtcggaaaaagaattccatatgtacgaaaggactccatacatacgaaacataagtatgattataaaattgattagagaaacataaatagtacgtacaactgaaaaaaaaaacgtataagcttacctactgctctcacaagaagaaaataacatcatgtacgtaattacgataagagcaataaaaaaaaacatacgtaacataaagaaaaataaacataagtaacatgccattgaagaaaaaaatcgatgttctataaaatataattttttatttacaagtaatatatactactataaatttacggaaatatacacagttaaaatacaatataaatataaaatatctaatcaatgctctttaaacattctatcgtgaaattattttaaaattttgttatccagttggccagaaaaaggaaagccacgtaaggacttatgataaaagcgataaagtaaaaaaaaatgttacacacgtacgtagtgccattgaaaaaaaacttatggcactatttaaaaataaaataaaatatattactataaatctacgtaaatatgcacaattaaactagatcttctatgatatataaatataaactatccgatcaatgttttttaatttgttatccagtcggattcctttaattaaaggaattaaactattggtgcctatgtttatatatacctcacaacacatatgaggccgacatataataattaatgttatctgcaatatataaatataaactatccgatcaatgttttttaatttgttatccagtcagattcctttaattaaatgaattaaactattggtgcctatgtttataaatacatcaaaacacataaggccgacatataataattaatgttatgataatattttaaataatttgcggcactctaaaaacgctctcaagctgccacataacgctctaaaaaaatagaaaaaatcttagaaattccgagaaaaaaactagccctcaattttcattttaaaacaataagtctaccttattttcaaataagatcataaataataaataattgcttgtagatattacttaaatataatataatataaactaataggttagaaattataaaacaattaatgttgatgaaaataatttatggagaaatagtggcagatgttctccgtttaatatttcactcatataagtatattaaacttagcatacgacgcatacccgcgcgaatgcgcgggttaccttcctagttgaataaattcttataatatattagttttggataaaaaatattacaacttttttctacaaatttaatcaaacttagagtagttttattttgacaaagtcaaaacattttataacctgaaacggagagggagtatttatataggtttgtcattcacgagatgccgcacagcggaagatatggtggtccaaacttaaagttaaagctattttttaagagaaaaaacatgtacgtacaggctagaaatagaatggagggggcttatcttcttttttattcctccagcggtctagcctccctactcttccttctcttcattttcttttcccctcccctctccccttctcttaatatggtacgtgcgcccatgctgaatccatccccgtgtacgtaccatcttaaatcctagatcttcatgtttataaatgggactacctatacgtttgtcgatttaaaattatacaatcgccttgcaattgtatagctatttgcatgtaactattatataattttcatatgtaagtttagaaactcacatgataacatactatttccatgaagcggtggtcacatgcccaaatcccctctcctatgcgtttttgtgattgtttccttccttgcttgcacgaatcgtgaaagaatatctaatggtttataattatacgaaagttgcatatatatatatatatatatatatatatatatatatatgttatgttgtatttacatacaagttataatgtaattacactataattattatatttgacaaatttatagaaaaatcactacaaaaatactctcttcggtacaaataatccaagcttatataagacataattaaatctataccctcctccagtacattatttcttacgtttggaaaacggtgcggtctccaaaatacacactactaaataaaccatttttccaaatgatagcatttttatccaggtgggtaggcctctcagagctaaataaaaatgacaaccgtgggcaagatcgtcgtccacctacgaaaatagattttcgcagacggatctcttaagaggtccgcctgcaaaaatatctttaggtggtcatatctttatttttgcaagcagacctcttaaacgatcaacctacgaaaatctattttcgcaggtggtaccttaagagttccgccagcaaaaagattaagcatcataaaaatgaccacctacctagtcaaaattgcctaagtccctctccttcaattcctccctgcgtcctctccttccctctcttcccgacggtcccctcccctcccacctctccttccctctgtccctgccggtggtagcaatggcagataccgcggtggtggcagcggctccatcccggtgcggcttccctcccctccctcccagatccggccaaaggggggggggagggtggtggtggtggcagctcccctgacctcctcctagatccgaccggagggtgggggagggcggcgattcgnncggcgtcaccccaccaccggcgtggcttccctcccgtcccctccctcctagatctgactgaagggggtagggggaagggcgatagcagcagcgactcccctccctcctcccgaatccggccggagcgaggggggagggtggtggcataccccaccccagcgcggctaaattctctcccctccctcccacacgacggtggtggcacagctccaagcggtggtagaggcggttcccctccctccctccctcccagatctggccggagggggagggggaagggcagtggtggtggcccatggcggcgccggcgcccctgcaacggcaagaggtgggatggctgcggcggctgcgcggacggagatgggtagggtggggggtgggggtggtggtgagtttttttttttcggccaaaatatattcgtaggcgggaggctacggtgcctgcaaatatggagatgccagcaatgacctgcctgtaaaaatcatctattttcacagacttatgcatacagacgggcctcccccgcctagaaaatgatttttggccacctggggaaataatttttctagtaatgacatcttcaattatatattattgtctattataatatatataaaagcttttaaatattttagttttattaaagaatgttttggactaatctacacatgtgtcttgaaatttaatgttctaaaagttataagctagtaatagtcaaagctacaattgtttaacttcgttcaaaacgtcaacaatattgaaccaatgtaagacaaacatgtgcatacctttttttttgttttatttagataagcatctgaaaagttactcaaagttcagttttgaaaattgacaaaatcttatgatatactccaaatgttaatgtttctgtctggaaagaaaacctttgtaaaatttcacttttcctagatttgtacatgtcgacattaatatgtcacaatctaagtggaattatcagttatatatggaataagtgacggagctaattaagagaggacagggtgaggcctggcctcgaccaacaaaaattactatgattagtgatcacaagatttgatcgaaatttatcaaaattttgtaaaaaatgtcatatggctggttggaatccaacagtaaattggaaataaaactacataattattacaacttgtaattaatgataagagactacaaaatacgagacaaaattatcaaaataaaaccaactcctgttgtagtagtgttacatcttgcctattacagtttatgtcgataaaattattaaaacatatatattattaatatgtaaaatacaccaaatgcatcaaaaattatcaaaaacactaattctttgccttccattatgctggaaataaaacgaaatatgatgtcaggacgtgcgatgccgatgcaaagacaacgaggaatatgatgatgcaaccagggaatttatggagtagtgtcttccggccttatttatgggcccaaatatcaaatcatatatgtatattgggccatcgtataatcataagtgctagttcattttctatttgctgcttgctagtatcattcctatagtagcagttgagctttgatggaacaatcaatgatgtcaccagggtctagtttaactcttcactagggtcatagcttgtaaaataagaggggtactagacatcggcaaaaaacatcaccccgatgattgcctgtaactccacccctcacaacagctagtagaaaaataggagagcaacatgcagcgttggaacaagagaatagcacgattaaaaaataaagctagtagcatgttgttgtatgtcaggttggtatgtttttggagccatcagtcggcgctgttattaaaactgttctaagtacttcctccatttcatatccatttcatattgatcgatcattatataatcaaaagtcaaaatgtttaaattgatcaccatatagacccttgtaccttatttgatatgcagcattattgtgtttatgcatgcatgtaggtttttaggagaactaaagcactcgatcgtttcttatgcatatggagagtcaaagtatgtatttttcttgattcttcctcactacatacttacattaattaaaatacatgatagtcaattcttttttggtcttggtagaaaaaaaacttatacaataatcaatatggaatgaagaaatagctagtagtaatggtaagtagtatgaaaaaaatatgagaaaatttagggttctcgagaaactacatgtgcattttttcaaacaagaagttttatgtataactgaattcatgtatgcttattttttttcatcaaatcctcagcctcaattttttttggattgaactgcaaatcctgtcaggagccattgtttcaagaagatggcagtgttagtgatatgccctaaaggcaatcatagagatgattgtatcatatactatgtttacatatttatccgacattgttccttaaaatagataactccttattggttaatgaatatgtgattctttcatgagactctttatgttgtttgttactatttctaaaggatccctgatcaaatattatatgtggaacaaatatgtttatatgatccgcacatgtattaattgataatcatatctcatggatcatggtttagagataccaaattaataatgtggacacatgttggtgaacatgttgttggatagacccaacatgagacactgcaagagccatatgtgttgtgtcatcagtgatcttattgagtgttggtgttgaatccttagacctgagattatcatggttctcaacatgtatagtagcttacttagggactgcaaaacgctactccgtaattgggtagttataaaagtagttttcgggtatgctatgaaacatgtagtgggatatgaataatcaaggtgggatttgcccctcctatagacagatatctctgtgcccctcgatgttgtagattacagaagtgcatggccatgccaaaggtgattgaggagtcaatcacaagttatataatctatcaacaagttcgagtgaatgattgagctattagaggatggcaagccttgagcttaatctatatcgtgaggcaaaggggttcatacaagtatacactagaggttcagccgatatgatctttatggatgcccggtgggtcaatacgttctgctaggggccgctgttaacgctggaccgaaaaggagtcttcgggttacagcccagtatatatgaacctacagggtcgcacgcttaatgggccagaataagggaattagatagagatacaatatgagcttaattcggattgggatccgaataggagtcctacgggccttggaggcccgagtgatggatcctatatattcgtgaggggtgtgaccggtggaggcattgcatcacgtgagaaaccttagccgtcacttccctccccgagcaaaaccctagccgcgcgtgggtgctagcacatctgcgcgtggcgttccgtccctgtacgtgtggataccggtagaggcgccgctggtttgcggtgctgaccagcgtgggagtacggcgagaagaacgcatgaggaggagaaagtcgagccggtgcgatcgactacttcctctacatcgatgcgcgctacttcgcgagagttccttcgacttctcagcatctttttccgctgcacagcgcgtcgagtggtaacgatctatgatctaatacttgcatggttcctggtttacgcggtagaaaattttgatttatgctatcgtagcctacgcgtatcccaacaggcagaggcactgggaagaatcagctacaaagaaggagagaacctcttcggcgccccctacgactcccggtacgtggcggcgccaccgggcatgcccgccatggcgttcgatgcctacaccgccgacctgaggtgtctcgtcgagcacgccagcaggaagaacggcggcaagccggtcatcccggtgacccacagcaaaggcagcctgatggccgcggagttcctcacgcggagcgcgacaccgtagtgcaggaggttcgtcaagcacctcgtcatggtctccaccggcgccggcggcatcgtcgtggcgatgcagagcctcgccgcctccgcctacgcagcgccggggtcgctggcgaggacggagcggagctacgggacggtgttcgcagcgctgccgtccccgaacgtgttcggcggcgcgccgctggtggtgacgcggcgcaggaactactcggcccacgacatctcggagttcctcccggtggtcaggttctccggcgaggaggtcaagctgtaccgcacgagggcgctgccggtgaactcggggttgagggcgccgcgcgtgacgatgaccgccgtctacggcgccagcgtgccgacgccggagcaactggtgtactgggacggcgacttcagcaaggcgccggaggtggtgtacggcgacggcgacggcgacggagcagtcaatctggagagcgtgttggcgtggaacacagtggtcggacatgatctggagcaaggtttcttcaaggccgtcaagatcatgaatgcgacatgtttacacccaaatttggtacctatggacgaaataggggaaaattgccaaagtttggaaagtatcgagtttctttcacaaggccggtcagaccgcaggtatatgggcagtctcaccggctagtagggccggtctgaccgcaggtatgtgggcgatcagaccggcagggtccgagtccgagtctgttttcgtcgggtctcgggtttccttgctcgggaaggcatgtttcgtgtttcctttagtttctatcccgagttggacatggagaagggcctgtagagggtaagaccaacccctatttaagggacaaggcctgttcattgtaaaacctccaaatacaatatacttgaatcattcttttactatgttttctattttaccctagttttagttcatctttgtcggtttgcgctgtaaaccgtccgccgccgctgcgagagtgcgacacctcttcgtaggtttgtcctggaaaccttccattttgcccacgagatggttagttatcctcatatcgatctaaatcggcctagaggctgattttgatctctaaatcggctccgctagccggtttagctgtttttctccaaaacccatcttaatttggccctttggctagatcgagatggtaggcgactccatatcaccgcaaagcgtttaggtgttgcgatcgtgtttgtcaacttgtcacgaaaagttaccaacacgatttttggcgactccgcaggggacaaatctattcggctttagaacagccgaatttgcgatctacccatctgtgtttcgtcgagacgagttccacgtctgtttcggctgtgcggccgaaatcaatccatacaattcatctactgctgttgcatatttctcattggatcaatttgattgacggcagtactgtttggtcatcaagcagaatcaatctactagttcggctgacgttatccgatttcatcgttgtctggtatttgagaccgatcgattcgatcggttagatagcagcacgctgccttttctgtcttgctgtgtacagctagagcaagaaaatcattcggattagatcgatcaaagctagtactgcacacatatatttacataaagacaaaaagccgattcatattgtttcggccgttactgtgaagcattgattttccagatttttgctgcacacaggggatcggccaatcaaggctactgatcttttgatttttggaatttttgctaggtacacacgtcagatatatctaggaaaattataagaccgtatattaatctattcggtcaaatatttcggctatgagctatgtggcccgatttaatcaaggaatttcttcatcaactatgacgagcgggaacgggttcaacaatattgctacacaatacattagaaccgatcaaggcgtcatgagaggaaacgtcccgctacctcaagttgtaatttcaccaaaggtaaccttcgattcgcccaacccgtcctttgctattcaaaacattaataatcattatgtagatgcatatgctacttctagttttgctcctatacaatatgcttataatgctacgggggggtcaatgggtgattatgcagccgattacacagaaatcggctatatgcaaaaccgagctgacagtatgaccggtcgtgacaccggtctaaccgcatcctttgccagtcagaccgcgcccaccatggccggtcagaccgtgtactacgtcggtcagaccgtgcctaccatagccggtcagaccgtgccctatcctggccagatcggacctcctgtggccggtctgaccgcaccgctgaccaccggtcagaccgggccatgggccggttagaccggttcccagggagtttctccaggttttcataccacgactagcagtactgattttaattcacctgttaatactgttagtcatgctattccacatatccctaatgcctacaatgatattaataggggatatcctcccgatactaggtatggccaatataataatattgtgccaccacaaccaccttttaggccaccaagtccaccaccaaatccaccaaagcctgaaactatggaggattggtttagaaatactatcagggagaattttgcaaagctaaggaatcgtgctagggagtaccaaaagtcgtatcctgatttttatgatattatcccatatccttgtggttataaaattcctgaatttaccaagtttagtggtgaggatagtaggaccacatgggagcatgtagatcaattttagcgcatcggtgaggctattaagaatacatgtaaattgaacttgttttctttatctttgtctggtactgcttttgcatggtttacttctttaccagcaaattctattttttcctgggctcaattagaacaaaaatttcatgattatttccacactagtgagactgagcttagattgtctgatttaacatcggttaggcacaaatacaatgaatctgtcgttgattatattgaaaggtttagagatattaaaagccgatgttttagtttgaaaataactgacaaagatttggccaacattgcatatgatggattgcttgattctattaaagagaggttgaatggccaaatatttcttaatgttgatcatgtgttgcatgaagctctggctcaggaaagccaagtggatgataatagcttaaatgctagtttagatgatagtgcaatatcatgtgtagccaaatcaagcgacggttcggattgtgttaataatttgtgcaatgatgccataacaattatagccaaaccaaatgttggttcggattgtcttgttagcgtggataataatgcaataaccattatagccgaatcaagcgatgattcggattgtgttactagtttagacaaagatggaatagtcgaaccaagtaatggctagcttagagaataatgccattgaagatatagccaaactaaatgacggttcggattgtatcacaagcgaaagtgaaatagcattatcacctaagaccgaatcacaaatcggtcatgtggatgttgggaaagatgatgacaatgtcttgcgggatagtagtgaaatagaatcgaaagtagctatgcatacataccaaaggccgtatcctgaacacgtagattcagtcccatacccgcaaggatttgaggtgcccaacttcacaaaattcacaggtgaggatgctagaacaacaatggagcatatcggccaatttgttgatcaatgtggtaaggtcggtagtaatgatttgcttaagttaaagttgtttcctctttctttgtcaaactttgcatctacatggtatagtttacttgctcctaattcaatttctacatggtcacaaatggagcatgagtttcatggttatttcaaatatgcaagcttgatggagcaaagaccgattgatacttcatcggtcacttgtgaaactatttcggttacatctatgcctaagaccggaattgttagtgatcctctccctgttagttctattgatgttggcaaaaagaaagggaaaagtgttattattggggatcctcggcccaagaataggatcaaaaatgcgaaggccgaagatcataaagttgcaaaggatgagtcatctagtttccaaaagaccaaaaaaccgaagctcacttttgacatgcttatggctaagtacaagaaaggattagccggtcaacgatttcataatcaaactagtgattcaaaaagaccaagatcatctcgtaggaagagatttggtcaaacaccaaagcaatcggagccatcaactaaaccaactccatacaaacctccgattgtgatgccatggtatccatatccaatgtcaccgtttggttatccttttatgtattacatgccgtggatgcatcaaccgcctatgctgtatcatcaaggatggaagcaatcacctaggacagtaccaagtcattctaactcaagacaagaacgtttcccacaaaggaatcggtccggtggatcaaaagtgaaaaaggtgaagaaggtgtgggtgagaaaagaagccaaagcttcggaagtcgtcactattaaggaggaatctcaagatgttcaagtacctactggagatgcggcgaaaaatatacaagcggagaagactgaagccgacgccgttgctgtcgacatcggcagtctgaccgagacagttggccggtctaactgccagactacggccgttctgaccgaccctcctgatcagtctgaccgacggcttgtgaccggtctaaccgggcccagaggccggtctgatcagggggcattggagaagagtgggaaaattgagagcaacattggagcttccatttcgaccaaaaatatgaagaatcattgcttagctcctggaaaacaaccacagccgaagtggataccttctggcttatctcgctctcaaaagaggaggctacagcgtcttcgggccataggtcaaaaagaaaaggaggccgaagatgtggagaacaagatatgcaataatttaaagcctcgaatagcacctaggcaagtgtggagacctaaagaagtaaaagttaagagaccggtgatttcccatagtagtagtgataaattcaatttgatgagagaagaatcatcggtcattagagataagtctcctccacatgatgctatgggtgttagtgcggtatccatcttgccttcgaaatcgtgcagtcaagaaagccgattttgcttggggggcaagacattaatatgctcatgaaggaatcaagagagatgaacagcgatggatacgacatcacatctttgagccgccgtttgtcagatgctaaggcaaggtatgagtttattgtgttcatcatcatatgatatgcctatgccatgttagaacattgcttactatctagcacatgtgtgtttttgcttatcgaattgatattatacatacatgttgcaaatgccagttctaagtagtggaattggtaggttggcatataatttgtttgtagtatgatttggctcatgagtctttgatatttatttaaagccaaattgtatgtgtttttatggatcaccatataagatatagattttataattattgcaccatgaaagttttgcttattagtaattcggctaatgtcaatgatcaatgtgatgatttattctagagttgttttctttagaaacattggcattgttaatattttgcattcatgctcaagccgattacttacatttgtagtttattggaattcatgtgtgtgaggcatatgactttggtgattcattattgatcatacttcaattggctaagtgttttgatgccatgatgattattgtttcaaaagccatttgaattagtattcatctagacatgttagttggatgctataatttttcatatgtctagagagaagaaattttggtccaataatttgatacaccaagcatctggctattatgtgaagagaaattatatactaaaggccgatgcttgatttcaaaagtttggacgaaattggcaaaatcatagaccaggggcggtctgaccggcattgcacggccggtctgaccggtggtaccggcggtctgaccggctctacatggccggtctgaccaggtagacagggcagtctgaccggcattgcgtggccggtctgaccgatcccagacaggaggctggggggcacgttacaattgattaaaaggccgacttaattgtgaattcggacatttgtgcccatgagttagaggtagcttggagaattcatttgattagatatttgaatgatcctacacttaaggttgatcgaaagattcggcggcaagcgctcaaatattatatcgccgaaaaacagatggagtattacttagataatgatcaatctaaagttgctaggagagtagtacatgaagggatttgtaaaattcatcaatcggcccgtaagataaattggttgcttaggagagtggggtttcattggccgaaaataattgatgattgtttcaaatgttatagagggagtgaagcttgttaacggatcggcaatgttcaattagcgcctaccgctgtgttgaatcctatcattaaactatggccattccgaggttgggctttggatttcattggtcaaatttattcttcgtcatcaaaagggcattggttcgtgctagttgcaatggattacttcactaagtgggccaaagccgtgccgctcaagaatattacttgtatggaggtaattgactttattttgaagcacattgttcatagattcagtattcctcaaatgttaaaggagcttcttttatgtccaaagaagtgagaagttttgccgaatcttatgatattaagttgttgagttcttctctttactacactcaggctaatggataagccgagtagagtaataaaacattgttgaaattgccgttttgctagttgaggtaaatcttggctctttttggtatttcaagcaagacgacttgtcggttgaagattacaagaccttgatgggaaacaattttgaagacgtcattgacaagcgtttgaagactttgaaggagatgaagacacttcaagatggtgttttcggagagcgattaatgggaaatacatgaagaaatacttcccgagcatttggcaagatgcttaggaagtcctatggccggtaattggattatcgccctgagataacatgttcacttttagattcacgtatgttcaccaaaaaggcagggggcatgtgtttacacccaaatttggcacctatggacgaaatagggaaaaattgccaaagtttggaaagtatcgggtttccttcacagggccggtcagaccgcaggtatatgggcggtctgaccggctagtagggccggtctgaccgcaggtatgtgggcagtcagaccggcagggtccgagtcctagtctgttttcgttgggtctcgggttttcttgttcgggaaggcatatttcgtggttcctttggtttctatcccgagttgggcatggagaagggcctgtagagggcaagaacaacccctatttaagggacaaggccagttcattggaaaaccccctaatacaatctacttgaatcgttcttttactatgttttctattttaccctagttttaatccatctttatcggtttgcaccggaaaccgtctgcccccactgcgagagtgcgacatctctttgtaggtttgtcctggaaatcttccattttacccacgagacaggtagttatcctcatatcgatctaaatcggtctagaggctgattttaatctctaaatcggctccgctagccggtttagctgtttttctctcaaacccatcttaatttggccctttggctagatcgaggtagttgacgactccatatcactgcaagacgtttaggtgttgcgatcgtgtttgtcaacttgtcaaaaaaaaattgccaacatgacacacggcggaatcattaccgacgagttcgccctgaagcgtgtgattagcgagatccttgaagcgaatcgtgccacctatgacaaataattacgaacgagctgagtttcgagttaaggatcagaacattgatgttaggtatgtgtcaataatattccttgcatgtgtcaaataattatgcgcgtctgacattctgagtcacgcagtgatgcacattgttgcgtaacaataattaatactccatctctccatttcatattataatctgctttaattttttaagtttgctatgtttataaaaaatagtaataattttaacaccaaacaaacataatatcaaatatatattcaatgttaggtttaatgaaaaataatttggtattatacgagtttatttttctctataaatttggaaaacatataggattttgacttagaaaaaagtcaaaacttattaaaatacgaaataggagtagtaaccaacaaatcatctcatggaccttgttgtcaataactccttatttatgtggaataagttcaatttaaatccctcatcttgaagtgctagtcgaattagaatgtgttggtcaacttgcaatacccaattactcaaggtcccactgcaattttgtgcctggttagagcaaacgtgatgagctgaccgtggtcaatatggttaaatcagcatggggcccacataggcccaaatgtcagcgggtatgtcttattcttcctcttctattcccatctccgtagtctccctatcctccccatttctcttcaagcatgtaggtggcggccgtagtgtaagtgatggagcactatgtgatgacaatggttactcggcttcggagaacatgggacgacggcaaggcgatgcctctagcacggggagccatggtgaagcagccactagggacttgcagcggcaagtggagcaacacaggactggtgaccactgtagagtgcatggtgagagcgttagtattgcagcgaacgggtgggggaggtggtccatttcgtccaacccgtgctgacgtcgcctcgcaccgctggtcccatcatcccgcgggatgctggtgaagtgggggatttgaggccggtgcgtgtggaaggcatgccttcctcagttcttactgagttccggcctacattacacgtctgtcctaccgacattatgaccactggaggtgttaaattaagttgttttttttgggtttcctccctattctctcgattcaatctttataagtcggttagaggataggataagaaaagtcccatcctatatgtactcgtgctctatccatccaatggaatcattgtgttgaggccatgtcagatttcaccgttgtacaggagtatttaattaactaggtgattccctgcacttcgctgcaggaatttatattttttccattacaatcaaggtagaggtaaaaagaaaacaaatgaaatctcagggcttatctgtattaatcatgaatcaaacaaatgaaacccacactttaatgtgaaaacatattgacaagtttgtgttaaatattataaaaatgatagataaatttgtaaaaatattgtgaaaatgatgtgaggggtaatgattggatatgtttgcatgttgatttgtataattaaatagattgtagatgatgttgcctgtttgcatgaggtgaatatgtaattattgctagtgggtgatgatgtggcatggtcgcatgttaagctttagcgttagtgggttttaactttatagaaagtatagattggcagcttatgcgcacttgtttttttcacctaatggcagtgtttagttccattcaaactttcaaaaattccgttacatcaaatgtttggacatatgcatgtagtattaaatgtggacaaaataaccaattgtatagtttgcatgtaaattatgagatgaatcttttgagcctaattacgccatgatttgataatatgatgctacagtaaacatttgctaatgacggattaattaggcttactaaattcgtctcacaatttacacacagaatctgtaatttgtcttgttattagtttccatttaatacttcaaatgtgtatccgtatacttaaaatttttttttggcaggccaacaattcggagaagcttgtctactgggacacttgagtaaggaaattgagagatggggcggtgaatgtgaccactgaccagcgtgttggcgctggatatgcacggagatgatccggaggaagattcttcaaagccgtcacgatcatcagtacgacacactcgagaataattatggcgagttcaccctcaccctctattgcattgtgtgataagctagaatttggaagcggagctatggacgaaagaaatttgttttgctacatgctagaaggtgccaagactgaacagtactccgtagtgcggagtacagtacgaggaaaaacactagctagtagtgagaatagtcagaccgatagtggacaggacatgataccgagagataaagacgtaaaagaggaatatgagaaagacatgtaaaattgttatggatttttatgtatctgttttagtatgaaaagatgtcattattaccgaaacatttattccattttaagagaggcatatcataaatgggagtgttgaatttacatcctgtattagaactacaaccct

SEQ ID NO: 16775 - DNA, 29354 bp, Oryza sativa
gccaccacgctgacaccgcaccaccacgccactgccgcgccacgctgcagccgcgcctccacgccgccgctccgctgccgcccctgccgccccatcagtgaacgaaaagcgaacgaacgtacgtgaacgaaacgtgaacttaacgagaacgtgaacatgaacgaaacgtgaacttaacgagaacgcgaacattaacgaacgtgaacgaaatgcgaacgcgaacgaacgtgaacgaaacgtgaatgaatcatgaacaaacgtgaatgaaacgtgaacgaaacgttaacgaacgtgaatgaaacgtgaacgaacgtgaatgaaacgcgaacgaacgtgaacgaaacgtgaatgaaacgtgaacgaacatgaatgaaatgtgaacgaaacgtgaacgaacgtgaatgaacgcgaacgaatgagaacgaaacgtgaatgaaatgtgaacgaaacgtgaacggtcgccttataggacactacgtgaaatacaatatatgttactttgcatttagactaatacatttttttgtatgttgcaaaaaagatgtcgtcgtcgtcgtccctcaagccagagtggtagctagcccgcaaaggaaatcgcgcaggcaagtgatgtaaagatatgattgttagatttttaatataattaagattattagattattagacttactaaatgtgagtgttagagattattattagagttttagacttagcatatgtgagtgttagagattgttagagatttaatataagattattattagacttagcatatatgattatttgagttctaatatatgacacttagacttaacatatatgattgttagagttttaatataagattattatatttttaatataggactaataatataaggctattagatttaatatacgacacctagacttaacatatatgattatctagggttctaatgtacgacacttagacgtagcatatatgattatttgagttctaatatacgacacttagacttagcatatatgattgttagacttttaatataagattattagatttttaatataggactaataatataagactattagattattagagttttaatacaagattattacagttttaatataagattattagatttgtaattagacttagcatatatgattatctagggttctaatatacgacacttagacatagcatatatgattgttagagttttaatacaagattagtacaattttaatgattatctagggttctaatatatgacacttagacttagctgcaccgtctccacctcaggctcctgcaccaacttctccttaggctcctgcaccgactcctcctcaagctcctcgtccggcaccttccaagtcaagggccccccaagctccaccgcctgcccccacaagggcaacgaagaaggcgaaagttgacgccgccaaaaacaaggacctagggtacgactgcacgcaagaggagcttgacgcttatgtggcatcagatgtcaggagacaattgaagccttggagtccagaaaaggagattcttatagacccgagtgccagaaacttcttcaggggtatgtctgcacctgccaaggagaccataaagctatcggactatgagcgaaaacttaagaaagcatcttctggaaagtccaaaccagtccctcagcttggagagcaaccaaaccaggtgatcgagccgttggtgaccggtgaagaatttggaatacaagattttattaatgacaccgggctaactacggatcaattgctacgaggcgcaccattcggaaaggcggaagtgaaatacaagtacgaactcggtaaaccgcttgtcaagcctgagcagctgcagtccctaccgacacagatgtacaaattccatcgactgtacatggagatgagcgccaccggtagagagatgatcgaagtgaggatcagggacacggacttcttgcaaggagaagatattctctggatcaattacaagggtatctacgaactataccagctggacgccctcgacgtctctattatgagttgttggactttgtaagtatcgtccagttagatttcttattacgtttccttcaattaattaggtccttatatataagtacaccatatataatatatacttccttttatcgttgtagaatggagattaaaagggcccgacggcggggggttttcgatactggattcatcgaccctcagaaagtaaacgtcgcaatgctcgacgagtatccgcaagccacagaggacaatctcgtccatctcctgaaggcgcagcattacaagatgttcatactattgccgtacaacgcagagttagtttttactgtcttcctaccaaatttcattcccgtacgaacatgctaagtatttcatatgtaaagcatgcgatgcacattgcagattccactgggtacttttactcttcgacttggaggcctgtgtagtcaatgtatatgactcaatggataaaaaagagtctacgtttgaccaggtttttgaacttatagataggtactgtcataagttccaatgttaattacgaatcttgttataattaattgctactacgaatcatagctttaaactccatgtagggcttggtatcggttccgtcatttggtccacggcaattggagagaaagacttaggcggaagtttaaatttcctgtgagtacacatgctctacatttatattgaatctccaattcaaatacaagtgtatattaattagatctcttgccgtttgtcatgtatatatagtgcgcaaagcaagcccagggaactaacttgtgtggctactacgtgtgcgagaattgccactgccttgcagaccaaatcatcaacacaagagagctcgatgtacgtacaaataaattgaaaatttcattgcgtatgtatcgatttgttgtttactaattaatttcatacattcataggttattcgcatgagggataacctcacacaaaaggaatttatcgcagcggttcaagaacaactcatgggattcatcaacaaacaaatccttgatcccgagggtgaattctactacgacggaaatacaattcataggtcgttagcttctaagataacgactaatactacgtcgaagtcgtagctagctaggacatcataatgaattgtaattaatacatgtctattttcctatatgcatgtacacatttactttagtgtaaatatatattttggtcatatatatatgcacataaaatgttaagtgctttaatatatatagacatatgcatttgcataacatatatgtataaatacatatatattatgcatgtatatatattgaaacatatataaatataatatataaatatataatatatatatatatatatatattatgcatatatatgtattgaaacatatatatgcatggtttatatgtatgcatttatatataaaccatgcagcaacagggccttgcaaataaaaaaaagggaaaattggaaccatgccattataatattgcaaaatttgagatatgccatcctaacccacatgtcattgactcatgtgggtcctacatgtcattgagataccgatagcatatctcaaactttgcaaaataataatggcatgatttcaatttacccaaaaaaaaaagggcagctcgatctttagtcccggttatttcacccgggactaaagatagcgatctttagtcctagattggtagtcccggtttgaaaaccgggactatagggggttaccaaccgggactaataagggtttctccaccagtgattatatggtgcgccgtccccacgcatgcatcatatctccgttttttagttggttggtgagagggttgtttggttggttgacttgcattgccaagtcatattttaatcatgtcacagtttattagttatcatttatgaaaaatagttgcttaggtatgtgttaatttgtttcgctgctacaactttgtcatgcccccttttcttaatttttggattcactagaaaaatacccctacattgcaacgggtgaatgctattttaagcttattattgttatatggtttaggtatggtagaattcaccgtgggaattcatttggatttttttttagaaaatcacgagctgcaattaggagtccgacttttatctcaagttagcatgcgagttttttaaaaaaagagatttcttatacaatattttcaaaagcaaacgagtttaaaatccaactcaaatacggatatatatttccaatagcgaacaaatttaaaaaccgacttaaacaaggatgacgtaccaaaatatcggaaaaacatcttcaatttttataatagtatagataagttacactcttaaatttagagctaaccgtgctacacttttgaccaactatttcttagtcacacttataccacccatgccacaactagtcaccttatagtggaaggatagtggatgagatactgttacctaattaccaaattgttcagagttgcttgtgcaaaaattgtaatatctccccaataaaaaagaagaaacatcgctacatgcagttctgagtgggccgtctgttatactacatgccaaatagtgatattgggatatgagaaagtgagggcactgtggtcttttggttttctctatttgtaggtatgtgtcaggtaggtgaaaactaaatttatttttgtatgaagaaacagtatgtattatcattacatttgtatgtaaagataatttcatgcaatggtaataatttactccttatgtcccacattaaaaatgtcaggttatttagtatggattaagagagtccaattgattaccctaataagtcaaaaccaaatctaaaatttgaattttcaaacttaattttgacgttaattataagatattttgaacgtagtttattttttgccattggcatttaagtgactacgaacacgtatataaatttttatctataatttttttattcccaaataaaccgttttggtttattagggaatatgggcaaacgatgagcacagtgctgttcttccacagccggaaccaccgtcccttcccctttcccgtggcaccggtgcccatggcgatggcttgtagtgcttagtgagctcagcgtcgaacttgctacatccgtttcccggcaacagcacgatggggtggatatcgacgacggcgtggtggagcagacgacggcgtggtggagcggtgggagggcgctgccgtcgatgaggaagaaggggacaacagaggaggagcagcaggaggaaaggtagtatgtccattgtggcagatagctcgctagcttggttgtttggagttttagataaccacgcgagatgagacgataagtaggagtatataagtaagtggcactctagctattgcttgaaagagccgagcaaattaacttgcgttattatggtaagctcagttgccacgtttccgaaaacggaaatttgtctggacgaaagtgattttcatttaaggatccaacgacccgaatttatacatttgggctcgtacagataaggcgttgattatgtggtgctgtccctgtccccacgcaatcgcttatattctgcgggcagagtacaatcaagcgcctgatgtttgaagaaaaattggacgcttcacctatgcactttgtgttgcatacatcatatcttcttttatttattggttggttagaggatggttggttttggttgcgtcgcattgtaaagtcatactttagtcttgtcacagttttttagacatccagtatctgaaaaaatagtttcttgggcatatggtagaccctatttagattacaccctgtcacatcaaacgtttgaacacctgcatgaagtattaaatatagtcttaaaaaataactaattacacagattgggactaatttgtaagacgaatcttttgaacctaattgtttcatgatttgataatgtggtgctacagcaaacatttgctaattaccgactaattaggcttaataaattcgtctcacggtttactgacatattctgtaattagtttttttattagtgcccgaacaccccatgcgacaccctatataatattcgatgtgacacgctaaaactttacacccctggaatatttaaacacccccgtaatttgtttagttgctgcatctttgtcataccaaactttctatctagggatctacgctttcacatttagagctaaccatgtcacacttgtgaccaattatttcttagccatacttatacctcccatatcaccacttgtctaagcttgcattaacaaaatatcctaactgcaggctatattctaggctacatcccattcttatatacttatcttagcatttttttccccaaatgatttttccttctaaattatttatctaatctgcgatttggttacaccatcatatttcttttaatttagccgttacaacaagatcttaggaaactaaatttgatcttggacaaatatattttgatgagaaaaatcatgtgttattttatcgtatattgaaaattttttcatcactcgatcaaatttagttcaatttacaaaaggtttcatagagatgcaacattcaaaatatatatgatggtgaggctagcaattagttagccacaaagtttaccacacctcactttgccacaaatgtgtcatgccacataaagtgaggctagcaattagttagccacaagtgtggctaagtttggcaagaatttgagtctatgacgtgtaggtccaatgactagcaaagtgaggcattacacaattgtgacaatcaaccaaacactatactaagaaattatggcatgcctaagatttggcatggcaacctttgggagccaatcaaatagccccgtactccctcctctctagtggataatccaatatagctaaccgatgagctagtttgaaaaacaaaaatcaaaatttttttcccgcatgcatgggcaacgaaggcacatgaaattagctgatgtgcatccgtatctagtcaataattcatccatgcatttcggtatgtaagtacgagaaccaaggttgaaggagtatataccttttctttttcaggatccagtatatactgtttttttttatgatctaacatgtactagaatttttttgctggagtacatacctttttattgtaatatccagtatgtttgtacttgatttcttttaggtacagtatgtacctttttaaagttaagtatatacttttttaagttagtaatggtatatacctttttgaattagtagagcagtatatacctttttaagttagaagtagtatgtaacttttaaaaaatgtagtagcggtatgtaccattttaaattagtagagcagtatatacctttttttatgttagtaacagtatgtactgttttttaaggtgaatatcagtatatactactgtaatttcaatgagtactgatgtacttaatgattttttcctggaactgactatatactaaatttaatttcttgggacgagtatatcccgatttcttttctgaacaagtttgtactactcttctttgaacgagtgtactgatctatatactgatttctttcacaaattatattctccgatttcaggagtgaacatgaaattttaaagaatatatagaaagttatttcctcaatttagattaaattgaagcatagtccgatcccaagagaatttgcaataatccaggcagtatatggattcatacatttagccattctgaaaaagaagaaaaaatgaatgtacagtatacccaattttcgacctgcacaaactgctttggacagaattttcatactgccatatccacattttctacatctacatcagctaatccatgcaaccatgcgaatatactgcccggtgttggccaccatccatggtgtatttgtcatgcatctgtatggagcaaagcaaagaactagttaattaggagcttcatcattcttcagaagactaaataatacgctgggttatcaaataattttttttaaaatactagcaggcctactcatggaaagagggtgaatggggattacattcaagtacagatctaataagaaagggaatcctcgatctgcaggaagagaaaaatggaaagataataccttggcaggatgaataaggagtagaacagagtggttacggcctcatttccctgcacggcgcatggatttatgtgtcaaccgggcttggcgaagaaaccccgattgcatgatcggatgatcctgcacctccggccaaccgtcgttcttcgtccacaccggtggtgaggagtagtagcgtcgcgccgaggtgcagccaggccaccgctgcctccgtgtggacagcgtcaccgcacagcgcctacataggacgagacgacgaatcgatgactgatatcgtcgccgctagggcactgcctaggaacgccatgattgccatgttgctgcaaatggatctcaccgcatcccaacaaatcaccgatggatgccgccggcaccgtgcatggttgctcatcaatcgccaatggatcatgccgtccgctttgactctccggtagctagcggtcgatccgaatattgcggagagagcgagctattgccgtcgctggttaagtggttaggatggcagccggggatttatattatttgctcaggaccgattagtgtgggatagttaagcattaggtgattttttttttataaaaacgaaacgggtctgttgagtggatccggtaacaaggttgatcgtgtgcctcattactgatgaacggtggcaggtgtacgtactcccaggtgtatagaaccattttcatatatatatatatatatatatacatatatatatatacatacacatatatatatacatacatacatacatacatacatacatacatatatatatatatatatatatatatatatatatatatatatatgtatatgtatatgtatatgtatatgtatatatgtatgtatgtatgtatgtatgtatgtatgaatgttccacgtgaaatcaggaccccgcaatccatcccaaaatatccttgtttgggtaatcaagggttttgctggcgaaaacttgtgcgaattgcgattacggggtaaggcgacacctcatctatcttttagatcacaaaacggtggttcaaatgtcttgagcaagacgaatagattagacaatcaagccaatgtgcttgaaatgatgattgatgttgatccaagtggtccaagtatgtctatttgcaaagatacgatatgaaagcattgcaatatctactagcattaactactacaattataacatttaataggaaaaaaatttgcccaaatgcacaaataaaaatcaataatttttcaggacgagatgggaccgggaaattaataattaagatagtttcttcatggccgaataacatatatatgtctgaattctgatcctgagatcattgcctaccatgctatccgcctaccatgctatccgttatattttttctcagaatttttttctgcaaggaaatggtgattttataataatcagtaacaagtgctttaatgcccagagggtcatcaaacggccaaacagcacggttgttcaatctcgatcctagcacggttattcacaagagtcaccttgttaaaccctcttccaattatctagagcttcaaaatgatatagatggttaaatggcagattcataatatgttgaacgtagaaatcggagtgcctctagagcctaaggtggactcgaacttgatatgagttggacctccatcttgatttgaacgtctatgacgatcttattcatctcctagcttcttttcatgtgctccatggtctctccatagttcataatcgtgattaaatcattaggtagcaatctatcctcgcaagcacataaagaagtacttaggaacgagctcatcagtaaatttaattgtcgggcgcgagctctagtgactggaccttgcaaaacaatttgaggggtagcgtgtgtatccaaaacgatagggcatgtagcctagtggttccagtgacccaaataataccccaaggtcctgagttcaaatctccgtatgagcgaattttagactgggttatttatggggctaagttaccaatttcaatggccaattagtaacctcgactacctatcgaacagtgggtgcacgcagaaaatgaggcggacttgtgtgtccaattgggggacattgagaatttgagattgtatttgtacatgagcctgagcctatggtgcacgtacagtgtattgttgatccatccgctttgaatttggaggccctagctgagcaatagagaatttcaagcccaattatgcgtactagccatcgagtcgtgggttgcacgggatattaatattgatagcacacgctacatgtgatttagaaccaacaccatgttaagttttattttagttacgtggataaaatatgtttggtcataatttcaaaagaactatttatatatagtacatcctaattcttattaatttcaatttattaatctaatagttttaaaatgtacaaatattaagtaacgatatgtactcatgtccatgtctcaattctgtattttatcttaattaatacacatatatagaattaataggtaccgtattgtagttagtttaaagtcttcttttcatgatataatattttttaaatatataattactaaatattaagttatattcattttgaggtctgaattttagcttttttggacgatactccgtatggagtttaagttattacttattcataatttaataactttgaagttcacaatcaataactatcgagttatatttttttcagaacatcaatgttagctttggcgatttgtaatccaaaaaatcagaataaataagtaccaaactgtactcagtttggagtatcaattatagctcatgatttaatggtgcgaaaatttgtaattaataaatactgagctgtataaggtatcaaatccaacaatagtttttccatgtattaataattccaaaaaaaggaatacattgtaatatccattttagccttttcataatttgctatttctaaaattgattattaataaatgccgagtgctacttgttgatgaaaagaaaaacacacaatagcctgggagatctgcttaactccagtgcagttataagatgttgatgagatgcgggcgtgccagttagtttgatcttgcaacagacaagatatgtaaacaacagaaaaaacagccgatcggctgacaagccgatggagtaattccagccgatagccgatattagccgattccacccgatgtcgatagggttttgagcaatcggctatatatccattgtagataaatatatatagacaatcggctgatgataataaaatataacaatattataatccaatagaaatcactcggctaataataatatgataggataagtatcgatccgatagttaaaagcatacattggctaaaagttcgatgtcataaaatccaatcgatttagataaacagtgaaaccttgttgcaattggcaaaatctaacttgtaagtaatctttgtaagccgatgcaacgtctagaaaacttatcggctagcatcccgataaaacactagcatgaacctattggcttaacaagatttatattatcaacaataatttagtaggtcggacctaatcgatgcagcacgagattataaatgatagtctaatgctcgatgagccgatagatctgtctaatgtgatggatataagaaatctatttataacagcattgtgattgtagagatatatcggttaagacggaagatcagacctaaccaagacagtccgaattaaaccgatacgtctctaaatacaatgtaattagagatagaattgagatatcaggtaggcaaatatatcaaacaaaccagagcgatccaagagatcggagtgatgcagccttgaacaacaccaatatagccgatagtatcactagggccgacgaaacgcaggacttaccccttcgtcggatatggaactgaaccgatgcagccccacatcaggtaccaaattcctctggttgataagtaaaacctcagaaaagagggtggcagtgcgccgagagtagtattgatcgagagataaattacattgaccccgggtgtacatatttctacacatgggtggaactgcttatacatttgtcgggtgatttttaacaagaaatcatccagattttttctacacttagatttatatccaacagactacaaaataaaataactaatacaaatttacttattcaacatctttatcaaaattacagtacacttatatgtcatatcaattttagttatataggactgtaattttatattttaaatactcacatgtcctatcaactgaatttacaaatgtaattttagttatataggagtgtaattttatattttatagaaaataacgaatgcatatttaattacacaacatttttatcaaaattacagtacacttacatgtcatatcaactaaatttacaaatgtaattttatttatataggactgtaactttatacaattacagtataattacattgtaacttacatataactgcataactgcagtataattatagtgtaacttgtatgtaatttcaatgtaactttgtatgtaacttttaaaacactgctagtcatacgaaataaacatcacgggagatctctcacccgtattaaagtagtattatcgttcaatcactttcgttctatacagtggcaaagctaaaaaaagatgcgtacaatacctcgcttggttataagtgccttgccctaatcaggtgctaatcggtaggtttaaaaaacgtcaaattttaagtaaaaaatttgacgacagatttatagcaaaactgcccatgggtagatactagtccttgtaggacaagaaagaaactttcctaaagataaaaggaaaacataaagtccttatcggacactaaacacactttccttaagataaaaagaaactaaaacctgcccaattaatagataaactgtcatttcgcatcctccttgaactcagactcttctagataagtttcctttaattgatctttacccgaatccatcaagaatacaactgttggcgattgatagtttccatggtcgattctaggactttaaaaccgatactgactctaaacctatgattactctgggcttaacaaattttgccattaacactactatatttaaaatctcagttaatttagtaattttgaaactaatacatatcaaatcgtacttggtttggagtttcaattatagatttgagtgatttgataattgaaatttaagaattaatcactactatttgtccccatcccaatttagttttgtatttaatttactaattctgaaagttagaggttatatgtttctgagtttatatactttgatgtcttgcattagaataaagtaaaaaaaactattgactccatatgttttccttttggagtgttttacttgatacaaatttgatttgggcccgtgtgattcttttctaatttttggatgagatcatagaatcggagtatgtttcttcgtaggtgcaaggaaattatacggaatacctatgtgaatccagcagttgcaacacaatcatggatcttcttagttagatgcaaatgaacctttcttgtggattattgtgtcatcacccgaattagttagctaatttactcctggtagtgtggtttcaatgtggaacaattaatcaaattataaaccaatctgtttgataaataaaataaattaataatcttgattgtgaaaaaaatatacctgacctgcaaatttaggatctccaggttccatgcattggccaataggaattcatgaaggcatctcctgctgttttttccagagtcatgtacacatgcaaccatttgatgatgccgtgagaaatcaagattgattgacaaaacaaaaaaatatatacactcaaataccaaatagctgatcgggatggagtatgaagggcaaacctggagcatctcctgtggttttgcgcgcggtgttcaatccctattggtttctcgtattgcagatagaaaaaggtagtcgattatcgttgttttaattagatgtatctcccaaatatttgaggggcttttacatggcccacaatattagctaagcgttgttttctttcatctacggttgctatagtatgatctattaaattaacggacaaatgtttctagttaccatgagagctcgaagatagtggccaattagtatagatactagccgtcaacccgtgcgttgcacgggttactgttgttggtatcataaataccgcttagattatgtattaaatgtattttctaaaattagtgtggcttaaattttgtaaaaaaataacattgcggcttatattgcattataagaacaataacattgcctacaattcacttagggcccctttgatttggaagaaaaacaaaggaatttcggagagttttaattctgtgggaaattttctatgaaagcctttgaaacaaaggattgaatcctatcatatcctttggaatacctatggattgattaatccggtagagattttagagaaaacttagtaagagctctaacctctttagaaactttcctttgaatctgtctctatcatccgattcctgcgtttttcctgcagtccaatcaaatggtcattcctctgtttttcctatattttgcaatcaactattttgcaattgcattcttatcacaatcctgtgttctttttatattcctctatttttccattcatgcgattcaaagggacccttagaattaatattgattaatcatattaatcataaactaccaatagattaaattgtccatgattttttggatagcatatttatttaacatagaatttttatgcaatcgacggtcgagttaaatctttttgagctatccgatggctaatataatcggctagtataaaaaaaatgtttggcatcttaattggaatttcatatgaagatgtgaacaatttcatatttattaattttaaaattggaattattaaatctcaaatggtgtttttattaaatttaaattgaaatatttatttgcatatttatttgtctataaaaatataagtgatgctaagacataaataaatatcaacattatttgtgaaaggaatgtataactcttcatcaatctgtgtcatgttgagggctaataattttgttgacgttgggatttatggcatcccagagttctattacactgactttgactttccgtgtttcctttccacggttgatgcatatcacatgccactgcagttataaaaaaaaagactgttaagttatatttatcaatgtaaccatgtattaaattgaccaaaatctctactattataaaaattaaagatatttttgccagtattctggtacatcatccagttggttttaagatcgttcgtttttagaaatacagttccatgtttgagttagattttaagcttgtttgcttttgaaaatacaaaaaagagtataataagaaatctcttttaaaaaaaaactatgcatgctaacttgagataaagtcagactcctaatgcagctcatgattttttaaaaaaaatccaagcgaattcccacgtagaattttaccctaactaaaccgtataacaataataagattaaaataacattgacccattgcaatgcacgggcatttttctagtctaaacaaattaaaagaacatcaacaataagctatacgacatgacacatggaaaactacatattagttcatagagtgcatttggaaaacatagatcagtctatgttatctacacaaaatcatcattagacaactctttttttacactgggggttttgccgttgcctgttgggaacagagacctcatccaacaggcaaaaataagcacattcaatatgcaaaaaatcagctagtatttctactgtgtacgtgtagaccggacatatagacataacatttgaaaattaaattaaatatttagttcataggttgtcatcagaaaaaatatagatcatgaatcaaaatcagaaacagaacctgctaggtcgacagaatattaaatagcacattctatgggcaaaggatcaacagacaattcattaattatttcaacaaaatcataaatcgatttgtgtttaatttgattacaaaattcacaccagacttgtggggttgcacttgttgagattatgggcatataatgatttaatttattccataaataaatcatgacattacagatgaaaactagcatgaacgcatcattagatctacacatgtaaactacgcagaataacatgaacagatcaaatatgcgcaacatattgaatacgtaccgaggtgacgaaaagaccggctgcttggtcgaaacttttcgcaggtgtctacgaaggcacgaaacacgcgagcgaagaggaaggcgagccgtcgcgaacgaacagggagcagccgcgcgaagcgcttcccaaaaaccttattgccgccttctcccggtgcaggacgtcaaaggcagaggttccggagacctgctctcccgatcgctggtgcacgccggcgagcgggatggagtagtctacgagcgacggcgcagtacagagtaggaggcaaaccctagattgattttcgcatatcctgcgtgaagacggcgggtcggtttatatagagaagggtcgcttgatcagggcggatttttcggaacgtttccaaaacaaaaacgaatccgaatttgcagcaaaacaaaactgcaaaaggaggctgcatctgcacaagggtgaggagccaatttttcggaccattcgacgcgtacgtcgtgcacgcgcgccgcctgccctgccctgccctgccaggcgcgaggcgaggcgagcgagcgcgcgcgtgtgtttcccctcttctctccaccacacatgcttcaagtggctaggaggacatcttcccttttaaggaggtccccctctcctagaataagcaaggtcgtactaaactccacatgcatgccatcccatgaggtgggctttttgtgattttccaaagaattaatcttcgagtgggctaaggcccattcattaattccaacagcactcgttgggatgggcctttacatgcacaccttgtggtagcggagcatgcaattggcgaggatagtccggtaccacttaccttgctctgcatctgatctagtgggaggaaaccaaatcgagctgcagcttgagtgcagcttgagatcagagtaagaaagctacatgcctctattacagatgccatgatagagaggtggaagcgaacctttcttgtgaatcatgttgatacgtatctgagttcggatgagtcctgatcggcgtcatctccgatggaaacttaatcttgatagcgaaaaaataaaacagttccagctggtcatgtatgcagcagatcccttcgatggcagattccatctcgttctcgcttgctcccatgtgttccaatgatcccatctgatcaattaattcgcatagagataaaccatcgatggtgtgcttggagatagaccgatggttgtttaatttcccctgagtgctgcagtcagtagacattgaaaagggcccacatagttaaagaggcttttcagtttggcccaggacccacgatgtggaatccttttatcacgttgaaattgttttaatctacgcttctaattatacaactaatctaatagatggccagatctttctaataaatgtgagagctcctaaacagtgcccaattagtataggtatagatagatggtgtccaattagtatatagatggatagattgtcgttgttgttgtggagtcggcgctgctgggtcgcttgggtggctagctcggcaacgataacacctcttctacaatgtgggagctgttgtgtcgcttttgtgtttagtttggcgtcgacgtccatcgttgttagttgtgtagcgatgggttttagccggtttttctgtaattaaccatacggatgtatggttttcgtgcccgatttttcttataaactgggtcaattcttttcttctaattataatagtggaacaaagttccgccttaggtttaaaaaaaagatagatagatagatggatggatggatggatggatgtaaagaaggttttgtgatatgtactcaataaataaactttctactatggacaagtattggaaggtcaactttgctgtgttcgcatatgctggttcccaacccaaatagtacgcacggaaaacggagcaatccattagcacgtgattaattaattatttactattttttttttcaaaaatggattaatatgattttttaagcaactttcatatataaactttttttaaaaaacacacaatttaacagtttgaaaagagtggcacggaaaacgaaggggtgttaggaacttggagttccaaacgttaaataggatagaaaaatgtcggtatcgaaaagcatttgggctgatatttctctcgtttgtaatcaagctgcagtgtgttcctctcttattcccgatgttgggcttaattacagtccaactcttattccgtctgtgaacaaataaagcccacatgcccaatgtgagcaaggctggcctctttttctttcttctcctcagccttcagctcaatttgctgtatctggtagaactggctgagtcctccaaacttgaccaataaaggtaaatgaagccagtgatacacgaatgaaatttattacataaacttctaaaacgtttatttagttgtataaacgtgcgtagcgcatacgaataaagaccaaaatagcacaacatggcagattttgctgactttgatatttattaggatgccacgtatataaatacttgttcagcaatccatagtgtacgtctattgtacatataaatataaatatgtctataaaaggaaatataagggacacaaatacagaaaagataaaatagaaatcctacatatagttatttttcaatagaacatgcgtaatgccccttgtcagtatgcgtgtggcgtcctaatcaatgttcacctcagcaagattagccatgcatggtgaactattttgagcttgattcatacgcacaatgtacgtaagttcatgtagcagaacgagtgttttacaagtttttcttagattacacctacttataaggtggtgtaccaccaatataacttactcacactacttaaaaaggcaaataggtgtcgccactataggtgccagcacaccaaaaaccggcacctataatgccttcccctcccatgagtccatccccacgcaccacatattcaaaaaccggcacctttatctctaaataggtgccggtttttaaataaaactgcacctaaaacctgtgtccgagaaaggtgccggttctagacccaaaaccggcacctttaattttctccctcccacactagctgtcacaccctgaaaattcaaaatatataaattgttgtttaaatggaattaataaattgttgaagagaagatctaattttaattaataaattccaatataaaatggggccagataaaatttcattaaatactttgcttaattctataattcctagatttttctgggatttatttgagctaaggaagtatttttaataaatggaattgcatttaagaaataatttaaattgaaaaaggttttaaaagtcttcttttggctttgggccgaaagtcggcccaaaaccgctctcctctctcctcggcccaagtcggcccagtccgccgccgagcgcgcgcgcatccgaccgctgacaggtggggcccacctgtcagggtcgtcgtctacctccggccgccgccgcccgaaaccctagtttcgcgccgccgccgttcctttccaaattcggtcgatcctttccttctccggccgaattgatagaggggaaacaatctccgggatctcctctaccttttctcttttggaatcatcggctaattctttttggaaatcattggattcgagttcgaatcggattcgtctctttcctccgaaccctaaaccttccttctcgtcgccagcagccgtgggccttcgccgtcgcctccgagcccctttaaaaggttccccggtgtctcctctacccgccgcctctctcgccttcgcctctcgtcgccggaagagttctagcgccgtgcaacatagcgtcgccgtcgccgccgtcgctccagccgtgcgccgccgccgtctcggtcgtcgtcatcgcttgggaaggccaccgtcgtgatcgccaagtcgccgccgttctcgtccgctccttcgccgccgccgaagaccgccggagcaccgtcgccgccgtcaacccgaagtttgccgccgcttcctcctcgtcgccgtcgccgtccgttgatcttccgccgctcttttggtcaccggtgagttcgccgcgtcgcgctctacccgttggtgccttccgttcgcgccgccgtgagcctgagccaccgagccgccgccgccggtggtgatgtcatcgctgacgtcatcgtcatcctctcccgtgagccggtcgtggaccgatcgatctcggccgtccgttttggatcaagtcgatctcggccgtccgttcgcgtgaaccgccgccgtgcgcccggtccaccaaaaccctagcccgctgacgcaataaatccctttttccttttccaaaataattcattattgcgtcataattcaattaaaatcaatttaagtgttttaatccgatttaatcttcaaaaattcataactaattcatcttagctccgatttagttggttcaagtctctaaatttttctaaaattgagatctacatattaaaaatatccacatgtactgttcatgcttgtttatgtgctgttttggtgattttgctcttttctgcttagattccgtcgtttccggagagtccgttttcgccggagaagagtttgaagagttccaaggccagcaaggcaagtcacacagatcccaaacaaccctttgagcatgttgatcctatttaaagctattgtttctactcaactattgcatttattttcgaatgtcattgggtggaattaacctattgtttgttatagccctttttgatcttgattactttattccttgataccttgggttattataatttgactagttgagctttatttatattggttcaactagatattaggtataatagcttagccctgcttagaaacattagctcactattgggataacttatgactcactattacttaatgatggcttaatgatagttcacgatggtcaatcgtgattggttaattaattaatgtgccaactaaaacctggtaatggtgggttgtgagcacatggttttgatggtcgtgctcatgacaattaaggaccggttcacgagtttcggttgtgaaacattaaccgtgccaaccacaagccagcgtgggcaacggctttatcttttgtatagcatggttcattgcggggcaccagactgagaagtggcggagataagcccacgggggtcgctggggagtccatgccttgtttataatggggtgattatgatccaggaaggtgcgctacggtggattgtgttatgcaaggggtattgtcacaactcctttccgaggtaccgtggtggtattgaggcacatggtgacatgatgtggggttgtgtcttgtgggtacagtggtacacctcttatcagagtaaaactgttcgaatagccgtgcccgcggttatgggcgggtctaacaatgtctttcatgattagtctcacccttctcaccacagtaaatgatgctataactggtaataatttgattagctcctggtttggaatggtatattcctggtttggagatagaactgtgcagccgggatggttgttcagaatggttgggcctatacaacagggtatgttgtatagcgttagattaatattgtttaattattacttaactgttttattaaattctgaaatgtttgctaaatgctgcttttgcaaatgaaaccctactatgccatcctttgttatcctgtgcacttgcatatttgctgcgtggcttgctgagtatgtcatatactcaccttgcaatcattcatcagaggaagagatctacaatgaggctaatggtgtggaggattaggtgtagccttggtcaagctgcctgtggagtggagccgtctgcgccgtttatcttattttccgctgcttagatctttattgattgagaggaactatctacctctgtaatgacattttattcgcttattaattagagtaatatttgtactctattatcaatttgttattgtgtgcctcggctgattcctggacgagggttcacacacatgtaagcgtttggaattttggatagaaattccgggcgtgacactagccgttggcaggccccacacataggtgcctgttttgagacaaaggtgtcggttctcaacccaaaaccggcacctttgtttcattagtgtttttcatgtccgacggtgggccctacacaaaggtgccggttcttggtattacaagtcaaaggtgccggttctcgatccaaaaccggcacctttaatattctccctcctgcactagccgttggtgggccccacacataggtgtcggttttttgtatgacaagacaaaggtgccggtttttggtctagaaccggcacctttcttctaatagcacttttcatgccctacacaaaggtgccggttgggaatagaaaggtgccggttttaggtctagaaccggcacctttgttccaatagtgcttttcataccccacacaaaggtgccggttttttgtctataatcggcacctttcttccaatagggcttttcatgccctacataaaggtgccggtttgggaagacaaagatgccggttttgggtctagaaccggcacctttgttccgacagcagtacttatactccatcccttgctactcgagctgattgagcaagaagagagtggcgcctctccttcttgcccaatcagctcgaggaggggaggaggttttgctctattttttttggtatttggttaaagattgaagcctaaaggtaaatattcattatttctccctccgtttaactcttcgttgttgatttgaattgtcgtgtgcgtatgcatgtaaaatacgatatgggtgttatttttagggataattctttttatcttttttgtgtctattgttggatgaaatgctaaatttgtgttaatgttttcttccacctacgtcatggccgttactcaaattaatggttgtcaaactatgttaaggccacgaaaatatccattgatagcttgatttatctcaaatttatgttaggggtgcccatcgattcacacccgctcattgaattgaattgccatgtggtaatacatgtaaaatgcactagtcattaatttgtatggatccataagtcattcgtagatctattctcgggtgctatgctaaatttgaattaatggttttttcaatctatgccatcatcgttaatgtttcacattagccaaatattttttcgcattgtcgaaaaatagaattttttttatcttttcgttagccatgactatctagttaaggtgacgtgggtgtgtgcaaaaacctcaattttatcgtagggtaaaatggtcattcctcgttgtttttactctaatgtgcttgtaaattatgaaatcttcattgtttttttccttcacggtatgtaataaacaataataatcataggtacgcattggatataatggatctagaatggataactacagcggatcgtgactctgtggagtatttcaggggagtaacggctctcgttgccgcggccaccagcacaaactcagtcgatgcactagaatatatttggtgtccatgccataattgcaagaaagacagacaacttccagctcagcgggtccattcacatctccttacaaagggttttatggacaacttccttggcgaggaggagcaaggggagggaagtgccggcaactgtcacgggcatgatgcagatgtcggctacaaggaggaggaccaaacatgtgtcgatcacggtgaaccaaatctagatcagatgctgcgcgacggggagagatttgacactgatgataaggaatatcacaagttcacaaccatggtgaaggactccaaaactccaatttacaatggatgtaaggcggagcacagcaagctccaagtggtcctatcgctgcttcacctgaaggcgagcaacggatggtccgataagagcttcactgagttgctagagctcttgaaagaaattcttcctacggacaatgtcttgccagaatcgacgtaccaagccaaaaaagttatatgcccccttggtcttgacatacagaaaattcacgcttgtctaaatgattgcattttgtatcgtggtgaatttgcatatttggagcaatgcccggtatgcaaggcttcccgctataagtgtggagacggggatgatgagggtggaaataagaaaagagtgcaggtgaaggtcgtttggtattttccaatcatcccccgtttggaacgtatgtatgcaaacaaaaagcatgccaagctgatgcgttggcaccacgaagagcgtaaaaaagatggaatgatacgacacccagctgatgggtctcagtggagaaagatagataggaagtaccaaaaagagttttctcacgacatcggaaatgtgaggattgcactaagcactgatggcatgaacccgtttggtaacatgagcagtcgtcatagcacatggccagtagctgttattatctacaatctcccttcctagatctatttgaagggtaagtacatcatgatgccacttctgattcaagggcctacacaacctggcaacgatatcgatgtgtacttcaagccgctggtagaggatcttcatacactatggacggaaggcatgcggatgtgggatgcgtacaagcgagaacacttcatatgtcgggctattttgttagggaaaataacagactacccagcacttggaaacacgtcgggccaaacggtgaagggcatgaaagcatgtgtaaggtgcatggcccaaacaggaggcaagtggctgaatcactgtcggaagaccatgtacatgcgccatcggaggttcctcaggcaggatcacccataccaccgaaataaaaatgcttttgatgggacggtagaaatggatggatgtccaattttcagaaccggaagtgagatcttggcggaggtaaaggatctcagagttgtattcggtaaagggagcggaagcacatgtgcatccacatcgagcggtgagacccctctattcaaaaagaagtctgtctcttgggatttgccctattgggaagacctggatattcgtcatgcaattgatgtgatgcacgtggagaagaatgtgtgcgaaggcgtgctcggggtatcgttgaacacacctggcaagatgaaagatgtcacatcctgatttttgtttcaggatttataaattatttaataaattattattagaagttatattaaatgatctttaatttacaagtgaagttaaatgtgggaaataaaatttcctaaatataaagcatggatggatttaatttttattaaattctccatgattaagtcaactctctgaaaatattctcggatctttcggagctcaattcctaaatgatacaaagaacagttcagtaattatttgatcattaatgatctaattataattgttaagtgcttttcttgtttaaactccttaaattataaattgttgtttaaaaggaattattagaaatgattttaaaagcttaaaagagaagatctaattttaatttgttaaatctcaatataaaattgggctagataaaattttgttaaatactttgcttaattctataattcctagatttttctgggatttatttgagctaaggaagtatttttaaatggaattgcatttcataaataatttaaattgaaaaagggttttaaaagtctcttttggccttgggccgaaagtcggcccaaaacctttttcctttctctctctcccccggcccaagtcggcccagtccgagccgcggttttcctttttttttcccgctgacaggtgggccccacctgtcagggtcgtcgtcttcgttgcgccgccgccgcccgaaaccctagcgcgagccgccgccgtctcctttccaaattcgccgcgtctttccttctccggtgaaatcaatagaggggaaacaatctccaggatctcctccaccttttctcttttggaatcgtcggttaaaatcgtggggaaattcgtggattcgagttcgattcggatcggcctctttcctccgaaccccgacctttccttctcgtcgccggcagccgtgggccttcgccgccgcctcctagcccctttaaaaggacccccgatctcttctctacccgccggcaccctcgccttcacctctcgtcgtccgtagcgccctagctccgtgtgccctagcgccgccgtcgccgccgtcgctccagccgtgcgccgccgccgttccggtcgtagtcgtcactcgggaaggccaccatcgggatcgccaagtagtcgccgtccccgtccgccccttcgccgccgccgaagatcgccggagcaccgtcgccgccgtcgacccgatctccgccgccgcttcttcctcgtcgccggcgccgtccgttgcttttccgccgttgttttggtcaccggtgagttcgccgcgtcgccctctacccgttggtgccctccgttcgcgtcgccgcgctgtcattcgccggcgagcatgcgcgtccgagccgcccgagtcgccgccggtgctgacgtcatcgctgccgtcatcgctgacgtcatcgttgccgttccccgtgagccggtcgtggaccgttcgatctcggcagtccgttttggatagggttgatctcggccgtccgttcccttgaaccgccgccgtgcccctggtccaccgcaaaccctagccgctgacgcaataatcctccttttccttttcaaaaataattcattattgcgtcataattcaattaaaatccatataagtgttttaatccgatttaatctttaaaaattcataactaattcatcttagctcagtttaatgtggttcaagatgcaaaagttgtataaaataaagatctacatattaaaattatccataaattgaattaaatttatttaattctttttaaatgggctttaaatagatttaatcttgtaaaattcataataaatttatttgaagtcagaatgaggccgttcaagtctcataattcatctaacattatgatctacatgtttatttacgttttatgtattgtttatttggtttttattagtctttttcttcgttttgcgtgttagcttgtcgtttccgtcgttgcgaaggttcgcgagtgcgccggaagtattcaagaagattaattgaagaccgattattgcaaggcaagtcacacagatcctaaacacaatcctttgagcatgttgatcctatatttaaattctctatttgtttcaactgtgcatttatttttgaatgtcactgggtggtgtgaatctattcctttgttatggcctgtttgcattgattactttattccttgataccttgggttattataacttgactagttgagctttatatattggttcagctagatattagatatgattgcttagccatgcttagaaacattagtacactattgggataacttatgactcattattatttaatgatggcttaatgatagttcacgatggtcaatcgtgattggttaattaattacttgccaactaaaacttgataatggtgggttgtgagcacatggttttgagagtcgtgctcatgacaattaaggaccggttcgcgagctactattgtgaaacattaatcgtgccaaccacaagccagtgtgggcaacggctttacctttcgtatagcatggttcattgcagagcaccagactgagaagtggtagagataagcccacgggggtcgctggggagtccatgcctctggtttttgagggggtgattatgatccaggaaaggtgcactgtggtgggttgtgttatgcgaggggtaatgtcacagctcctttccgaggtaccgtgggggtactgaggcacatggtgacatgttgtggggctgtgtcttgtgggtacagtggtacacctttggccagagtaaaactatttcgaatagccgtgccccgcggatatgggcgggttgagcaatgtttttcgtaattagtctcacacctctcacaataattttggatgttatacctggtaataatttgcttagctcctggattggagattagatctgtacagccgggtatggttgttcaggatggttgggcctgtgcagcatgggtgtgctgttcagtgttgattaaaatctctaattaattactccactgttttacttctcttaaatgttttgctaaatgctgcttttgcaaatgagccaatattatgccatcctttggtatccttgtgcacttgcatatttgctgtgtggcttgctgagtatgtcatatgctcaccttgcaataatcaatcaacctcagttgaagaagaaggatccagaaggagaagacgtttggcttataccccagttgagctgcctgtgggagtggagccagagcttcgctagattttattttccgctgcagttttcttcatggtgaggactaagtgcctcttaagtaagtatatatcggtttagttattatgatggatttgtatattaaattgtcagtttgtgtacctcggctgattcctggatgaggattttatgcacaaataagttcggaaattactagtgaatttccgggcgtgacaaaagacactttgcaagtacggaaagatctcgaagacatgggcatcaggaaagagctgcatcctcatgacagaggaaatggccgctactacctacctccggcatgctacactcttagtgctgcagaaaaaacgagtatgttggaatgcctgcggggtgtcaaagtcccatccggttactgtgcgaacattaagagactagttagcatgaaagaaaaaaggttggttggaatgaagtcacatgactgccatgttcttatgacgcagctgctaccagtcgcaatcaggggtatccttctagaaaaggttcgagacccaatcatcaagttgtgccagttcttcaaagcgataaaccaaaaggttatcgatccggcttcattgg

SEQ ID NO: 16776 - DNA, 713 bp, Oryza sativa
aagttggttagcggaattgtatatggcaagaattgtgtgtttgcatggcgttcctaagaagatagtgtctgatcgaggcagtcagtttacttcaaatttttggaagaaacttcaggaagagatgggttctaagctgaactttagtactgcttatcatccgcagacagacggacaaaccgaaagggtgaatcagattttggaagacatgttgagagcttgtgctttagacttcggtggaagttgggataagaatctaccttatgcagaattttcatataacaacagttatcaagctagtcttccgatggctccttacgaagcactatatggtcggaagtgccgcactccgcttttgagggatcaaacgggagaacgtcaggttttcgggacggatatcctaagggaagcagaagaaaaggtaaaggtcattcaagaaagattgcgagtggttcagtctcgacataagagttatgccgacaatcgccgcagagatttgagttttgaagaaggagattatgtgtatcttcgtgtcacgcctcttcgaggagttcatcgttttcataccaaaggaaaattggcaccgcgttttgtgggaccttataagattgtcagtagaagaggagaggttgcttatcaattggaattacctcaatctttggcaggagtccataatgtgttccatgtttcccaattgaaaaagtgtttaggggtac

SEQ ID NO: 16777 - DNA, 6390 bp, Oryza sativa
tagctttaaacgggatcaacatgctcaaagggttgtttgggatctgtgtgacttaccttgctggccttggaactcttcaaactcttctccggcgaaaacggactctccggaaacgacggaatctaagcagaaaagagcaaaatcaccaaaacagcacataaacaagcatgaacagtacatgtggatatttttaatatgtagatctcaattttagaaaaatttagagacttgaaccaactaaatcggagctaagatgaattagttatgaatttttgaagattaaatcggattaaaacacttaaattgattttaattgaattatgacgcaataatgaattacttttgaaaaggaaaaaagggatttattgcgtcagcgggctagggtttcggtggaccgggcgcacggcggcggttcacgcgaacggatggccgagatcgacttgatccaaaacggacggccgagatcgatcggtccacgaccggctcacgggagagggcgacgatgacgtcagcgatgacatcaccaccggcggcggtggctcggcggctcgggcttgcatgctcgctggcgaacgacggcacggcggcgcgaacggaaggcaccaatgggtagagcgcgacgcggcgaactcaccggtgaccaaaagagcagcggaagatcaacggacggcgacggcgacgaggaggaagcggcggcaaacttcgggttgacggcggcgacggtgctccggcggtcttcggcggcggcgaaggagcggacgagaacggcggcgacttggcgatcacgacggtggccttcccgagcgatgacgacgaccgagacggcggcggcgcacggctgaagcgacggcggcgacggcggcgctatgttgcacggcgctagaactctttcggcgacgagaggcgaaggcgagagaggcggcgggtagaggagacaccggggaaccttttaaaggggctcgcaggcgacggcgaaggcccccggtggctggcgacgagaaggaaggtttagggttcggaggaaagagacgaatccgattcgagctcgaatcaaacgatttccaaaaagaattagccgatgattccaaaacagtaaaggtagatgagatcccggagattgtttcccctctatcaattcggccggataaggaaaggatcgaccgaatttggaaaggaacggcggcggcgcgaaactagggtttcgggcggcggcggccggaggtagacgacgaccctgacaggtgggccccacctgtcagcgggcggacgcgcgcgcgcgcggcggcggactgggccgacttgggccgaggagagagagagcggttttgggccgactttcggcccaaagccaaaagaagacttttaaaacctttttcaatttaaattatttcttaaatgcaattccatttattgaaaatacttccttagctcaaataaatcccagaaaaatctaggaattatagaattaagcaaagtatttaatgaaattttatctggcccctttttatattggaatttattaattaaaattagatcttctcttctagacttttaaaataaattctaaaaattccatttaaacaataatttatatattttgaattttcagggtgtgacaaacctaccccccttaaacagaatctcatcctcgagattcggaagaactggcgaacagatgcggatgagctgacttcaattcatcttctcgttcccaagttgactcttcttccgagtgattactccattggactttgcaaaaacggataacccgattcctggttcttctctcatctatttccaagatacggattggtttctcaacataggtcagatcctcttggacttctatctgttcaagattagcttcttcggtaggtacccttaaacactttttcaattgcgaaacatggaacacattatggactcctgccaaagattgaggtaattccaattgataagcaacctctcctcttctactgacgatcttataaggtcccacaaaacgcggtgccaattttcctttggtatgaaaacgatgaactcctcgaaaaggcgtgacatgaagatacacataatctccttcttcaaaactcaaatctctgcggcgattgtcggcataactcttatgacgagactagaccacacgcaatctttcttggatgattttcaccttttcttctgcttctcttaggatatccgtcccgaaaacttgacgttctcccgtttgatcccacaaaagcggagtgcggcacttctgaccatatagtgcttcgtaaggagccatctgtagactagcttgataactgttgttgtacgaaaattccgcatagggtagattcttatcccaacttccaccgaagtctaaagcacaagctctcaacatgtcttccaaaatctgattcaccctttcggtttgtccgtctgtctacggatgataagcagtactaaagttcagcttagaacccatctcttcctgaagtttcttccaaaaatttgaagtaaactgactgcctcgatcagacactatcttcttaggaacgccatgcaaacacacaattcttgccatatacaattccgctaaccaacttccggaataggttgtctttaccggaatgaaatgagctactttggtaagtctgtcgactatcacccaaatagagtcatggcctgatgacgttctgggtaaaccagtgataaaatccataccgatttcttcccacttccattcaggaatcttcaaaggctgcagcaaaccggcaggtttctgatgttctcccttgactcgctgacaaacatcacatactgctacgtattctgcgatttcacgcctcatacttgcccaccaaaatctttccttgagatcctggtacatcttagtactactagggtgaatggagtataaagtatcatgagcttctttcagaattgcatcttttaaatctttgttgtcggggacacagattctctcacccaaccatacagttccgtgctcatcctccaagaaaccgatagcttttcctcttctcatattcttcttgatctcttgaatatcaggatcattaatttgggcttctctaacttgatcaattagagtgggcttcgcttctaaggctgcaacgaaacctatactgacaattcccaaatttaatctttcaaattccttgcataattccaatggcaactgtcgtccttccgtagcattgcaatagcctttcctgctaagagcgtatgctacaacattagcctttcccgagtgataatgaattcccatgtcatagtccttaattaattccaaccatctcctttgtctcatgttcagatccggctgagtaaagatatactttaaactcttgtgatcggtatatacctctgtacgagtaccgaaaagatgatgacgccaaattttcaacgcatgaactactgcagctaactcaagatcatgagtagggtagttcttctcatgcggacgtaactgacgagatgcataggcaaccaccttcccgtcttgcatcagaacacaacctaacccaagtttggatgcatcgcaatacacctggaaacccttctttggatcaggcaaaatcaaaataggagctgatattaagcgactttttaactcttgaaaactctgctcacattcttctgaccacttgtacttcacatctttctgaagcagtcgtgtcatgggcttagcaatcttggaaaaattctctataaacctccggtaatatcctgcgaggcctaggaaactgtgaatctctgaaactgtctttggttgtttccagttggttacggattccacattactaggatcgacggcaactcctcctgctgagatgacgtgaccaaggaacttcacttcagacaaccaaaattcacacttgctaaacttagcatacagttgatgttctcgtagcttctctagtgcaaggcgaagatgttcttcatgctcttctttggttcgagagtagataagaatatcatcaataaagaccaccacgaacttgtgtaggtattccataaacaccttattcatcaagttcatgaagaaagcaggggcattggtaagtccaaaagacataacagtacattcgaacaacccatacctagtggtaaaagctgtcttaggtatatcttcctctttgattctcaactggtgatatcctgatcgaagatctatcttggagaaaacagtagcacctttaagctgatcaaacaaatcatcaattctaggtagtggatacttattcttgatagtcacatcatttagtgcacgatagtctacacacatcctctgggtatgatctttcttttccacaaaaataaccggagctccccatggagatgaacttggtctgatgtatccttactgaagcaaatcatctacttgcctcttgacttctgccaactcattggctgccattctataaggtctcttatggatcggagttgttcctggtaccaaatctattctgaactctatatcccttttaggcggcataccaggcaaatcatctgggaacacatcgggatactcccggactataggaatctcttccaaagttatctggttcagtcttgaccttaaagattcagaagacaatgcatgaacagttaccactcgaccatcattgctggtgagagttacttttctgttagcacagtctatcacacctttatgtctggctaaccagtccatccctaggatgacatctaggtctttggattctaacaggataagattggccagaaatggtactcctttaatttctattctgacagaggggctacgttgcaaagagagtgcttgattacttggggtactaaccatcaaaggacgtctaagatcttctactttcatcccatgatttcccgcaaaactcatagataagaatgaatgtgtagcaccagaatcgaaaagcactgttgcaggaactaagttaacaaggaacgtacccaaaatcacatctggagcatcttgagcttctgccgcagcgacatgattgacacgagcctttgatgctggtgcggtagagttgctctggacagggacaaccttcatgcgtcggggcttcggacacttgtcagcgtaatgtcctgggtctccacagttgaaacacaccacgggcttgctgccatgctccctcttggcaggctgttgctgtgttggagctgcaacagggcgtagagcttgattgcggatgttgttgccagcattgttgttgaagaactgacgctgcggacgaacaacagacgaagaacctccatgtggcatggactggggtcctaaagtaagacgcggcctctgattattcccctgttgtgtcttgaattgagcaatccggcgtttcttctgctccatgcggttgtatttgtcctcttgacgaatagccttatccaccaacttctggaaatcagaataatccccagtcatgagtgggtaagaaagctcatcattaagtccttctaagaacttctcctggcgctcttcatcattgcgcacatcctccggagcataacgagccagacgattgaactcgtgcaaatactccgtaacagagcgagatccctgggtgagcgacctgaattccttcttcttgagggacaccactcccgatggtatatgcgtcttccggaaagcagcggtgaattcaagccaagtgataggttcagcagtagtcctgttcagacggaagtgatcccaccattcagaggcagggccatgcaactgatgtgatgcaaatgaggccttctcctgatcagtgcactgaagcaaatccaacttcttctctatggcatgcaaccaatcaccagcttcaacaggattagtggtactagagaaaataggcggcctcacacgaagaaattctgctaacttgttatggggaggtgcatggttatttccttggttctgctggttctgaagttgctgcatcatcatgttcattaactgagtctgttgagcaagaacttgagcaagagtgggattcccttcattgttattgttactggggccattcccattgctgcgagtgttcaccatctggcatggacagggcacaagaagagacaccgggggaaactacttaggacagagaattactttaacttttattgatcttaactgagtttcattattacaaactgaagactctcacaccactaaactcaccaacttcctaacactcaaaagcaaacaaacacatgcacttacatcccaccactgatgtaaatcacatgcgagacacacacaaccaaacttaaaacaagcaagctaacacaacgatctaagacaacgacttaacaagtcactctagttcttccgagcatcggaggtcgattgaaggctcattcgggtcgtcttcatcatcttgagttgctacccactca

SEQ ID NO: 16778 - DNA, 3807 bp, Oryza sativa
tatgttgcacggcgctagaactcttccggcgactagaggcaaaagcgagaaaggcgccgggtagaggagacaccggggaaccttttaaaggggctcggaggcgaccgcgaaggcccccggtggctggcgacgagaaggaaggtttagggttcggaggaaagagacgaatccgattcgaactcgaatcaaacgatttccaaaaagaattagccgatgattccaaaagagaaaaggtagatgagatcccggagattgtttcccctctatcaattcggccggataaggaaaggatcgaccgaatttggaaaggaacggcggcggcgcgaaactagggtttcgggcggcggcagccggaggtagacgacgaccctgacaggtgggccccacctgtcagcgggcggacgcgcgcgcgcgcggcggcggactgggccgacttgggccgaggagagagagagcggttttgggccgactttcggcccaaagccaaaagaagacttttaaaacctttttcaatttaaattattttttaaatgcaattccatttattaaaaaggttttaaaagtcttcttttggcttttgcaattccatttattaaaaatacttccttagctcaaataaatcccagaaaaatctaggaattatagaattaagcaaagtatttaatgaaattttatctggcccctttttatattgaaatttattaattataattagatcttctcttctaggcttttaaaataaattctaaaaattccatttaaacaacaatttatatattttgaattttcagggtgtgacacaaccctaagaggagaagggggcgaaacacagactagactgtaacgacgctgggagatcacctcctgccgatcagtcttctgatgatttcgccaaaagcgagccatatcctccaaacattttgtatgaacaagatcgtagtcttctaaggttcgcccggggtccgcctgtagccagccggcaaccttaaaaaccttatagctgtggccgtttatcaccatttcgcgataaacaggccgaaacgggcatcgcacctttggcagaattttaacgccaaaaatttctcgtttttgcttcgccaatccctagaggggggccgaaggcacaatattcggcaaacaccctgttaaatagtgcagaaagggcaaaagatgaattgtatagtaagaatgggcaaaacaagatcaaatattacataatacgaaaatgacgtaatcatatacgccaaaggcatcgaccataaaaagtggcaaagatagagtcatacattccaaatatccaaaggtcctttttcggctacaataaggagagtaaggggccgaatatacattgttcgcctttcccggcaaacgcaaaaagaagaaaattttcaaaaatctaaggaaaggacggagggcctcacacctctgggtgatcctaggcatcgcctccaacccctccggccgctgcatcctcttcttcgcaccggtctgccgcctctgcctctgccagttgctccaaaaggcgtgtcttggcggtggatccgccgtccttctgccagaactgttttcgccacgcacgaagcgcgggcgaaacgtcctgcgcactaacctcccagtcccttttcgcatagttagggaactcggcgacgtgctcacagccgaactgctgcagaaggcccatagtgaaggctgccgatacatgcgcacagcaatcaccgtacgcagtggcgcagtccgaaacggcaccactagcctgctggtctactccgagaagtcgaaggctgaggcgtcttcggcagggactcctcgcacctttacacccatgtccgaaagggcaaggcggagcgtttggcatactgttcttgcgaatcggggctttcccatctcccgcgaaactgttgcgactccttcgcagcgctcgcctcggccttgctgacctccaggcgaagagcctccatcttcggctcagtaaggttgtaataatcggtcagcgcagcagaatgggctttttctttcttcaattcggccttgaggcgatcaacctcagctcgggcctctttccccttctccaattcggccttgaggcaatcgacctcggccctagcctcttttcccttctccaattcggtttggagccgcttgttctcggccttcgcctccttgagggtgttggcgagggcctccatctccaagctcttgcggcctatttcgtcatctttggcctgaagacggttcctaaatccgtcaagacgagcccgcacggttcgctctgtcgaacaataggccgcaagaatctgaatgcaagataagagcggacgaagagaacaaatgttaattatgggacctgtaaaaaagaaggggaggaaaataaaaaagagagcgaaaaagcatacccgaaccaacaagcttttaatagtggaacacccttcatcgaactcattcaactcggtgaataggctcagggtgctggcaggtaagacaagattgcttactccctcgacgaagggaataagatccgcacgggtctcgaaatcgccaggggcgaagtggggcgccgcgagagagtactccgaggcagatgtttcgatggccgccaccttacccttgccttgacaagcggcgaaacaaccggctgacgtagagggcttccgaaaaccctcgccgcagccgtcacgatccgatcggcggacgctgaggccccggcggcggcagtaccacccgctccaccagcattgagcggaataatgggggcggtcgaaaggtctaagttgcggccagcgagcgaagtcggggcttcgtcagaagactcgtcgtcgctgaaaatgcgagcaacatcgaccatcgacgagtcctttcttttttgagatctttttaaccggacctccattcgccgccttacctgctgaaaacgcaaccaacaccttcgcccgctccaaatcctttcgatgaaggggggagctgttcgattccaccccagtctcgttgtgccctagacttggagtaggagtgtagccagggtctcgacgcggttttcgaccgcctcgtccctgcccttttcggccgcgacctccgccgtcatgctcttcgacgtcgtccttgtcgtcagtgtcagaatcagaggaagcagggacccttcgcttcctaggggccagcttcacttgtccgtgcgtccgctttcgcgaaggccctacatcgtcgtcggccttgtgggggtccgcccggggaagcaattcgccgttgtaaacccggttcgcctgggcggcagcctgtcatgtaagaagctggctatactcgacaaccaacacgttgccaatcatcttacgagcttcggcgtcagcctagtcgagagtcaacactgcgaaaataaagggtgtagccatattaagcatcgaacaatgaaaaataacgaagcgcaggagtgcatagtgaaagtgcagtcttaccgttcgtcccctaaggaagaaccaacttcggcaaaccattgacctcttcgccttggtcaaatgcgacttgacatgactgggagaggggaaagatgcgaagcatgcagaactcctccaccaagtcgcgacaactaagtcgggagcaaaccttacgcagcagggcgaaccgcgcctccatagcgccgtccacggcaatcttgggtttccggttcggtgcaattgacctacgctagcaccggagggccttcgccgactcggaactagccttaaaggggatggtgtggtaaaaccacctcgccatccaatggcggtcccactttgacatggcggcattcaccggccagagatcggagcgctcggggcg

SEQ ID NO: 16779 - DNA, 1752 bp, Oryza sativa
aaataaaaaataatataccaccatccgcaggaggtgaaaagcggcaaaccaataccaaccacatagacaccaaactttatttgcaggaacaatataggtttcggcaggagcatcggtcgaaagggagtgccacataccataccacattgtttgcacggtctcggccgaagctcctatctcacccttgcccgtgaggggcttgttggaggtatggcatgaggcccttcgaacaaacctaccgaaaccatacgactagtgaggattcaagcccgagacgtcaaggttagtcaaggcgaagcccccccatggcgaagactatggaacaaggacggcgagaggcggggaatcgcgcgggtacctcgccaagccagaggcctcttgggcaaaggatgtagggcgaagagtatatgccgaagggagacgacttcgctgtagcaagttcagccccgcgaggatcgaagaagccatcctggcccatcaagcctaggggctattgggccgacgatcgcctgacggcccattaggagcccatgaacctcaattacactgtatacccatgtaaatgtccctttcataagggcaaccatataaattcccctggataaccaaagccctagtagtaagaacctgtaatgaggctataaatagtctcatagagccatgtaatacggggggatcataagaaaaattctcaatttaatacactttacttcttttccaactactgttgagtaaccacgtctttcaacgtatgcagttgtcgtttcgataacatacgcaatttcgcagaaggtcatcgatccggatagattagaagcccttcagaatgatgtggtgcaatgtcttgtcagttttgagttgatatttccacctttatttttcaatatataatgacgtatctgctttgtcaccttgtcaaagagatcggtattctcgggcctgtgtatctacacaacatgtttcctttcgagaggtacatgggtgttctgaagaagtatgttcgtaaccgtgctcatccagaggcaagcatcgccaaggggtatggaacagaggagatcattgaattctgcgtacaatttattgaagaccttcgcccaatcgggatacctgaatcacgccatgaagggagactacggggaaaggggactctcggaaggaaagccactacaagaaaaatactttgtagagacatttttctagtactatagagacacttttcaaatgcctttacaatacaatagaggcattttaaaaaatgtctaataagtaccttatggtgaattgtctctacaaacgaagaggcattttatataatgtctataaggtggtagaggcattttctagagacattaaattgtaccacaaccatatgaaaccaatgtaaaaatgagaataaaatattttcccttgtttctgtcaatccttgaattcatgatcttttgaacaaatcattcttatgttcaaggcactaaccaactcaatcccatgtcattcattatatatgtttatgccttaagttacttatatttagccatttagtatacttttattgtaagaagtgtctctacagagtttaaagtgtctcaagcaaatgtctttacatgttagacacattttaaagtgccgaaagaatgcctctacaagataaaatctaataaaatgtgctgaaaatatttctaaagtgtctctagagtaaaaattttctatacaattttgaaagtgtctctacgctataaaactcctgatcttaga

SEQ ID NO: 16780 - DNA, 1890 bp, Oryza sativa
ttttgaaagtgtctctacgctataaaactcctgatcttagaggcaatttgccgaattctctacaaaagtgtctttatataatgtttttgttgtagtggcaataatgacgatagacaataatttattccgtaaagcccatttcacggttctgcaacaatcttcattggtggctccttacatcgaggagcacttggctctaattcgcgccagaaacatcggtaagttcgatgcatggattacacggcatcacattgatactttccccacgtggctatgacaacatctcatgggtaacgagacgattaaccaagaactggccttcctggcgaggggaccatctggctcgatcgcgacattccagggatatgagatcaataggtacacattgtacacgagagcccaagacatgaagagcacgaaccaaaatagcgttgttcgtatcgatgccatgggacacgatggaacaactggcacgtattacggtgtcatcgaggatatatgggaacttgactatggtcctctcaaggtccctctgttccggtgccaatgggttaggttgactggtggaggcgtaacgattgatgacagtgggatgacaacggttgaccttaacatggttggatactcggacgaaccttttgtccttgccaatgatgtaacgcaagtcttttacgtgaaggacatgtctagcaaaggaaagaagggcaaagggcctgacgagccgaagcgccacgtggttctcccaggcaaaagaaaaatagtcggagtagaggacaagactgacgagaattacgatcagttggatgggcaaccccctttcacggtgacgattgaccctagcatcctcctatcaaatgaagacaccccttactcacgtagagataacaaggaaggaacaatagtgaggagaaagtatgtgcggtcaaccgtcaccgctgatgtattgccgtaattattgtgtacacaatgtaaactattttggatgtattgaatatccatataaatcaattgttgtatggcatatgataattacgcacgattattagaggtttcaacaagtttaaatcatgtatatgttagttatatgtgatacttacaatttttaaaagttttaaatcacacaggtggcaatttcatatgtatgttaattagagtttttaacatttaatttactagcattcatatgctaattataattgactagaggatttttaaaagttttaaatcacgcaagtggcaatttcatatgttaattagagtttttaacatttaatttactatcattcatatgctaattataattgactggagaatttttaaaagtattaaatttaatatatttttaaaactatcattcatatattagagtttttcacaatttaatttactatctttcatatgctacttatatatgactattcgaatttttaaaaggtttaaatcatgcatgtggcatttacatatgttaattagagtttttagcatttaatttaatataattcctacgctaagtacatatgatgattacaatttttattaattttaaatcatgcagtatgtacattaatatcttaattagagtttttaccaatataataatatcattcatatatatgctaagaatatatatatattggaatttttattaattataagtcatatatttgcttattacgatttatccacttaatttattacagacaaaaataatttttcgaagtaattgtcatcaatctttgtacttcaaataatgttaatgcattaacttctattttataaacacatatgtaagcgaaaatcatatgcagtgctataatctttagtcccggttcttaaccctaaccgggtttaaaaagaatttcgaaatagcgggaaaagatatttactccc

SEQ ID NO: 16781 - DNA, 5039 bp, Oryza sativa
atatatatatatatatatatgtatatatatatacatgtatatatatatatatatacatgtatatatatatatatatatatatatatatatatatgttacttcgcatttatcctaatacattttttttatcttgtagaaaagacgtgttgtcggagtcgtccgtcaagcctgagtggaagagctagccctagaaggaattggagcaggcaagtgacgtaataatataaatgattgttatatttgtaatgcaattaattaagattattagacctgtaattagacttatcatataagattgtgtagtgttctaatattatttgagttttaatataagattattttattgcaaattagacttagtatgacattattgactacggaattggtgcgactcctaggaattgactattgtagtcttaattagacttagcatatacgcacgaaacacttagcatacattactattttagtcttaacatgtaatattatttgagttttaatataatattactttatttgtaattagacttggtatgtaattattgactacggaattggtgcgacaagtagcaattgactattgtagtcttaattagacttagcatatacgcacgaaacacttagcatatacatgactattttagtattagcatgtaatattatttgagttttaatataagattattttatttgtaattagacttagtatataattatttactagctagggttgtataatatacgtcacctagacttagcttatatcacgatttgtaattagacttagcacgtaaggttgtgtagggttctaatgtacgacatttacacttagcatacatgacttagattgttaaaacataaatgtctcgtgacttagcagatgtttcttgtatcaacagatggctgaccgcgatgaggaacagatattgtacgatacaatcgcggagggaagcagccagtactggaatgaagaagaggggaacgaggatccaaaccagtacttgaacgaggaagggaacgtggagagggatgcggaggggaaccagcaggggcacgtggaaagggatgtggaggggaaccaggaggaggaggctagtggtagtcaaccctccgttggacagaagagggcacgcgggcaacgaggtgcagcgaagaagcttgagggtcggcacatcataacggaagtggaagaagatggacgtcctagtgccccggccgaagccgccaagaactatgtacgtcacagcggttgggttgtgcgggataacgtgcctgtcagtacggtgtactggcgaaaacaagggcacgcggagatcatgagagctttgtcccagattctgagaaagagatgctgtggaccacaatgctcgagacattcaccctttctgcgggtacagaggacaaagtgaaaaggtggactctgaagaaaatggcagaacagtttcagagcttcaagggagatctgtaccagaagtatatactgaaggggcagacaccgaacttcgacacattcccaaagctaagggatcactgggacgagttcgttgcatataagacaggtgaacaagggaaggcgatgatggaaagaaacaaagaaaatgccgccaagaagaagtaccatcaccacttggggtcaggaggctatagcgtcgcgatgccgaagtgggagcagatggaggctagcttgattgagaggggtatcgaaccggcaacagccaattggccggaacgatcgaagttctggtactatgctcacggtggaacgctcaacccagctgatggctcactggtcttcggctatcagatacaagaggctgcacgatgactaacagatgcagtggaagcctcctctcagggcacgttccgaccagacagagatagggacgagctgacactcgccctgcagactccagagcatccaggacgaactcgagggaaaggggtgattccttggaagattggtttcaaggaggacatccacacgtacaggagtcggatgaggagcaagagagataccgaggcgaagattgcagacctagagttccgggtatcgagctacgaactcaacatgcaagaggaggtggcaaggaaggttgatgaacgcatggccgcacatcggtcccatgatccccagccgaccattcctcctgcaatggtgagcccgtcaggaaaccgtagcagctgcgcctcaacggggcaggtaggatcacagagcatggacgccatgcaaacacaggacgaatcgacctgtcccgttgatgacatcactcagcggacaccatgtgagctgcatattcctttgaagaacttatcaataaaggtaagatttagccattccgctagttgctgcttatatatgttgattactaataaataatctctcacaacatgaaggtggcgtcgggcatggccatcccaacggacccttcaggtacttaccactgcaggccgattccagcaggatactccaaggtcgaagttgagttggtcgaaggcgcgtacgaggacctcgagctggattaccctggaggagacggtgagacgcatctacgagacacatgccatgccattattctatggcgcaggcggtacatcatcctccctgggcgacaagcggcgtctcgtgcaccatctcctccggctccgccatctcctcctcaggatcctgcaccgtctcctcctcatgctccgccagcaccgtctccacctcaggctccagcatcgactcctcaggatcctgcaccgactcctcctcgtgctcctacacctactcccccgcaagctcctcttccggcaccttcaaagtcaagggcccccccagctccaccgcttgcccacataagggcaacaaagaaggcgaaagttgacgccgccaagaacaaggacccggggtacgattgcacgcaagaggagcttgacgcttacgttgcatcagaagtcaagagacaattcaagcctcgaagtccagaaaagaagattcctatagaccccagtgtcaggaacttcttcaggggtatgtctgcatctgtcaaggaggccatcaagctatcggactatgagcgaacgctgaagaaagcatcttctggaaagtccaaaccagtccctcagcttggagagcaaccaaaccaggagatcgagccgttggtgaccggtaaagaaatgacgatagaacaatttattactgacaccggtctaactacggatcaattgctaggagtcgcaccaatcgaaaaggcggaagtgaaatacatgtacgaactcggtaaaccgcttgtcaagcctgagctgctacagtccctacccacacaaatgtacaagttccatcagctgtacatggagatgagcgccaccggtagagagatgatcggagcgaggatcagggacacggacttcttgcaaggagatgacattctctggatcaatttcaggggaatctacgaactataccagctggacgccctcgacgtctctattatgagttgctggattttgtaagtatatcgttcagttagatttcttactatacgtctcctttaattaattaggtccttgtatataagtagaccatagaaaataatatactcccttttatcgttgtagaatggagattcaaagggcccgacggcggagggttttcgatactggattcatcgaccctcggaaagtaaacgtcgcaatgctagaccaatatccacaagaaacagaggacaatctcgtccatctcctgaaggcgcagcattacaagacgttcatactgttgccatacaacacagagttagtttaattttactgtcttcctacataccaaatttcattcccgtacgaacttgctaagtgtttcatatgtaatgcatcccacgcacattgcagattccactgggtgcttttactcatcgacctggaggcctgcaccgtcaacgtatatgactcaatggataaaaaagagtctacgtttgacaaggtttttgaacttatagacaggtaccgtcataagttcctttgttaattaagaaaatcttgttatgttaattgctactacgaatcatagctttaaactccatgtagggcttggtatcggttctgtcatttggtccgcggcaaatggagagaaagacttaggcggaagttcaaatttcctgtgagtacacatgctctacatttatatttctccgattcaaatacatacaagtgtatattaattagatctctcgttgtttgtcatttatttgtagtgcgcaaagcaaaagcagggaactaacttgtgcggctattacgtgtgcgagtattgccactgccttgcagaccaaatcatcaccacaagagagctcgatgtacgtacaaataaattcaaaatttcattacgtagcgatttcttgtttaattactaatcaatttcatacattcatatagtttattcgcatgagggataacctgaccacacacaaggaatttatcgcggcggttcaagaacaactcatgggattcatcaacgaagaaatccttgatcccaagggtaaattctactacgacggaaacacaattcaccggtccttagcttctgagctagcagcgagtactactacgtcgaaaccgtagctagctaggacatataatggattgtaattaatacatgactacatatgtttctatatgcatgtgtacacattttctataatgtaaatatattttgttcatatatatatctatatacatatgcatttgcataacatatatatgtataaatacatatatatatatgtatgcatatatatgtattgaaacatatatatgcatggtttatatatatatatatatatatatatatatatatataatatatatatatatatataaaccatgctgcaacaggggcatgcaaaaaaaaaaggtcagctctatttttagtccccgattggtactcccggtttggaaaccggactaaaggggggtgacgaactgggactacaaagggtttctccaccagtgtggacaggaggggaggggtatacgggctctcttttcaatttttttaatccttt

SEQ ID NO: 16782 - DNA, 10834 bp, Oryza sativa
attcctgccaggtaattgtcagcatggtctagtactctgtacccttgtcatatcaataattcaatcttgattcattctgggactgtttggttctcgaaaatgaaatttttcagtatcacatcagacgtttaatcgggtattgaaaatggtttttgaacacgaataaaaaaactaattttataactcgcctcgaaaccgcgagacgaatcttttgtgcctaattaatccgtcattagtacatgtgggttactgtagcacttgtggctaattatggactaattaggctcaaaagattcgtctcgcgatttctcccctaactgtgcaattagtttttaaatttacctatatttaatactccatgcatgtgtccaaatattcgatgtgatgtttttgggaaaaagattttgggaactgaatagggcctgatttgtaagtctgttcgaatttactctggataagaaacttactacttcctctatcctataatataaggcgtgcacacattttaatattcaactttaaaaacatttgatcaataattattataaaataaaataaattttatttgttaaaattaatattattggattgatatttaaatttactttaagatggttataaatttgttacaacaaaccttattgtatatgagaaattttaagtcaaagattagttttgaagactgtaccaagtttgactatatcttgtattatgggatgaagggagtaactattttaaggagctttctgattccgagagaatctaaagtggccaaaaaaaactcctccaatcagacattcggaaagcttgacaagcagctggacaccggggctgagacaagagcatgacgagagcatgataagagcaacaatggatttatggtcacaagagatgaagggagcagcgtctacagcggctgatgccttgtgctcctggttctatttgcccttaattttgcatccattagtgttcagcggcagcggcagcagcagcaagctacggcaactccacgggccatcacagacgcgtttgtattgttcaataaattaactgcaagacaacaaatgacttgacctgcttgttttgtttgtaccaaatggtcaatgatttagttaatccagcctgtctttgttttttttttgttctttccacaaacctgactcttccttcaatgcatgcctaacaaggttgatctcatcttgttcgctgccatttggtaattactagaattttggtaacacgacaactgctgaactcgcttcgtcttaaaatattactttctctgtcctaaaatataaatatttttacctacaaatatgggtatatgtatttctagttatgaatctggatatatatatatatatctagatttatattttttatataagatgggttaactatgaatctagatatagtcttaaattcaatatttaatattttgagacaaagagagtagatggtaaaagaaaaatcagaattaacctactagctaagactgcatttctagctatcaacgtgcaccacagtacatgtttaggttcatagctataattgaatttttcgtgggatggatgcagtactacttttttttcctctacctatgatgggtttaaccaaatcttaattaaatgattaactaatataaaaaattttgaatttgatatcagaaaaatgatattggtatatttgttgtgaaaaaaactttgatacaaaatatactattagtcatttttacacaaatatatatgggttaattttatccatgccattacaactttgctaatttagaaaaatgctattactattcgtgatatctgctgggtgtcactaaaattttgcaaaatgaaattgtggtttgacgggcatgtgtcaggctgaagttgactggcatgctgagtccgaacaatatctcctttgcccattattcggcattgcggattttatatcgaatagtgtcaaattgtgatcatgggcacattgaggtatgagtggctatttatgcgtgtatggatcccactcatccaaaattatgtggtggtcacaaattgcactggatgatataatgtttgggtgcccacagaaattgtgtcatcgctgtcacattttccgtcccttccgtcttctttcttctctccgtttcgtctccttcccgtcggccgaccgtgcctgctggtcctcaatgaactgccgccacgccttcagctccttccttcaccttccggcatgctcacaagccaatgccgccatcttcaactcctcgcgtgagctctaggaaggccggatcaacgcatgcgtgctccctagccggtgtcaccaccatcatcacaacctcctcattgcgcgagctctagggaggccggatccaagcctcctcctcgcgagagctccgaggaggccgcatccaggtgcgcgttgtctgcgagcagcgtcacctccatcttcaccacctcctcctcgtgcaagctctggggaggccggatccaagcgccggccaccatattcacctcctcctctttgcacaagctccaaggaggtcggatctaggctccgccgccatgtgctagatccaggtgctactctcatcttcacctcctactcctcaccgtggatggagaggtgatggtggtcgcagctggcgtcaattgctgctccacctccgtgttcttcatgtgcgtcggctgttgccctcatcacttgatgctccgccgtcctcaccgcgtcatccctctctgccattgacctcactccctccctgggctttggcgccggtagcctcacccgcttcgccggagcttgctagtcggcctctgacctctctcgctgactcgctccctagcctttggtgccaccagcctctctcgcttcgtgggagctcgctggttggcatccttgcagccaaccccttgatggggagaagaaggaataagatggaatggatggaaaatgtaacggcgatcgcatggtttcaattttggaaaatttcagtggcacccaaccgatatcacaaatagttctaaatcggcaaagttacaatggcatggatcaaattaacccaatacatatagttagaaggaatgaagtgcatgtgaagtgcacggatggtctctaaacttgtacagatgtgtcatatagggcttgttcagattgtagccaaaataaaccttaccaaattatggcattgccaaaattttggcaggatttcttatgtatttaccaatttggcaacaaactaaatgtagacattttttagcaactttaccaaaaaaataatatggttgataatgacatcaatctaagcagccccgtagtttcctaaacttctaaaatttatttttaggttcttgaacttatcttgggtatcatacggcatcatacagattcaaacgggctgtatgtaactcacagtgtccgctgatgttgtatgccaacctatatgtcagtcacacagaaaaaaattaaattaaaaacatattttctcctcttaggtttctcctctctatcttaaatttttttaaattttatcttttctcttctccacctaagaggagaaaagatgttattaattcatttttttccatgtgactgatacatcggtttcattgacacttatgtgcaagtatgacatgccgtgtaagcgcatggagcgggttggagactgattgaacctgtatagttttcaatgttagtttagagacccaaaaatacgttttgagatagatctagatgattcatccttataagtttttagagaccgcttgtatacttcacgcttagaaaaggtagcgatgagacatacatattggtggacatggagaacttcctccgtccgaaaataagtgacttagatacccttgtcaaatgaggttatttttacgattaagatggtggttgagagaagataagaaggaatttgaataagaggtgagtaatgacataagtagtactttaaacttgttacttattttcagataatttttaaatcaaagtggtcacttgttttggaacggaggaagtggtatcaagttttttaaaacctacgttccaaaaatgaagtgtttttttatggatggagcactaagttttgttaatgcctaggaattttggtaacaccaaatagtattttgttttattaattcggtataatcgtggtgaaagtgggtcataaaaactgaggtcaatactcagtactaagagcaagtttaatagtatagccaactactagctccaaatcatctatagccaatgtaatagccaattcatacaatagttgcttactatactattaatacttggtcccacctgtcatacacacattatgtcttagagtccgtgctgcagctggctacagatctgtagcccgctactcttctttatcttcctttatctttttaaaattgtttatagctggcttatatcctgctattttacctgttctaacacgtcgagccaaagaaaaacaaatcaattcaggtgcacattgttgctgcattaactattacgagctgctaccagtgcaaggccagtgacgcattcgcattaactattactctctgtcggcagctctcgtgctcatccagccatccagggaatacatatatcggaccaaaaccctcgcatatgcctccaagtcttttcctagctagccagcaacatcttcagatcgatccccccaccaagcctgcatttcattgcgggtgcacgcagagatcgaggagagacgatcaccaccatggccggagagatcattccagacggcggcggcggcggcgcggtgttggcggcggagagcgtgatgctgccggcgagcatggtgctggtgcagctcttctccgtcgtgctggtgctgctgtccaagctcgccctcagcaccggcatgcggccgttcgccctcctcgcctaccggaacctcgtcggcgccgtcgccgtcgcgcctctcgccttcatctttgagaggttaattattcgtcgcttattcgtcatctgcaatggcgacttggccagcttgtattattccttgctttctgcattgaacatatatggtagttcttgttggattggaatcatctgcttccaaagctaccatacctatttgtcactgactggtggacatatatggttcatcggactcatatgtcagtaacatctgataaagatacatatctttgaaggtaggggagcctaatccgttcttgtttggttcacaacgctgttgtttctctgcgcatgtacacaagtataatttgaggtttagagcatacatccttgtatgacgttggaagtacatagaaaatattactccaaatgttgtccccaacgtcatgcactagccacggggtatatttttgtctgcatgcgtgcaccattactccggcccagcccggccatctcacaaagtcttcacttgtctttctttatttgtctcaaaaactacatcttgaagatcaccaattgctttgaagttcgagaaagtgcatacaaatatattagatttttcagtcagagacaaattgactagagtttttaaaactagctagaaggcatagtcttaaggagtagtagcattgtattggtaggtgtgaggtagatcaaagtaaatgttattttaggacgaagttaattagtactcctctcagtccacgagtatatatgtagtattattttatcatacattaatcatcaattaacactggtactaccaactaacatgaataatctcgtactagtacataggccctgtttgaatcgggagggctattaaatagtccttcagaatcttgctatttaagagtattaaacgtagattactaacaaaatccattctataatccttaggctattttgcgagacgaatctaacgaggtatattaatccatgatttgctatagtgatgctacagtaatcagccgctaattatagattaatatacatcattagattcgtctcgcaaaatagcttaggggttatggaatcggttttgtcggtaatctaagtttaataatcctaaatagcaatattccggaggactatttaatagtccggaggatccaaacaagaccatagaatctcgtaccaactttaagtaggggttgactgacctttactttattggtagtggaaatataaatggacctcagcggaagcacccttgcttgtcttcttttaagatctttattgccttcctgatttttgatctttttgtatgttccaggaaaaataggaaaatcccgagcattgtggagtggtgctggatttcgcttaatgctacatttgggttggtattttttttccagattaatcaaagggactctcacttatatgtttgccagtcaaatattactctctctccgtttctaaatatttgacgccgttgacttttttaaatatgtttgaccgttcgttttattaaaaaaataactaattattaattcttttcatatcatttgatttattattaaatatacttatatggatacatatagttttacatatttcacaaaaatttttgaataagacgaacggtcaaacatgtgctaaaaagttaacggtgttaaatatttagaaacggatggagtaatatactagcatacattgtgtaacttggaagtagctataatataaaggaaaatgtatgtagctttccaaaacgcatcgggggttgttggatgtaacccctcacccatgcacgcgctttgattttttttcctttcccgcttgtatgtatgtaattacactataataaaatatactccctccgtcccataatataagggattttgacattttgcttccactgtttgaccactcatcttatttaaaaaatttgtgtaaatataaaaaacgaaaagttatgcttaaagtactttggataataaagtaagtaaaaaaattaaatataaattccaaatttttttgaataagacgaatggttaaatagtgcaagtaaaatgtcaaaatcttttatatcagaggacggatggagtatttacattgacagatgcttataggaaaatttttaattaaatactctttttactttgtaaagaaaatccacaatttttagtcacaatatgctttacaagctcaatgaatccattatctaaaaaaatatgtttcactaaaaaaaaaggaaaaaacacaatgcatcctaatatactcatatcgcttcaatgtgtacataaaaactttgaccatgttgactgctagaattttttttttgcaagaatataatatctatctagtccaactgtgatttcacaaaagtacaagaatcctaatgtagggtaatcctatcaatggggctgtactactatggactgcgaagcacctccgccacatattcagtcatatttctgaacctgattcctattgtcacgtccatcattgcaatcatattcgggtattcgcacttctcattaataagtttttacacttagttacaaaacattacaactaacaacctctctctatgtttacaaatttcatcagggcagagaagttggtgtttacagactggcctggcaagataaagctcttcggtatcataacatgtgtgggaggaacaatggtagtgagcttgtacaaagggaaactgctgcatcacccttggccttcccacctgttgaaattccacacgcagaaagcatcaggctatgcctatcatcacaatttgttagccggtacattgttcttgtgtggcagctgccttagctacgccttttggttcatcatacaggtaccaaatcaagtctttcaagttgaaacctgccaatttcaggtttatgcttgtagttacttctcagggagttgtagtgcaatgtatggttcatgcgaatcgactttctgaagcgttgctactttcagattgtaatttttttctgcaaatgcaactacaggttaggcttgcgagcgtcttcccgtacaggtattgggcaactacgctgacatgtctttctggaagcctgcaagcctttgtgattggcattctgatcagccctacaaaatctgcctggaccctcaaatgggacatgcagcttctgacagtggtttattcagtaagaacattaccatccaaacaataactatgatgttttgtgtagtctaggtactacttcatcctacctgtttggtttgaaatatgaaattatatgttgatgtgctgattctaccagggggtgttcaacactggtatctcatttgtcctgatgtcattggcggtcaagcatcgtggaccgatctacccatccatgttcaactcgttatcgctgatcgtgatggtgatcatggactcagtgttacttggtacaagtatcttcttaggaaggtgagttcctgttcttgagcagggatataaatttcactttctttggaactacatacttagttctgtagcaaatacgacaaaatgggaatgttctctgaatatattatgggactgtttactgtcatgatctgcagcattctggggacagcattcatcattgtggggctgaatgcgtttctatgggggaaaggcaaggagctgaagcaagctgtggcgcagcacaccagccacaagcagaacacagaccacaacgagcaggttggagatgagatagcatagcatatcagcactatgattgaatgaaagatgatgcttggcaaatttgcgatgatgacgataaaaatgtctagatagataagggattagcatggtagtttgtaactagtttccggtgcaaacaaaaatatggtacaaatgaagttatgaaaagtttgccaccaactcctcgtccttcttttaattgacacattacaactggataacaattttcgtttatatatctatggctgattacccaaaacaggctgtctctaagggcgtacggccggagcgcccacacaggacccccaattttcacgggtcccctaagccccaaactttaacactagatatacagcccaacaagaaaattgtagcccaactaattctaaaaattgtcattttttccacattgttttggcttcgatcgcgcgttcgcgctacttcggcctccgggctgcggcctcaccaatcgccaatcataacaaacgagaggagtaaatgaattgtatgtgtagttgatttttctccaaagttttattcccaaagagaagtgggccctgttcaaaatcttgaagtttctgaagcgacatgattgttttcccaatgcaactattgcatatagagttttgttgatcattcccctaacttttgcatcggtggaatggagtttttctaaattgaagctattgaagtcaatacttgtgatctacaatgccaccagaaagacttattggattagctataattgcacttgtgggtggtatgttggggaagaatcaatatgaagctatcatcgaagattttatatcaaaatatactaaaaaaatgtcgcttttctaaggaatattatgcacaggtatatcgttttagaacatttcacattgctatgaaatattacggagtataattttttatcatattgtaccatgagttaagtttttattctttgttacgactttgcacagggcccccaaattttaagtggcggccctgcaaaacactgtaggggtagcaccaaaacaaggtaggggaggcagccacaatgttaaagctttactaatataagattaaaacaattacaaaagataaacttaagaacaaaagactgctctctcagaaggatttaacatatgcaaaagtaaaagatcaccctttaagagtgatctccaagactatatagagtgaacaatattctaaacatttgagccattacgctgtttccatatacgccaagctccatatatgatgtctacaaaacatgaagaactttatgagttgtgatactgctgcaacatgtttccaaaagacaaggaggtaacccatgttatctacaacagattccaacatgccagagccgccaaactaaattggcattggaaaaattgatgcaaaaaagtctctcttcctcatccagaacatagaacatcgagcgcgctcatgttatctcaccatcttcaggcatacattgttttctatccaacatgtccctttttgtctgtcaattaggagcaaacacccaaagaccctaactttcatgatgcacgtgtgctattccgtatccaatttaggtgacagggaggttgaatatacttgtaaaattgatagcatatattttctgtgaaaataatgaagcattaccccatatataagaccatttatcagtttatgatgagttatacagagttatatagagtttgtactgtgattcaacttttttttttcacaaattctcactggtggagaaatcatctttggtcggtcgacccaaatccacaatagtcccgactccattaaaaaccgggactaaaaacgatttttaatcccggtttataagcgtaacaggactagatgatctttattcgcggttgaggttaccatctttagtctcggttggtaacaccaaccgggactaaagatcaggactaaagataatctttagtcccggttgtttatatgtcagaccatgtcaggcggctaggatcttaacaccaaccgggactaaagatctaactttattcccggttggagttactaaccaggaataaaaatcaacacgtactatataatccctattacttatcctcttttctcgtccacacaacgaactctttctctatctctttttttcctctctaactccctatccttatcctttcttcttccttcttccttagttcttcttccttagcccgcttggatcggagcgagagaggccagccgcttggagcgagagcgggcggggatcctctagaa

SEQ ID NO: 16783 - DNA, 1474 bp, Oryza sativa
ctgcctgtgagtggagccgtctgcgccgtttattttattttccgctgcttaaatttttaattgattgagaggaactatctacctctgtaatgacattttattcgcttattaattagagtaatatttgtactctattatcaatttgttattgtgtgcctcggctgattcctggacgagggttcacacacatgtaagcgtttggaattttggatagaaattccgggcgtgacaagttggtatcagagcctccttgaccctaggttatgccaaatggttacccatagaagccttctaaaaatattggaaaagtagaactgttctcctccctttctcttttaattaaccaaactaatggcacatgcacttcataatcttttttaatggttctcattaaaaatttattccagtgttattagtactgtacatccattactgtactaatggctcattttaccagcaaaagttttacaatgttgttttatttaatcttgctgcaataaaataaatttagcatgttgattttataactttcttttatttcttttggaacctgttattcaaaagcacaaaacttgtgaccttatttccaactgtttcaacttatcttgcaagcttggtttactttatttacttacctttttactttgatttctaaactttattcaaattaatccaaaaacttgtgctattaattggataaatgtcttaactccctcctttcacttgtctttagatgccgcgctacaagcctgagtacttgtttggtgttgagggttttgtccaagagttgcgtacgatatcctttgtcattggatttgggactgcccctttttatgcccagattcctcatgatcgtcatgaagagaagtgccgagtcaaagtcaccttgaacagtaatagtgaagatatcccctcagtgatgttcgaagctggaggaagaaactacatccatgcatgtcaggaggtggcaaggatcgccataggagagctccgcgatcgttatagtgatcagttggccgacactgagtatcgctaccatcctcgtcaaccccagggaagtgaccgtggcagttaccttgagactgaaggaattgagaatgatgctaccacaaggcatttggtcgagatgctgtgggctatggatgaaagtcgtgcggagactgtgttagcggctcaagatcgtgaagaccggaatcgtggtaagatttgcaagttagaagacaaggtggatcgtttggagaaggaattagccgcgttgaagggagaagcaccaccgcagaaggccaggattcgtcttaccgcaaggaagagagctctatttgtccctcgctatcaattggcgccaaaggttcgtgtggtggagaaagaagttgccccaaccctagcagatcctccggtcatcatcataagtgatgatgaagaagaagaatccaagcgcaccattccaagttgagtgggtagcaactcaagatga

SEQ ID NO: 16784 - DNA, 1011 bp, Oryza sativa
cagctgtgtggtggccattgatcgacgtgaagatacagggtgccgccgataaggataggtgggtgctgatagtgatagcccatctaccacgtggctgcatgctgatcttattggtgtatgcacagtgcatgggtaccacagttgcaatcagtgttccttcctctcgaaaagaaaaacggttttgctattttgagccacctacacctacgtaatacttactccccctattttttttatatgactttgggacaagctagaaagacagccttgcattcgcgcgaacatgtgttatgtgttacagactttgtactgagagatcccctcataatttccccaaagcgtaaccatgtgtgaataaattttgagctagtagggttgcagccacgagtaagtcttcccttgttattgtgtagccagaatgccgcaaaacttccatgcctaagcgaactgttgagagtacgtttcgatttctgactgtgttagcctggaagtgcttgtcccaaccttgtttctgagcatgaacgcccgcaagccaacatgttagttgaagcatcagggcgattagcagcatgatatcaaaacgctctgagctgctcgttcggctatggcgtaggcctagtccgtaggcaggacttttcaagtctcggaaggtttcttcaatctgcattcgcttcgaatagatattaacaagttgtttgggtgttcgaatttcaacaggtaagttagttgctagaacccatggctcctttgccgacgctgagtagattttaggtgacgggtggtgacaatgagtccgtgtcgagcgctgattttttcggcctttagagcgagatttatacaatagaatttggcatgagattggattgcttttagtcagcctcttatagcctaaagtctttgagtgactagatgacatatcatgtaagttgctgataggtttccagttttccgctcctaggtctgcatattgtacttttcctcttactcgacttaaccagtaccaacccagct

SEQ ID NO: 16785 - DNA, 1157 bp, Oryza sativa
agatcatcctgaaaaaaacaaacagtgaactcatgactcacacagctcatatactattgttcaaacacaatagatcacaatgcgagttcagaattaatattcgggacactggacgagttcagaattaaattgatgtcctacggatggtcaatgatcagatcagtgctttcagccttcagctcaggaaagacataccataaaaaccctgaacgtgggatagcgggtagccgcgtcctacggacgccggcggcggcggcaatgccctccctgacaatttgacagcgccctacagcggggaacaccgatctcaacgccatcgtcggcaggagaaaactccgcagcggcccgattccagcaagggcacacgtcgacgaaggccgcggcagcagcaggccttgccaccgctgccgaacgggtccggcccgaggagaaattgcgtgtggccggcctacctcctactgggccagttgtggaggaattttcgtcccgtctagacgggccatttgttttgaaggctagtaatgggccaaattggacaggaggtcctgaaatcaggaattcagaagagctctccactctttccctcgtcatgaaaaggaataagttcactttgggtccctctatttgtcgaccagtccgattttcatcccttgactgcaaaaccgggtatgacccgtccccaacttacgaaaaccgggcacataaggtcctaaggcggtttagatagtggttttggctgacgtggcgcctacatggcagatttgactaggtctccatcccacgtgacattgacgtggcgcttacgtggcaattatatctcagaaaaataataaaaagcgtggcctcacatgtcagctgcacaaaaaaataatttaaaaatggtgggacccatgtgggtccacatgtcagctacacagcaaaataaatatggtgggtcacacgtgggccccacatgtcatcccatctatgctctcggctcactcccatcttccctatcggaaccacaacgcgcaccaacaagaggacgcccccagcaccgtcgccgccgatgcgcatgggaactccccaccggcttcatccctattcctcgcgggcttggcagttgatgccgcgggagcggcggcggagccttcctcctcgtgatcacgtccgtgagc

SEQ ID NO: 16786 - DNA, 6369 bp, Oryza sativa
actagattgtaccatctggtcctagattgttatatgatagaatgaagagaatatattcttgtgacggatcctgagctactcttaatttcttaactaaacgattatacacataatttgttgtactatgaaatgtatcatccaattttatattgctatattatgggacaaagggagtatattcttgactaaactaatacaagtactatttgctagaacaatgctatacgtacgacgtgtttgtccgaccaacgtacgatcaaacggtaaaacaactccatacatggctgagtaaggtgacaacatggcttagtccaacagagattaacgtcatgaactcaggacattaagttcgttccaaagtcgaacaagtttagtcgtatatatagcattttcctacatactattgttccacccttatctagagccttgaagaacatattcaatccaatggtgagttagttgccacagttatcatccaatggtttgttttaatctaatgacgtggcatgcctaatctctttttagcaaaatatccaacggtgagtagactagaaaatcggcgtgccaaggcatgcctgttattgtataacttgcagcttatgttgtttagtaatgcttattccgtttaatgacttctataattttgtgtttgcataaggttggtgaaaaaaaaagttggtaaagctttatgttttgatgcggattgtttaatatcagaatgaaggtgcttgatattaccagtcaaaaaggcaattaccatactatattccctcagtaaccatctcgacgtgttacctatttatgctactccttatttaatatatgggcgtgtgttcatgaaaaaaaaggtgtgcgtttgtttacttgcactagtgcagaattgatcttttaccgtgatacccaaaacacaaatatcttggttagatttagaactggtactgaagatatttttaattccggttctaaaattccaagtctcaaaaacatctttagtttcggttagtgttactaaccagtactaaaaatatatctttagcatcggttggtgacaccaaccgtgtaagcgtcaggaggtgagcccatggcctgacgcgtacacgtgtcaagaaaattacggggcataggtggaccaatcaaactctagcacaacggctagcttgagaaggttagattccgctccatgatagacaaatgagctagttgagtggtggcctattttaattaggaaaaagtccaaataaccccctaaactttgggtggaagtccgtctagcaccctgaactttgaaactggacattcaaccccctaaactttacaataccgtttatataaccctctaagttgattttgcatagtggtttttactaatttgtatataagttggatgagtttgatcacatgtcatacactttggacatatatatatattaaagttttgacttaaatatttctttttgctccttattagctctcactcacaaataagtaccaacgtaataatagcatgttatcattgtataagaatagattgatgatttataactgatcatatgcaaatatattatattagttattcaaaattattcgtttaaacttccaaaatatgcaaaaccatcttttaaaaccaccttagggggtaacatggatggtatggtaaagttcatggggttggatgtccggttttaaagttcaggacgctagacggacttccatctaaagtttagggatgtatttggactttttccttttaattacttggatcctgcgactctcctgcaaacttacaaagagatatataagggggaaatttcataggacataaaagaacactaaaattcaacatcaaaggaattgaaaaaaaaataaatttattgacagaactaaaagatgacaaaatttaatgacaaaccataggagaaagatatacccaaaaccacaagtgttactcccctactaacatcaactgagctcacggagctgagcacaacatcgccctaacatgagtacgcgacaattgagctcagttgcccgcaaatggcccttgctttacgctaggcgtgcccatgggtgtacctatgggccatagcacggcggcacgaaccgctgacgaacaagctagggttgagcggtccgccgtatcctaggtgtttgtctgtttgagcctttgacatgtaaactatacgaactataacgcagttgtaataacactagtgagttctgtataatggttgattatctttaagtcagttcgaggcgtatatttttttatgagaatagctttattatcatctaaaaaatagcaaaatcatgtttttttacacgttttagttatttgagaggatatggcccaaatcgcaccagccaaagtgcaacccacactgggcgtatgacccagtggagcacccacctaggagtgggtgtttggtttccttgggtgtttcggtttggtttcttcagtgttctactagatcgatttgcaacaaatccaaaccgaagtgttcaccaaaagaaaaaaaaaccgcgccaagacagccgaacttctttggttctgttggtcggttttccgatcaagccgaggaaactcatctggcatgttgcgactctgtagcctgcgagcaacgtgccagtagttaaatgggctggataggttacaggcgataggaattggtgagaggtgatggaattaatgggcttttccactagcgaaagggcatggactgggatcgtacataattgattagttatgcgggttcctcggtttccagagatgagaaaccaaggggaaagccaaagaccgaacatagggagaaataaaaccaaataaaaaacggaataccaaaaaaagacacttcggcttggtttggtgtggtcggttcggcttttgattttcgatgattttatgcccacccctacgtgcaccggacatgcgcatgtacacgtcaggaggtgaggccacagctagagagcgacacgcactggtggagaaaccctttgtagtcccggttcgtaacccccctttagtcccggtttctaaaccgggagtaccaatccgggactaaagatcgctatctttagtcctgggtgaaataaccgggactaaagatagagctgacctttttttttttttgcatgcccctgttgctgcatggtttatatatatatatatatatatatataaaccatgcatatatatgtttcaatacatatatatgcatacatatatatatatatgtatttatacatatatatgttatgcaaatgcatatgtatatagatatatatatgaacaaaatatatttacattatagaaaatgtgtacacatgcatatagaaacatatgtagtcatgtattaattacaatccattatatgtcctagctagctacgatttcgacgtagtagtactcgctgctagctcagaagctaaggaccggtgaattgtgtttccgtcgtagtagaattcacccttgggatcaaggatttcttcgttgatgaatcccatgagttgttcttgaaccgccgcgataaattccttgtgtgtggtcaggttatccctcatgcgaataaactatatgaatgtatgaaattgattagtaattaaacaagaaatcgctacgtaatgaaattttgaatttatttgtacgtacatcgagctctcttgtggtgatgatttggtctgcaaggcagtggcaatactcgcacacgtaatagccgcacaagttagttccctgcttttgctttgcgcactacaaataaatgacaaacaacgagagatctaattaatatacacttgtatgtatttgaatcggagaaatataaatgtagagcatgtgtactcacaggaaatttgaacttccgcctaagtctttctctccatttgccgcggaccaaatgacggaaccgataccaagccctacatggagtttaaagctatgattcgtagtagcaattaacataacaagattttcttaattaacaaaagaacttatgacggtacctgtctataagttcgaaaaccttgtcaaacgtagactcttttttatccattgagtcatatacgttgacggtgcaggcctccaggtcgatgagtaaaagcacccagtggaatctgcaatgtgcgtgggatgcattacatatgaaacacttagcaagttcgtacgggaatgaaatttggtatgtaggaagacagtaaaattaaactaactctgtgttgtatggcaacagtatgaacgtcttgtaatgctgcgccttcaggagatggacgagattgtcctctgtttcttgtggatattggtcgagcattgtgacgtttactttccgagggtcgatgaatccagtatcgaaaaccctccgccgtcgggccctttgaatctcaattctacaacgataaaagggagtatattattttctatggtctacttatatacgaggacctaattaattaaaggagacgtatagtaagaaatctaactgaacgatatacttacaaaatccagcaactcataatagagacgtcgagggcgtccagctggtatagttcgttgattcccctgaaattgatccagagaatgtcatctccttgcaagaagtccgtgtccctgatcctcgctccgatcatctctctaccagtggcgctcatctccatgtacagctgatggaacttgtacatttgtgtgggtagggactgtagcagctcaggcttgacaagcggtttaccgagttcgtacatgtatttcacttccgccttttcgattggtgcgactcctagcaattgatccgtagttagaccggtgtcagtaataaattgttctatcgtcatttctttaccggtcaccaacggctcgatctcctggtttggttgctctccaagctgagggactggtttggactttccagaagatgctttcttcagcgttcgctcatagtccgatagcttgatggcctccttgacagatgcagacatacccctgaagaagttcctgacactggggtctataggaatcttcttttctggacttcgaggcttgaattgtctcttgacttctgatgcaacgtaagcgtcaagctcctcttgcgtgcaatcgtaccccgggtccttgttcttggcggcgtcaactttcgccttctttgttgcccttgtgtgggcaagcggtggagctgggggggcccttgactttgaaggtgccggaagaggagcttgcgggggagtaggtgtaggagcacgaggagtcggtgcaggatcctgaggagtcgatgctggagcctgaggtggagacggtgctggcggagcatgaggaggagacggtgcaggatcctgaggaggagatggcggagccggaggagatggtgcacgagacgccgcttgtcgcccagggaggatgatgtaccgcctacgccatagaataatggcatggcatgtgtctcgtagatgcgtctcaccgtctcctccagggtaatccagctcgaggtcctcgtacgcgccttcgaccaactcaacttcgaccttggagtatcctgctggaatcggcctgcagtggtaagtacctgaagggtccgttgggatggccatgcccgacgccaccttcatgttgtgagagattatttattagtaatcaacatatataagcagcaactagcggaatggctaaatcttacctttattgataagttcttgaaaggaatatgcagctcacatggtgtccgctgagtgatgtcatcaacgggacaggtcgattcgtcctgtgtttgcatggcgtccatgctctgtgatcctacctgccccgttgaggcgcagctgctacggtttcctgacgggctcaccattgcaggaggaatggtcggctggggatcatgggaccgatgtgcggccatgcgttcatcaaccttccttgccacctcctcttgcatgttgagttcgtagctcgatacccggaactctaggtctgcaatcttcgcctcggtatctctcttgctcctcatccgactcctgtacgtgtggatgtcctccttgaaaccaatcttccaaggaatcacccctttccctcgagttcgtcctggatgctctggagtctgcagggcgagtgtcagctcgtccctatctctgtctggtcggaacgtgccctgagaggaggcctccactgcatctgttagtcgtcgcgcagcctcttgtatctgatagccgaagaccagtgagccatcagctgggttgagcgttccaccatgagcatagtaccagaacttcgatcgttccggccaattggctgttgccggttcgatacccctctcaatcaagctagcctccatctgctcccacttcggcatcgcgacgctatagcctcctgaccccaagtggtgatggtacttcttcttg

SEQ ID NO: 16787 - DNA, 1152 bp, Oryza sativa
tccaccttttcactttgtcctctgtacccccacaaagggtgaatgtctcgagcattgtagtccacagcatttctttctccgaatcttggacaaagctctcatgatctccgcgtgcccttgttcttcgccagtacaccgtactgacaggcacgttatcccgcacaacccaaccgctgtgacgtacatagttcttggcggcttcggccggggcactaagacgtccatcttcttccacttccgttatgatgtgccgaccctcaagcttcttcgctgcacctcgttgcccgcgtgccctcttctatccaacggagggttgactaccactagcctcctcctcctggttcccctccacatccctttccacgtgcccctgctggttcccctccgcatccctctccacgttcccttcctcgttcaagtactggtttggatcctcgttcccctcttcttcattccagtactggctgcttccctccgcgattgtatcgtacaatatctgttcctcatcgcggtcagccatctgttgatacaagaaacatctgctaagtcacgagacatttatgttttaacaatctaagtcatgtatgctaagtgtaaatgtcgtacattagaaccctacacaaccttacgtgctaagtctaattacaaatcgtgatataagctaagtctaggtgacgtatattatacaaccctagctagtaaataattatatactaagtctaattacaaataaaataatcttatattaaaactcaaataatattacatgctaatactaaaatagtcatgtatatgctaagtgtttcgtgcgtatatgctaagtctaattaagactacaatagtcaattgctacttgtcgcaccaattccgtagtcaataattacataccaagtctaattacaaataaagtaatattatattaaaactcaaataatattacatgctaagactaaaatagtaatgtatgctaagtgtttcgtgcgtatatgctaagtctaattaagactacaatagtcaattcctaggagtcgcaccaattccgtagtcaataatgtcatactaagtctaatttgcaataaaataatcttatattaaaactcaaataatattagaacactacacaatcttatatgataagtctaattacaggtc

SEQ ID NO: 16788 - DNA, 2435 bp, Oryza sativa
aattctttttaaacccggtaagggttaagaaccgggactaaagattatagcactgcatatgattttcgcttacatatgtgtttataaaatagaagttaatgcattaacattatttaaagtacaaagattgatgacaattacttcgaaaaattatttttgtctgtaataaattaagtggataaatcgtaataagcaaatatatgacttataattaataaaaattccaatatatttatatatattcttagcatatatatgaatgatattattatattggtaaaaactctaattaagatattaatgtacatactgcatgatttaaaattaataaaaattgtaatcatcatatgtacttagcgtaggaattatattaaattaaatgctaaaaactctaattaacatatgtaaatgccacatgcatgatttaaaccttttaaaaattcgaatagtcatatataagtagcatatgaaagatagtaaattaaattgtgaaaaactctaatatatgaatgatagttttaaaaatatattaaatttaatacttttaaaaattctccagtcaattataattagcatatgaatgatagtaaattaaatgttaaaaactctaattaacatatgaaattggcacttgcgtgatttaaaacttttaaaaatcctctagtcaattataattagcatatgaatgctagtaaattaaatgttaaaaactctaattaacatacatatgaaattgccacctgtgtgatttaaaacttttaaaaattgtaagtatcacatataactaacatatacatgatttaaatttgttgaaacctctaataatcgtgcgtaattaacatatgccatacatcaattgatttatatggataatcaatacatccaaaatagtttacatcgtgtacacaataattacggcattacatcggcggtgacggttgaccgcacgtactttctcctcactattgttccctccttgtgatcgctgcgtgagtaaggggtgtcttcatttgataggaggatgctagggtcaatcgtcactgtgaaagggggttgcccatccaactgatcgtaatcctcgtcagtcttgtcctcaactccgacgatttttcttttgcctgggagaaccacttgacgcttaggctcatcaggccctctgcccttctttcctttgctagacatgtccttcacgaaaaagacttgcgttacatcattggcaaggacaaaaggttcgtccgagtatccaaccttgttaaggtcaacagttgtcatcccactgtcatcaatcattacgcctccaccagtcaacctaacccattggcaccggaacagaggaaccttgagaggaccatagtcaagttcccatatgtcctcgatggcaccgtaatacgtggcagttgttccatcgtgtcccatggcatcgacacgaacagcgctgttttggttcgtgctcttcatgtcttgggctctcgtgtagaatgtgtacccattgatctcatatccctggaatgtcgcgatagacccagacagtcccctcgccaggaaggcaagttgttggttgatcgactcgtaacccatgagatgttgtcgtagccacgcgggaaaagtatcaatgtgatgccgtgtaatccatgcatcggacttaccgatgttcttggcgcgaactagagccaagtgctccccgatgtaaggagctaccaatgaagagtgttgcagaacagtgaaatgggctttacggaataaattgttgtctaccgtcattattgctttccttccgagagttccctttccccgtagtctcccttcatggcgtgattcaggtaccccgattgggcgaaggtcttcgataaattctacgcaaaattcgatgacctcctctgttccataacccttggcgatgcttgcctctggacgagcacggttacgaacatacttcttcagaacgcccatgtacctctcgaaaggaaacatgttgtgtaggtacataggcccgagaatacggatctctttcacaaggtgacaaagcagatgcgtcattatattgaaaaatgaaggtggaaatatcaactcaaaactgacgagacattgcaccacttcattctgaagggcttctaatctatccggatcgatgaccttctgcgaaattgcgttcatgaatgcacatagctttgttattgttgcccggacattgtctggaaggataccccttattacaactggtagcagttgtgtcatcaacacgtgacagtcatgagactttaggtttatgaacttcttctccttcgtgcttattattcgcttgatattcgtggagtatccagacggtacctttatgctctccaagcattcaaacatactttccttctttgccttgctaagagtgtagctggctggactcaagtaatggcttcctttctcctttggttccgggtgaa

SEQ ID NO: 16789 - DNA, 985 bp, Oryza sativa
tgagcaaagtccggaatattgtcgtcttccacttcatcttcttccatttcaacaccttgctctccgggggatgtccaacaattatagcttggcatgaaccccgactcaaacaagtggaaatgaatagtcctggatgcagaatactccttctgattcttacacttattgcatggacaacaaataaaacccctttgcctgttagcttcggccactctcaaaaaatagtgcacgccgtcaataaactctttggaccgccgatcagcgtacatccattgccgatccatctacatgagtcaaaaaaaccgcacacaaataattattcttacaataatgacagtcatacaataattataagatatctttattcatacaaaaatcataaaatattacaccaaataattcttaaaaactatttgtaaagttttaaactaattttaatgtgttttacttcttttaatttttattttagtttgttttctattatttaatattaactttcactagagttttccttctcaactattttataaaaccttgtttagcaaatgaactaaatttctatatattctttcttccccacacacattttctctctcatcaacttacaactaaattttggagacaaaaaaagtgtgcaaaacataggtgcaaatgtagtatgacaaaaaaaaaacattggaggatgaagttgcaaaccttttaggcacctccgatttgtatgtaatcaccaaaataaattcaatagaaattttggcatgacctcccctcttttttgaagaaattttgaagcttgctcgggcagctggaggaggaagaagacatatatatataggggtgggactttagtcccggttggtagcaccaaccggggctaaagatcaccgggatcattagtcccggttggtattaccaaccgggactaaagttaagatctttagtctcggttggtagcaccaaccggggctaaagatcaccgggatcttta

SEQ ID NO: 16790 - DNA, 4667 bp, Oryza sativa
cgtgttcgtgttcgtgttcgtgtcgtgtgtgcgcgccttgtcgcgagcgttcgtgggaaaaccggaagaggagcgctcgtgggcagaggcgaaactttgccgcgcgccacgtttgcttcgactgcggatgcccgctgtacggctgcagccgccgggcccttacgccgctagtggcctgtgtcagggtcattgtcattctcgtcatcaagccttcacatttatttctacacttttactcatcgctgtacttccagtaatgttgaacccagtagttgtctttttaagagtttaagtctgcattggtttagggcctaccgaacaacattggtttagtggggttaatttcggtaaacgaaagctttgtaaccgcctaaccggccaaaggattcatgtagtagtaagattttatcgaaacgaaccctgcatcttcacgaaccttaatgacacctgatggccacccctacggtctctcggcccatgcacaagacacgaatcgtgtaaggtgaccgatcgacccctcttatttatagcaattgtcatctcgctcctgttcgtcagcgtgtgtagccactagaaacgaatatatgatagacagtggccttcaacagttcaaacgtccaggctgctcacagcacccatcagaaatgtgctgctagatctgccagcaggttttgtttggttccgggcaacaccctgggccaccatctacagttacgtggtctactactactaccttcattttgtacctacagtgacctttctctctaagctaggcctggattgtcgtgcctccctacacccatgatgcatacgactgtatacacctaaagcaacagtactaggctccatgcacgttagaaaacggatcactgctgaaacatgtgcgtaaaatattctagtatatatatatatatatataaaaagctactccctccgtttataatataaatatttttaggtttaatgagagagaataattgtttttttccatgtcacttcatcgatcaaattttgaattatttggattttccttcatatacacttgattggctggaaatgtttgaattctcgtgcattaaaatcagtgttctagaaattaatatttatactatgtaacaatttgaatcataaaagttattaatattttaaaacagagagaaattgaggttctaatgttgaactagaaggaataagtgtgcatgctgccctgagagagagagaaaaaaaaagaataagtgtgctagtactataccgcaatacgtactaggattttctaattacttttaaactttttaatttttttaaatatcaactttttgacatgacattttgccatgccacgagacaagtggcacattggcatagcagtattgtcatgttatggcaaggattttaaccatgccagttactatgacacccacactcatagcgtggtagtgttataatgtcacgttatgtgtggtggatggaaggtatggctttaaagttgagattaactaagtttttagagtctttattttaaaattttttaaaaagcttaaaataataaattaaaattctatgtactaccaccactttttagctaaccagtaatcgtgcacgtgcaatgcatgttatgcaatatatatgatagaaaatgtataatacatcaaaaatctgaaaacatatgtagggtaaatttgtaacatatacatattgaagctgttagtctatttgagacaataaaaaaaatgtagacatcatccattacatggcacgctacaggtgtacagcatcaacctagcttgctcaatgaggtgccatgtcactttctcgggtctcttctgacctcctgcccttcgtcctcctcacataatcacatagatctatcagcttgtcaccaactgatataccaaattattattatagtcatatgatagctttagctttttcagagtttctatccttgacaagcaaccaaagataattgttaagttaaatatgtgtacagtggagtatgtgtaattcatataaattttgctttaaaaaaagaacgatgtagtttaaacctttccatcgatgaaactcaaaatgcgaagacccagaaatcaaccctttgaggatgccatagagcagtttgttagcatttcacttgcattgcatcaattaggtgttggttgtttagatatcacttgctttgtattgaatctgcaagcagaacacatgcttgagcttgttgcttggaggacatacatgtcgtcggtttcacagagcaaggaaaaaaaatctgttaccatgtgagtgtctagttacctgaaccataaaatggacagtccatatatagcttcatgagcgatgtcccagaaggtggcaatgtcacaacatcatctctgtacaatagatataatcatcacatatcagtgattgcagctgttgccccccaaatccataattaattttgaacataaacggggcctgatagagtgataggtaggctaagtgggcaaagaaaaagagaaattagccatcatatcaacttatgataaattggcagcaagcaacagaaagtcacgcagaatgtccaatttaatttatttgaaaaggcaaagtattccttctgtttggctcccattaattgtatttgagtcattttgtgcatgtggaacccatgtccatgtgactggacataatattgagattaactttcaagcttcagctaaatttacaaatcactggaatatttgttaagtgaaaaatccactcatcatggatatgatcacacgctgctttatacatacaacacctagtttcttgtaaaaactgtggtggagttcattgagcatttataatatatgaaaaatgaatagaaaagcaaaacacttacaaaatatcttgttcctgcaatttctgaactttcttgctgaatccatgatttttttcatcaacaataaacctacagacacaaacatatcaagagaaaatgataaatctaagaatataagtagctcacttaatggtagctttctttcttttaaataaaattttcttgcagtggtgtaacaaaagattgttagcatgtaatcctgatatcaattttgacagaaagagataaccaaacctacaaagtaatcggtgctctgtcatatgcatttttctttcaaaaatagattactattgtcctgaagaagaacaaaagtacagcacacattcttttaatcagttcattgtctagtttttgattcatgcacgataatatcagatattcatgctaatcctcccaaaacacaaacaaaattgtatttatgccatacaacttccttatcaagtcattgattgttatttgcagatttaaaataaattaacaaatgaatgtgtgattcttgtcctacgaattattggattggaagcatgcatgaagaaaccatagttcaattatataaccaagttaaacattgtaggcagctacaagatatttcagacagtaatgcttctcaatctgagagcttcgagtacaccttatgagagtatcaactataaagcatgatgtttacagaactaacctcgatgactggcctccacaccatgcggcatgctacattgattcaacatcaatataatcgtgttcaccctggtcctaccacttgttggcaccatctattgagagcttaatcacaggacttcaacttgacctatatatgcaccaataatgtagtcgaggaataaacctcatcgatgtacatgcatcaagatatggcatgggattagttaaccatcattcaataagcatgaagaaaattctcccctgtgcaacaatatagatcatcagatgacaattcagtaaatccaagtccttcattttttttaactaaaatctaggtcattcatttttcaataaaaataagatgcacttaatccctcaaaataaaaacaaagagtgcttatatcagtgtaaaagagtgtaaaagaaagtacagtggaatctgtcaataacatgatctggcagatatcaatgttagttttatgtaatttagaatgtagaagaaaatacaatgacttcaactacactaaatattcaaggtaaaagttagtaattagtgcatgaagaaagctaaaagacgaatcactgtatgcgtgtttaccaccatgatgatttaagcaccataacgattccctataaaccaaattcaaattctaattagcgattgaattgaaaaaaataggatgatttatttacaggagattaatgtttaacactggtggagaagtgctttttagtcccggttcgtaacccccttatagtcccagttttcaacccgggactaccaatccgggactaaagatcgctatctttagtcccgggtaaaaaaccgggactaaaaatcgatctttagtcccggttggtaacaccaaccgggagtaaagatagggatctttactcccggttggtgttaccaaccgggattaaagagagggtagcggcagtctagctggtccttttttttctttttttcttttctgctttttttttattttctcccgaatcgagtggtatgcatatcgtcaaattgaaccccaaatccacatcacaactccacatcacaattcacagattcatcacaaattcattcacatattcgttcacaacatcacaaatatattcacaatattgattcacaggttcattgaca

SEQ ID NO: 16791 - DNA, 5792 bp, Oryza sativa
tggtaacaccaaccgggactaaggatccgggggggcctgacaaggcctgataggtttagaaccgggactaaagattatttttagtcccggttgataacggcaaccgggactaaagatcaaatatgcccgctgtagccatcaaccgggactaaagatgatctttagtcccggtttttagtggaaccgagactattgtggatttcggccgaccgaccaaagatggtttctccaccagtgtaaaaaaacaagattatccctataaaccaaatctaaattctaattagcaatttaattaaaaagaaataggaatgatttatttattggagattaatgtttaaaaaagaagattataagatctgcaatatttgatagccatcctaagctcttaccatcccatcccgagccactgattcaaatgggattgatagggtgaacttgcatgaaaaatataatgctcctcccgagccgctgattcaaatggtattgataaggtgaacttacatgaaaaatataatattcatctgttcccactattttctaattatctactgctttttaattatttaataaaaaagataaccattaggagtaacatttacaatgagtataaaaaagatctgaaattccactcaatgtatttggtcagtacttacacattagaggactattcaaaatagaaaaaaaatactatttatgattagatattccaaacaagattgaatacaaaatacagaaatttatcacatgggaatttaatggagcagaggaggaaattgtggtggaggtgataagatgagagatgatgatttcacctgtaggattgctaggcacaactcttccttttttatattagtatagactaaccgtgagtaaactccgggatctaatctgtggccgaaatatcggtgctgactagatgatagagtacccagccgctaacgtatgtatgccagccactgatttatcctatgaggatgaacatgagtcgcatactcgcatcgcatgcatctcatgcacatatgtaaaataggttaatagcaaggagcttatagtcatccgttcacccagaaaccacgggagatgtatggaccacatctcgagatatcacaaacacgcatccatataacaacccagtcccataaaaaaccaaacaatgtaacacattctattactataggatatatctttatccaaattcgttatagtaatatgaatttggacatatctctgtacatattcgttgtattaatatatgtgacgtccaattttagattcgttttttaacaaagctaagggagtacagacgaacaattaaaacacacattaattgattattgacgtgttctcacaaacacaaatgttctaaaaaaaatgataattgacctattcactccgaacatcgagttggactcgcgagcatcaaggtgcagggaccagagcaacactgcaagtctgcaacaaccatctccctaaaaatatctactttgacttttaccggcaaacaattaggatcgatggtgtaatatccggctccgtacttccgtcggacggcgaatgaaccgaagaaaaaaactaccatgaacggaagaaaaactaccactagcatgcatatgcatatgcatgcagacggtacggtgtcccgcatgacaggcacgccgcgcgctccgctctcccatgcatgcggaccggaccgaccgagatcaggcgctagctgatgattttgtcaacgggacgggagagcctggaagcgcgcgcggccccgatctggcgaatcatgcatggtagtaagatcgatccgcgcgcggtgcgcatctctgaccttggtgtggacgacgtgtgcagcgtgcggtacagacctgagagtacagtggagaaggaccgggggcgacagggacgcgtgtacgtggacacgacggcgtcgtcgaatgcatcgcacggttgctcttcttactggacagaccgtcgtcggcacagtcgtgcagtctgcggaaactcagctgggctgtacacgctgggctggctgtactgtactcaatgctggccgagttagaacgattaaattgaggacgactctaaattgacacagtacaatataagactggaatctatagatcaggagatgagcacagattaattacggcaggcacggtagtatagtagtactgtagaacttaggagtacagtagtgagatgtgttgccggtggaataagtccactttgactcccttaaaagtcacccgaatctaatatgtaacccttaacttcaaaaccggatagaacaacttcccgaactattgaaaccagtgcaatttaactcactcagcagttttgctgatgtggcactgacgtgacgatgttgacctattcttcgtctcacatgacgcttatgtggcattcgaattaaaaatatatatgtgggacccatctgtcatttacacacaaaaaatataatatgggacccactaacatgtgagcccatacgtcatcctctctctctttctcttcccttcaccggtctgcaggggcggcagtgggcaaccgacggtagggtgtggcagtcgaggaagtagtcggtggcgggccagtgtgacaatggtcgttggtcagctgtggccgaggaggccttcgccctcttgacgtctctctgttgtcgccggttgccaggttctccatggtgctgcaccgtgaggtggagcacgtgcgtgaatggcacaatgccgaagaacttagcgaggaagcggccgtcgttgatgctgacgacgccgaagagcttggcgaggaggcagtagtcgttgatgccgacgccgtcgtcgcgcttgtggagcgcaagggagcagtgggtgtcgacgaactcggcggcgccggtcaccagcaccaatgtccccgagtcggccgacgacctgagaggcctccttggcacggtggacgcatggatctggccacactacaagaaacttgttaatccgtgatggattctccgtgacggatttacggatcgtcgctgacagacatactccgtgacgatattttgtttttcgtcacagatgagcccagtggatattcacagcccacgaactcgtgacggttttatcaggaccgtcacaatgtatgattttaaattcgtcatactctagttagcctagaaaaataaaaaacaatgtatgattttaaattcgtcatactctagttagcctagaaaaataaaaaaattgtagcgcaaagaaaaacaaaaaatatgattgcaagaagaatcaaaatatttgttaaatttgaacataatatttttgttgatttgttacgtgtatataatggtttgttaaatttgaacaaaataatgttattaatttgttacatgtgtatgatgcataatatggcaaactaaaaaaatattgtgcgcatgcggaaaaaatcaaaatatttttgttaatttgttacatgtatatgatgatttgttaaatttgaacaaaataattttgttaatttgttacatgtatatgatgcataatatggcaaactaaaaaaatatggtgcgcatgggggaaaaatccacagcatgtgggatttgaacccacattgagcaggaaggtaggaaatatgttaccaattgaaccacttgttgtagatgtccacttctgcacttatatatttttatttatttattattggcccagcatccctgttggcgtggcccattaatgccattcactcgagttgagttggtccaggatgttgcccacagcgtggcccagcagctggagttggcatttcgaaaatggggcccagcagccggagttggcatttcgaaaagaaaaaaagaactcgaatttgtaaaatagaagaaaaaaatgcaaccaacgagaatcaaacccatgacctactagtagaaggcgccccatcctaccactgcgctagttggtttgatgtgttattgtaggattctgtactctttttgacctgtgtatgtatggaggagtaaggtttcctcaaccccgactcagttattcagttcgacacccagccgcaaccaatctaagacaccgccgccgccgacggcgaaatttggcaggagcggcgttgccgctgcccaccactgccgcgtcgttcagcaacgccgcctccttgcctaccgtgccatcgcgcatcaccgctgcacaccagccgaacagcgacatcaggcaccaccgccgccctacaacgccatcctgtagatctgcagcaccgccgccctccattgccgcaccaacgagcgatgccgagtgcggccatgcgtccacctggtgacaaattcaactgttgaccggactcctgaagcctcttctcccatctgcctcaacagccagccaaggtaatatcttcttcttcttcttcttcttcttcttcttcttcttcgatttagttggatgtagcatttgaattggtgcagcttgctcattgtggtttatctacaatgtttgattagatggatagaagttgggtgcacagtagactattttcccctgaatacattgacggcgtcaaagaatttatgagtttcattcaggggaaattcaatgagaatgttgaaattctatgcccatgtagcagatgccttaatcagaagtaccaaagacaggctgttgtgaagaagcacatactgatgaatggtatggaaactacttatactcggtggattcatcatggagagagcttagatgtcaatgttattgagcatcctattgatatgaatgaaaataatgatggttccacaactatggtgacagaggatgacaactatggtaatcgtttggaaggaattttaggagacctacagactgcagcggcacaagcaagaccggatgtagaaaatcaagttggtgctgaagaacctcgtgataaagagtcatttttgaatattgtcatgagagaggcaaagcgtcaactttatcctggttgtaccaaattttcaaggttctcatttgtggtaaggcttcttcatatgaagtcattatataggatcagcaattctgctttttctgcacacatgaagctattggctgatgctttcccagaatgcaatacactcccaaaatcatatgatgaagcaaaagtcattctaaaggaaatgggtcttggttatgaatcaatacatgtgtgctacaataattgtgtgctgttcagaaaggaatatgagaagcatgacaattgctcggtttgtggtctctcgagatggaaagatgcagaaagaaagaagattccacaaaaagtgttgcggcattttccattggcacctaggctaaagaggatgttttcgaccaaagaagcatcagaagcggcacagtggcacaagttaaagcgacagcccgttgagaataatatgagccacccagctgatggcgaggcatggcaagattttgaccgtgaatatcctagttttgcaaaggatgcaagaaaccttagacttggcctagctactgatgggttcaatccttttcagaaaagaacacaaaatatagcatgtggcctgtgtttgttgtgccctacaacctagcactgtgggagtgcatggaggaatcaaactttatgatggctttgcttattccaggtccgaaatcacctgggaaggactttgatgtatttttacagcctcttgtagaggatttacttgagctttgggcaggtgttgatacttatgatgctattactggcaaatcatttaaacttcgtgcagcggttttgtggtgcatccatgattacccagctttgagcactctctcagggcgtacaacaaggggctattttgcttgtctccattg

SEQ ID NO: 16792 - DNA, 929 bp, Oryza sativa
ttgaaaaaaaacatatgtgagaacctaattgggacaattctcaatataaagggcaagacaaaagacacagctaaagctaggtttgatttgaaagatttgggtattaaaaaggtgctgcaatttagagaggatggagagatgcctcatgctagatataccttgtctactgaacagaagaaggctttttgtgcttttttacaagaggtcaagtttccagatggatttgcttccaacatctcaagatgtttaaatgctgagggaacaacggtacaggggctggaaacacatgattgtcacattcttttgcaaagaattttgcccgctgccatgagaggatttctggacattgatatttatgaagcaatagctgagttggggatgttttttaggaaattgtgcagcagaactcttaacaaggatgtgctggttcaaatgaagaaagaaatccctataattttggtgaagcttgagaaaattttccctccagctttctttgatgtgatggtacaccttgctatacatttacctgatgaggcattgctcaggggtcctatgcaatatgggtggatgtacccaattgaaaggcgactatatactttgaagcgatatgtgaggaataggtcacgaccagaaggttcaattgccgaggcttatattgctgatgagtgtctgacattttgctctaaatacatggacgatgttgaaacaagatttaatcgggagccaagaaataaaggtttctccaatgaagaagcttatggtgttgatgtttttgggcatggagttaattttacttctgcacctgaatatgtatatgatgaaaatggcattgatcaaatggtgtggtttgtgctaaacaactgtgcccaagttgagtattacgtcaagtatgttctatatacttacttttagacttcttctatatgcta

SEQ ID NO: 16793 - DNA, 993 bp, Oryza sativa
ggtcttaggtacacgtcgatgtcgttaccaggttgcttggggccttgaataataatcggcatcattatgtacttcctcttcatgcatagccagggggggggaggttgtagatacacatcgtaacgggccaagtgctatggccgctgctcatctctccaaaaggattcatgccatccgtactcaaaccaaaccgtatgtttcgtgcgtcctttccaaattctttaaattttctgtcgatgtttcgccactgcgaaccatcggcggggtgtctcagcatcccgtcctgttgacgctcttcagcgtgccatcgcaacattctagcattccccttgttcctgaacaaacgccttagccgtggtattataggaaaataccacatcaccttagcaggaattctcttctttgttagctgcccgtcaacttctcctggatcgtcccgtctaatcttgtatcgtagtgctttgcaaacagggcatgcttctaggttctcatactcctcaccgcgatataggatacaatcgttcagacatgcgtgaatcttatgaacttccagtcctaacgggcagactatcttcttagcctcgtacgttgtctcgggcaatttgtttccccccggaagaatgttcttgacgagtttcaataaatcgccaaatgccttgtcactaaccccattttttgccttccattgcaacaactccagagtggtatccaactttttgtgcccctgctcgcaacctgggtacaacgaagttctgtggtcctccaacatcttgtccaatttatgggcctccttttcactttcgcagtcttccctggcgtcctgcaacatctgaccaagatcatccgcaacgtcgttaccatcagcagctatttccttctcgcccgtttgatttccttcaaatccaacatactgagcaaagtccggaatattgtcgtcttccacttcatcttcttccatttcaacaccttgctctccgggggatgtccaacaat

SEQ ID NO: 16794 - DNA, 40542 bp, Oryza sativa
ctctagtccgaatgagatgaggcagtacaagaaagtgatgaacaaaattaaaactgaactagagttggactaagaagcgtgggtagcttcgtccccaacgctgcgggcgacgcgtcctctgtggctccggatagggagaggctggcgctgacgactccgctcgtccgtcgccgctccgcaaccgtactcgtccgccgacgccgccgcttcgcctggctgcccgctgccgctcccccgccgccactcgcccttctccttgcagcgtaggggagagagagaggtgggatagagagaagatggaggttgacatgtgggaccatatgggtcccacttttttttattattttgtgtgtagctgacatgtgggtcccatggttttttattattttttgcaaatccaattgtcacataagcaccacgtcaatgccacgtggaacgaggacctagtccaagaaagccacgtaggcgccatacaaaaccgggcacaataatgtcgagggacctattctgtatggttttgtaagttgagggatgcgttatatccggttttcgacaaattgagggaccgaaagtgaacttattctgtctcaaaatcacaggaagcgattgcaaaacagaacaattacagttggtgtagtggttgcatcgaatgtatgctgccgtgctgagcagaaaatacatacacatgtaataaccactaagcaggttcagaaagagaggaaatggaatatttgaacatgttctacaaattggcctaagcgcctagcgccctagcatggtacacaaattattaatggaatgctattttacatgctttagccttttaatcacctcgcataatacgtacttcctgggttcatcggtaggttctcacgttcctccccaagatagccggtactacttgtttcaatctcaagaccactattaattgtagatggtccgccaagaaggttctctgtttccatctctgcatcgacttgtacccaaggatgcagtgaaagcttcctcaatcggcccagctcgtcggtgatttctttcatcgatggcctgttggcgccgcacatatcaaggcattgcttggctagctcagggagccccccgagtcgacctggcatgctctcttggccttttatgtcgctcaccaacaccgagtcaagattgttccccttcatggcagataggaaaactgatgacaagcttctttgtatcgcaggtccttcgagcttcagtggcacttggcctgtgagaatctctagaaggataacaccgaagctatacacatcgctcttgtcggtcaattggcacgtttgcatgtattcgggatcgagatagccacatgtaccttgaaccattgtgacaaactgctctttgtcggatggagctagtatagatgctccgaagtctgtcactttggccatgtagttctcatcaagaagtatgttggcagttttcacatcaccatggagaattggtggagatgcataggaatgtaggaagtgaagcccttcagctgcttcatgagcaatcctcaagagggtgctgaaagagatttgcaacccttggttctttccatggataagctcgaataatgttccattcgggacgaactcatagactagcatcggaacttcgacctcaaggcaacaacctaggagttttataatgttcttgtgattgatttgggataggatgagcatttcttggccgaactccttcttttgtctttcgtcaactagtgcacatcttttaattgcgactagcatgttgtccttgactgtccctttatataccgttccatgacctccttggccaattattctgctcttgtcaaaattgtttgtggcatgtatgagttcagcttctgtaaatactgtgaaagcaagacctttttttgatttcatactctcaaacaaaatcatacccccatgttggcgaaaatattctttcttgattttggtcagttttctcctttgaattaccaattgtccgcagaaggcaatgatcatgagaacaatgaagcctataataacccctacacaacgcatcagcatcataagataggatcaatgatcatttcagagtagtcaggaacttgtattcctttattatttgaagatcataaaagtacataaaaatgataaggagttaaatgaataccaattatcaagccgatatcagggatgcatgtattgctgctcttggaaaatttccttcccttccgacaagaacaccggtagcctccttccgtgttgtggcaaacaccaccggaagggcatggccatgggttgcgatcacattcattaacatctgtcgtaaacttagcataattatatgtagaacacaacatagggtgagatagatctagtatttgtgcacatacaaataaatcaatttacaagagggctatacataccatggcatccatgtgggtctggaagataagggttaccttcgtatccatgagagcagttgcagacgtacccaggtccattggtggaagccacacactcgctgttgctactaagacaagcatagcttgtcatgttctgtttggcaatatcgcatgacttctctctgatagcccaatcgatcaccatgggtacccgcccgccgtttgtgccattaaacttggtggtgtttatgtatgtcgtgctgaaattgaacgatgctgcctccatcagcacggcatagctgcaccgaccgaacctcgagatctggcttgtgttgaatctcttatcaaaagtaacattatagtagtacattcctcttggtatcgtggtctggcagcagcccatgccggaacaagagccatccactagccctgacaggtcacgacactgcgagaaacacccactttggtaacccgtgccaccatcatcggcgatataggcaagggtgttgcacccaattacggtgaacttgttgtagacatctgaaaaccggaagggggtattctttgcattgaaacgaaaatgaacccctcccataagaccggaggcattgtagcaaaaggttgagatgccattgagtacccgcaatgtgctacggctcaacgaaatatttagtacctcaacgttgccgataaatggcttagaaatgccatgttggaccttgcattcgacattgaacaattctgcgagtgagcaattcgctccaatgccaaacgggtactgtatgtcaacatccccgcaccgactttggcattgagggctaggaactgctgccgtcgcaatagtgtgttttgctgccagaagtagaagactaacgccaagctgcagcatcgtattcatattccttggctggagaattagaattgagaaaccatgataatgtttcatcaatatttttatattaaaatcagtagcttctaattaaattaatctagtcattgagaccacattaaaagataaggtgagattgaattcttttctcgtacattcagctatgaagtataaaacgaaaaacatactacataactattagactgcttaaatgtttgacaaaccatcacaaaactacataactaattaagcaaccatatcataaagctaaatatttggcgcaagttttattaatgtagaactacatagtgacaacactattaacgatatgatacacgcatgcatgtcaatatattatttcccgtcctaaaatataacaacatttagccttcagaatttgtcctagaatataacaacctcttcaccaatattctattatcaaccaaacacaactctacgtcactcaatttcatcatctatacttctatttatcatccactcacaatcatccctcatttaattgtacctactttattagtaactttctgccctcgagaaattcagactggtaagattttagaccaattcctatattcctgacatctaactgatttagcaaaaaaaaaaaaaatcaccggccggcggcgaaagaagcccaggccaattttattaagatcatgagtgaagtacagtttataactgatgaagcatgatatgagcatataaatgttgctagctctcattggaaactacacatatatacacatataagaaattaataattctgtaaaattcagctgaaatagctaggcagttcaatccgtgcctatcagaagagtaactaagttcataccagatgcagttttctccagaattagcctcccacaagtacccttggagattgctcctttcctataggcagcgttggatgtgtatgccatgccagtatatatggagatgtattgcacatcaatgtcatcgtggaaggcgtggaacaagtccacgcaaacaatacaaaggcgccgggggtaaaaagtcatatatagcaaaaggccatggatgataggcagcgcatgcatgcagttgtgtgccattgagcatatatataaagttataagggtttaaattctaaaccatggcgatccattcctcaatatttgatgttggttagttcaacaaacaaaaagacacatagagagtacttactgatcaatatgtgtacgtgtttacattcttacaacatcgctgaacagctgaatggataaatagttcaatgatttgcgatgatattctggaatacaaagaaattaattaaatattattatgttaaaataatttaaaataaatatctttaaaacattcatataaattataaatattgtttagtagctcgagaaacgtgtacatttatacaccattcaattcctttgaaaaagattacacatgtgtaatacacactccctatattgtaaaaaataaatctattctttgtatcccaaggagtattgaaggaatggttttttttatagagtgggtaggtaagagccttaaaaattccaaatttttaactgtcaaaatcaacttattttaagacggaagagcacgtgataattaagcaggtcatcaacggtggatggatggcttgactgtacacgagtatgcgtagcccacgtgggttaaattttagatttgacatttggttagcgaccctagaactcattcctagtctagattttgatcttttctccagtacattttccgccacaaggagaagacaaagctatgtaataattcttcttctctggcggtaacacacttgattttaaattctcccatcataaattaattagcactctctgtagcacccttgaattttggtttattttaaaaattcctttatttaaaaatgggtgaatagttaatttagtccctcaagtttcaccgaaggttcaattttatccttcaggtttcattttgtccaaataggtcctctaagtatttgttttggtttaaaatcatcattgattcattgggcccacttaatatgctatttgactatttttagtcaacaattatgttagaaaatgtcccttttaccccttagtgtgtatacaactatacactagaaaagagaaaaccaaaatgaataatcaacattgcatatgtacttcccattatttcaacatgtgcacatgaaatttgagcctaagggctatcgtatacacttgcaagtacataaatttattttcgttttacataaattactatgcactatctataaaaaaaaagtcattgcacgtattttttttctcttatatatgtaaatgagggggtgtaagtgtcatttatcatcaaagttgttggttaagttgacttctaaatgggttcaaggataagtttgaattaaaataaaaacatgaaggactaatatggacagattgaaacattaagtactaaattgggtttcggatgaaacttgaaggaccactttgtctattcaccctttaaaaatttggagtttaaatttggatcttttttttacttgaagtattgacagggctttgcctcgcagtgtgatttttataaaaagaatacaaaatatttacaagttacaagttagagaaggagaaggaaaaaatattacacagtttgtaaccaatcaaaaactatctgctttaaaggatccttcattctacacatatgcaaaagaacatctgttttgaacaatgccctccaagaactgaaggagggaagttcattccgaaagatttttccatttctttgcttccaaatgtgccaagcagcaataaagaagatttccaagaagcccttctggttgaactgaatgcgagccgaaacaaccatttgaaagaagttaagattagaattccacatgactcccaaatgctgccaacacctctaactgaagggaaaaaaaagaagagatgctctcttgtctctcttacattattcatgcatagctcataagttagatcatcattctcctttgcacattgccgacggtctagcatatcccttgtgttaagcctatccatgaagaggagctaaacaaaaactttacttcataacacatcttgttttccagatccaaacaaaaggcctcggtgcttgcacattcgagaatgtgagtttatagaacttcttagctgtgtatttatcagaattccataaaaaagaccaatcatcacccttgccgtcctgaaaaagaagagaggagatttcttttgtgccaaaatagatctcaaatcatctcttagaaagatcccctcaattttttgtcaaacccttcgtcaaattcaagttcaaatccctccataaatctcctcaaaatatcaactccaaaatcccagagaaaatagaaagagtcactgttcattagggcccttttccttttctccctcccggcccaactcccaatcaccttcccctccttcttaccgaagtaggtctgcccggcctccttcccgcccctctaggcccacggcctttttccgcgctagcccaggccaccgccgagtcatcttcctcctcaggccggccacaaatgatgtaatccgtttgatgaaatgccgacccgggcgccgagacgtggcagcatcgttccgcaccgtgccgtctacccatgcacccacgcatcgcaccagggccgcgtcccgccaatcccgtaacaagccaaggccgcgccgcgccaagccgcaaatcccggcggaatccgaccatgtccctcgctcgggtttctctctaggagacacggtgccgcgtcaccctccgttccatcacggtgtcccgttgccaccgcctcatgacaccatgtcgtctggtcccgagctcccgtggacgcgtgtctcctccaaccatcgcaccgcgtccatgtcatccacctcctcgtgggaagtcaccgagcccgcgcctctctctctctctcacatcgcgtcgccaccactgcgtgacgttgcgctcgtcccatcgccgtccatccgctgttgtgtgcgtcacctcgcctcgcatcaccaccgttgcatgacgtcgcgccatcgcctcgccatctcctctatcccggaataccgccctagcctctagtcggatacaccccagatttcccgacgcctagctgccaactccccgccgcatccggccaaggccgctccgcctataaaagggaacccaagcccctttcctcgccaccccaactcccccaccatacctctttctcttctctctttaccctctctttgtcaccgctttgagctgccgccgatggaagcctcgttggaggtcgccgctgctgaccctggtcactggtcactgagtcgtgcctcgccgctgcgacacgccattgcctcgggctgggcagagcaagaggaggaagaagaaggagccccaagccactgatagcccgagcccacacctctctccctccaccggtcgtcgacaggtgggccctctctgttgtagttcacacaaaattctagaaaaatcctttaacctttgaaaattcttagaaattcaaccgtaactccgtttgatcccattcaacttgccatttttttttctaaaattgagatctacacattggtattgttgtttctctattttaatcttgtctttttgccttttcttgatttgtgctccttttcgcgtatagagcccgagtatgaagaagctccaaacgccgcttttgaaggagaaaacccgcatcttgtgcaaggaaatctctcttgatcacatttaccctatatttgcaagttatcttgtttgaaaaatgcattgcttagtgtacacaataatcttgtttaggcctcggattgtgtatgcaaccgatggaccgcccagtagttgcacttactttacctaggatgttgatatttccttacctttgatagctccacacatgtttgcgccggtatcactatccactagatacgactaccaaggtagtttacttagccatgcttatgtttgtattgtcatatgggaaacttgggttattccaaatatttgcttaaaaattcggtacgttgtaccgatgtgttgtgaaataaaataggttgtgaaaatggtgatggtgcgaagtcatgcttttgtggtttggccacgtattgtcgttgaggatcttttcctttgggaaatccatccaaacacgttacagtgcaaccccacgagtgtttatgggatacctctggctaagtaaatagttatcacatgggagtttggtgtgccaatggttgtgggatgccgaggatgagagaagacgaagttttggattcttacaaccctttttgggtagccttattgcctctattgtggcacaagttaccaataggagtaggagacatcctcagtattcctaagtggatgaaggctgatcttgcttgatgctcgtctaagagacttggcccaactaggtgacatgcgatttttatgggttagctttggaaaggccttgtcacaaataacttagttgcctaggtgcttcacttagtgcctagttgctcagtcgcttagtttctcaccgcttttagcttccggctgccgcttttatgactttctgtgatgccgtgttgctcatatataggcctgtccatgatgtcaacttatgtaaagtctactttccagtgatataataaagtagtttactttgattttacatttattctgtgtataccagctagtatgttctggtaatatattacacatgggtatgagtcagcttgttttatggctaacgagtgtcagggcgttacattctcactattccaaaatgtagtaatttaaaatcggattgaatatttcttagtacaataaatctaaacataaatcttatccagatttattaggaaaatgccggcgctcgggcgcccgacacgcgtgcgcgcggatcgggcgcctcgtgcaggcggccccccccccccccccacgcgtcccgccacatgtccccaccacaacatgctatgtgttcccaccacacactccgttgcaacaaatcacccacatattaagggaatccgtcttattttttgttccacaaaaaatgtttcacctagtgtacttataatatttcactatgtatagatcaatgttgcagtgaattgaaacattctttcgtaacaaataacccacatattatggaaaccctctgttaagggaatccgtctcattttttgtggaaccaaaaatgtttcacctagtgtacttataatgtttcacgatgtatatatcaaatgttgcagtgaattgaaacattctttcgctatttgctaaaacatttgtttttatataaggtgaaaaaaacgttagattttttaggaaactgttgtttcatacgttgtagcaaaatatttcatgaggtgatttagttgtgtttcaactttttaaacgattaaaacattttcaatatacttagtgaaacaattctgatctacttggtgaaacaacatgcaacatttaaaaacaattcaataataagctaaatattttttccatcggattatatccatgtgtggtcttgttttaaagatttaattgtaacggatttagtggtgcaatcggatcatgatttggataaaaaatttaagagaaaaaatagtttaaagttcgcttaggaagttttgcatgtatgtgtcgacgagtgatactcgtagactggatgatttgggtattggggtacgttggaacgaggatctacgtaatacgacatcaagcagataaaagacaaggattatactggttcaggccccttatcaggtaatagtcctagttcagtttatataagattgatgatggaaaaccacggcttacaatgaaagtaaacgaaacagacgataccgatgagatcgttgtcgatgtattcgacgagatctcccggcgacttggctccgcgtacttcggcttcgtaaactatggtgggtgtgttgacgatgagattcaatgccctgtacccctccctaggggtctcttttatatcgtggatcatcttgatccccaagtagacttggagacattggatcttgtacggtataacagaaactctatcccttctgagtaggattttggaaatcacctatctcgtggagatattttccataatttataacaaattccaacggcgtatacgaaaacgatccgtatacgtgaaggtataccatatctgtgtattccataagtcgtagagtatgaggtatgtcttatccgtaaccctgacagtatgtatgcatgatgacgtatgatgacatgcgcgcctgatttttctcagaaaaaatcggacacccaatccataggtgcctccgatttgttatattaagaaaatctaatccgatctactctatccgtttcacaatgtaagtcattttattatttctcacattcatattgatgctaatgaatttaaatagatataattgaatgtgggaaataatataatgacttacattgtgaaacagaggaattagttgagatggaggagtatatcaaacctatgatatgaggtatgacaagatgcgtgcacggctactctaatccggagccgaactaaactgtcaacttcgatgcacgtggtaagaatcacacgaccccccaaattttctagaaaacgcaggttggagtgcatgcttcagtgcactgcaaaactccacagtgagagtgattcggaattagttgccatataatgccaggtcaacgtgaactgtgttggtaatgtaatcctttcattggatcgatccatggagaaataactgagtggtttgaataaactaaggcctgtttgtttcagcttaagattattataatctagattattaaattagattactttaagctggattataataagctgatatagaataagctgtgagctgtttgtttctctggattattggaggcatttaagagtagtgggtctttagccacccaataatttgaaaaaaactcctccagagaagattattagattataataatctggcttatagattataataatctatcataataatctacttatttgtttcggcttactcctaataatacagattataataatcctagctgaatcaaacatgaccatgacctaagtggttagatacatcccttttcattttaaaaaaaattaacaaatctaataccgtatataatacatccactatttgaagacgtgacagccgaggggctattaaccgaacccgtttccctgcatctttgttgcttacttgcagcaaaccctcgtcagacaaacaccatcaattcctgcgtgcacgtgcagtcagaccggtttttctcttatggaaaaaccaggcgtgcggactcacccgaaacgtgcctacaccggacggagacttggaatgggctccagctccacgcaactggagcgacttagcaggccgaacatggccggccctggatcaaacgggctgtgtaacctcctttacgccgagccagatgacgatcgagcatttgtgctgtgccgcttcgcaagagccgactccccctgcatctgacgggagcaggtgtagcacgaccgttctgctgccctgcatctgacgggtgctgctggctgccgcctcgccggtgcagccgcccaagcagaagctggcgaccgcgggatccaccggcggctggctccactgctccagagtccagagagcgaggaggagcatcggttcgttcgttcgttccagagcttccttccagtccagcgtaatgaatgccatcgtcaccccgtccaatgaggccgcggcccatgcccctcctcgcacacggcacacccttatcctcccccttcttgatcttaaaatggcaatgtgtgtaaggatcttcttctaactcctttgacaacttcgaggtggagttcgttattctctccattattggatagaaagagaggcagaatttaaagtggccgccgagaatcttctcctgtacttgcatgaatcctttgcccgtactcctttcccagccgataaagcacacagaagcccgtactcctttgccgtccagtacgtactacgcaccggccgctcaccggcacggccttgtactggcatgcactgaccataagcccgtgcaacttgatcgccgtcacgccgtcgccgacttgacgtatcatcctcacaaggaattagtgcaagaagaaactgttgctgatcagtaccaaatctgtgttttccgttgggtgggtgtcaagcacagtttatcttcagaaaaacggatcgatgtgtctgcatgaccaagatttcacactttccagctcaccctaacctacacatagacagccgcaaatgagtattggccaatccacaagggttcaacgagatcaacatacaggccctgctgttgtatatatagccattagcaaccacattgccatacagtactcagtagtcgtacacattctctcgtacgcttcttcgagcagaatgaagggaggaggatcaaagaggagattgctccgggccttcctccactcatggaagaagctcggcgccgccgccgccgccgcggccccggcggccggcgagtgggctcctctcgacggtgacggcgagggcgccatcccgagcgacgtgccccggggccacacggtggtgtacgtcggcgaggagctgcgccgctacgtcgtcagggtgtcgtccctcgaccacccgctgttccgcgagctgctcgaccgcgccagggaggagtaccagttcgccgccggcgccgacgcgaggctgtgcataccctgcgacgaggacatcttcctcggcgtcctctgccatgtcgactccaagcaggagcactggaggctgatctcgttttgcagatagctagctgctgtgctgcctgctgatgcatgtcgttgttcatgcctaggattggatgtttcggactcgttgctccgaggaaacggaagaattaattaattcgcgtgaattctcacgtgtacaggggcatttaggctttgttagaatgttggcagtttgttttggttccattgttgtattggatatttggattcttcaaggatggagatggaccatgaatggtactcccggcatatttcttttttcgcttaaagtgtgattagcatgcatgtaaagatttgctcgagtgaagaagatacagtcttttccctgttggaacttgcaattggttggacccaactggatttttcacttttttaatccttttttaaaacttatttttataaataaacctctaaagaaacttagactcttttcacaataccaacgtcattggcaccgtggttcaacataacggtgccatgccatcatccccataaccttccggcgaaagctaagtcactgatgtgaagggacaacaccatgaactatttgtaattttttaaaggacttatttgtgataaaaatatttataaaataagtcttcaatgccgatgtcattggcacccaggatttatttataaatattttttattacaaatatatctttttttataacaaatagatggatttttataataaataggttcgaattcttttacaaatagatcctcgacgctaatgacacttcccccttgacgctaatgacatttccccctttatacaagtgacttagcttccgcaggggaggctagagcgacagcatcaatgtcattggcaccatcatactgggccacaacatcagtaaaattggaataagttttttaggggtctatttgtaaaataagttttcaaaagagtaaaaaatccagtggatgcaacgttaattctgtcgatcgaagatcatccaatctttgcatctatatctggccatctgggacatgctttaagcaaacatgatgctacaatatgacccttatggaggtaatttataatgcattcagagtttcagacacagcaatttgatttgtaaatgcagaaagagatggcacggtggaattgcaactgaagggtcttgctctgtattgactgagtggcatgatcctttcatatcggtaggaatttttagttcactttcctgccatgccaaagagataaggcactatactcatctatccaaacatgcctagggtgcactagaaatgtgccttgagtagtggtggaaatgtcaaaaagcactcgtcgcctatagttattcctttctcaatatgctgaaatggctctagttgaagtcaggcttctcagggtaagtgcagcctgagcgttggatgataacgtttgcagcataacaagcagctctgacacattcatcaatgctcttctcctgaaccaattgagagagaaaacccccaacaaaggcatcgcctgcaaaacaattgtttagaaaaaaaaaaccacttatgtttactgacagttatgtcgtttaaagcaaggatgtatatgcaatgtttaagccagcaaagagcatccagtgaaagcaagacacatagatgtttctacatcataattttctaaaccgactacctgcaccattggtgtcaacaagcttttccttgggcaaaacgataacagggaatgttttgacctgcagcaaaaagaacatatttaaggttatcggataaacaattatcagccgaggcttctgcagattgggtatactccaacaaatatcatgtcattaataatgacaaacgcacttgagttgttgctaagattgtaataacaccataagtgaaacaaatattggctacttcagagaagatcatcaattcgggattctaacttaggaaaaacactagctacagtactttcattaaccaagaaaaggcaaacaaatttacaatagaagaggtttgaacttatgttatgctctgtaaagcatatctcataatatcttataaagacaggaacatatcctttgcacacaagctttgtgtgcacactaactaacaaatatcacctaatttttttaaaaaaagtgtgcatatatactttcaatagtattacacatatgcgtaatattaacctcaaattcattatattttaggcataacaaaattttttttaacaatttcagtctataagtcaaaaatttgtcttttttgttgctctctatgtactccctccgtttcaggttataagatattttgactttggtcaaagtcaaactgttttaagtttgactaactttatagacaaatatagtaatatttataatactaaattagtttcatcaaatcaataattgaatatattttcataataaacttgtcttgggttgaaattgttactattattttctacaaacttggtcaaaattaaagcagtttgactttgaccgaagtcaaaatgtcttataacctaaacggagggagtatgatgaattcgaagatgagactttatacatagatgtaatgctattgaaagaacatgtacaattttttctagaaatttttatgatatttattagttgatgtacacatgaaggcttgtgtgtataggatacgttccctataaagacatgccttggaaaaagaaaaaaaaaaggaatatttacctttccatcatcagccacaactactgggtcacagccttgagtaatgacagtaatcctcttgtgtgctcctgaagccttaggcaattgcgagatcttcaaagcaatctcctcagtattctcagtctacaatttttttaatggacaatttgtaaatactttactcacagaacagaataataggtgataagtgactattacctcccaaccacgaactttagcaaaggtccttgcttcagtttcatttccaaaaatatagtcagcatacctagtttggtgatcaaaagaactttaatcctgttttacatagcactgtattggaaaaattctaacatggatgaagtgcatgggtttagaagaataatgtgctgcagttgttaatgcaacgttgaatgttctatgtcaaagttatttataataagcatatagtggaacccagtactcacggaagagccttctcttgggcatcacggaagaattcacatataaagggagcagaaaggttcatcataaacacctgcaaatagtttaatcatttatactgtaacaatgctagaaaatattctccttttagtaattagtattttaccttgttagttgcagcagcatgctcagcaacaagttgaatggaatccggggataccgtgaggaaaaagccagcaatgtaaatatattttgccttctcaactacaatcaatgaccttattattgtgagaaaagcaatcaaatgaaacacataaactgcacagtaagtagtggacagtgctaacacaatgatggactgacaaaataaacagttcaagactcatttttattaccaagtgtccagttctctggcctcttcagatgttcagacctgtagcagttcgctgcagacaagtttgcaacaagtgacctgatacagacagaaggaactcatttaattgttcctttttggcaggaccagagtagcaactttagggagatttaagtgccacgatatcagcagtaaatgtactaatagataaaacgaaataacttatcaggtgattctattagatatcgctttactcagcatacctttcaccaccaacaatgcagacagcacatgtgccagtaggagcattatcatcctcataataatgggcctgtttaaagatggtaaggtcaaggcagtatgtgcagtggtgcaactgagtgaagaggcataaaaatggaagaaatttaaaacataaagaggaacttataacttgcattaacaccagcggtttgtgcgtctttcttcatctcctcaccgaacttgtccttcccaatgcaacccatgtaacttgttgcaccaggaatctggagcatccactgcaataaatattaataataataatcaagagtgttgtgatctagtagtaacttctgggcacataaagaacataatgctagcactcagtattttttgaacttacctgagcaaccctaatagaattttgagtggatcctgaaagaatcgaacacaataaattcaaataaaatataaaccatgaaacaataattcatcacattgaagtcgtaggttaatgtatatggtgtggtaatattacctccagcgatatattcaacattgaccttgctagccaattcattgtacctggcacataacacacaaatccacaatattcagcaatcactaaggcacatcctatttggcatgattaatgttaggattttggaaaaaaaaatccagtgttgcaaggtttcagggggagaaagaaacttacataggcaaatgcttctcctctgctagaattgcattccctggcttgatatcatatctattgagttcaaaggcgcagagataaacattcagttagatcatgcgaactacttttttatcactcagcgcaagcaaacgagagagcatgttccaggccattaatgaatctatactgaagcaacatgtcatcgtggaacatacataaccccctccacccctccacccttccaaacccccaaaggccccaagtggaaaatatcatcattttccaggaccgagctgtccgagaatacacatcaagtataaatttgccaatgaatataaagggtatagttactggatgaacaattgaaatactggaattccggtccttttagcacaagtttacagggccatgtccactgagccgcatgctcaaaactcacacatactgttcttcacagtgagaaaggctctacttgtcaaactcgcatgagtataacagttacttcaccaaaaattggcagaagagtacagtcttacagactacagagaccataggttttaatcgagagatcattacagcacacgaagagggctgttggggtggttcatactttgcgaggaaggcctcgtcgacgacggcggagatgtcgaggagggggtttcccatgcccaggaggacgccctcgtagcttccgctctccatccttccctagatccccggcgaacggtgcggcggcggcgggggcggcggaaagagattaccggcgttgctttgcttctgcgtggaacagttggggaaggaggctgaggaggtcagatcgacttcgcgagggatctttttgcagctgccacggaagcatcggcctgcctatcacggaggcccacgtgaccacggcccaacacctcagcccaccacgtgccgggcctctcgctcgagcaggcccacagcgtttccggctccactcaatctgtgacacgcaattgatccaacattaaaatgggtcgataattgcggttatcggtcttattatcaggtttgtcagttaattaaaaaaatttgagactatctatacataaattctctcttatctatctaaaaatttatcagttgtaaatatattataatcacagtataaattatattgtattgtgtatgtaatttttaaaaatcccatcataatatgctatttccgtaaagtgtaggaccgaatcctctcacgctatgcgtgtgttgtgatttttccttcctcgagtatacaaatcttgaggcaaattctaattgattaaaattatacgtgaaatttgcgttgtagttacataagtacaagttataattatgttatatataaatttaacgatcttttttgagaaaatttatcaacacatataaagcaaaatcgaaaaaaaggtagtattcaaattgtttgacaaatatatgcttggttttgccccttctcttcatcgtaaagtattttcgccaacgcgtaaaaggattacacacatcgagcagtaacctcgcttaacgacgacggagtggtaacccgtaaccggtgaccaactgtgtttgtaaaccttgagaattggattgttggaatcgagtatatgttggtgtcaatcacacacactcagtctagctcagtcgttggtggtattagttcagttgagcagtccctctttcatgttagaaaaagggcagttcggttgaacaatagcactatactcggaactagtggagtggtagttggaaccaacgttcacaggtaagcgatatgtacatccatctacctccgaacctgaggtcaaacggatgctttcctcaccaacccctttctctgcaggacggacgcatcactatctaattcttgaccgaccttccctggactgtcaaggggggcaaacttatatctagcttcgtttggtagatgacagcaacatgcttttcaacttgtttttaggttgctcaggaagcatcgcctcctgattcatctcagcatctcgatctgcctttatcgatttatcctgaaccatgatttgccagctgcattgctgcaatgtgcattttaatcatcccgtttgtcgctccagtttgcacgtccaactgtacagagatgcagagagcccaacagatctctgatcattacacgaaacgaaattcagagtttcagacggatgagaaattaagccgctcttccctttgtcagcgctaagcatctatgcgagatttgacttccattctcgacagaaactaaccacgatatggggcttgcggcgacatcacgggatccgctgcatgcatggacaggctgactgctaacggcaccacatgcacggtgtagcagcagcagacacgcaccaatctactcctagcttagcaattaacatggtgcatcatggtttgcggcaaccaccagtccaccaccaccctacatccatatctgtggcagtctcgctccgatcgctcaagtgctcatgcaaagctgcacgcgaggctgaacatggacaggagatcgaaggatggatcgtgctacgatctcgctagctcgtcttgcattgtttgacgaagtgagaacagaatctcacacgtacgctgtacctaacctgcgaggctggagtgctggacggccgccatgttgatgcctcgactgatcgagttttttgtcggggttcagttttgtcgtgaattgggggaatattcggtgtgctcatgtactcatgttcatggcgatggattcatggtcctgagcagagtatctgtctgctcataggatgctagcagagtatctgcaggtaccatttagctaagcaaatactctctccatccctaaatatttgacaccgttgacttttttaaatatgtttgactgttcgtcttattaaaaaaatttaagtaattactaattctttttctatcatttgattcattgttaaatatacttttatgcatacatatagttttacatatttcacaaaagtttttaaataagacgaataatcaaacatgtttaaaaaagtcaacggcgttaaatatttagggaatgaaggagtaatatattgccgtacatgcatgttcaggcagctcatttctttttctcaatttggcacgtaggacgaataataattgtctgtccatttcttccaaccaaagaaacacaaggttctttggtcctaagagtattattataaatgcagtcacatggttcatgactaaacaatagatgtatcaagtatttgactttcatctggattatcaaatgagctatgacgcattggtgcgatgaagaaactataggagtatgttactacggtaattttcaaaatagttccaactatcagctacttccccgtttcaaaatatagcaacatagtattagaatagttcttgttatatcggaaccccacccccaccctagaaattatttcacccaactatttttttcatctttttgtgaatttatttaaaaattcaaataatttgggaccaaaattggtcatatcactaaccctcgatacaaatagcgaaatgagattttgaaccctatgccagattagacataatctagcactgtgaacgtggacagaaccttatccactctaccttaccacttcccctccaccgtcattgtaccttcccaccacgtaaaaaaatcacactgcctaaaaaccacccacctaaaagaattatttccacgagaaaatcaaccctctagaaaaaactggaagataaaattgaaccccataaaaacttacgtccatgtttttcataatcctgttgcaaagcatgagtataacatagaaagcttttgtttatatgacggttcttatagtagggcctagagccgtacctcctattcgaccaagacatgactttgagcctttgagcatatcctaacggaaggtgaacatttttcaacttctctaacagttaaactagaagaagatcaagccattcaggaatgacattgtgccaactaggcaagtagtacttgagctagctagccgggtggatataattagagcataccataaggggggcgaatggtacacgaagaatgagaaagaagcttagcggatgcaccattaggtaaaaatattctcgtaggagatatcgaggggactgtcccaatcattctagcaagctagtgccatctatcctaggggaccacctaaatgtacaaatactccctccatactcataaaggaagtcgtttaggacaatgtttaagtcaaaccttgggaatataaatcataaataactctcaagttgttgagtttgaaaatgtaaaaaatatataaatagatttgtattgaaaaatactttcatacaaatatacatatatcactttttaataaatatttttatagaaacaagaagttaaagttgtgttttggagaccgtgtcgctgtcctaaacgacttcctttatgagtatggagggagtataccttatggtttcgatctcttcgggatatttttttttcactccgtgtatacctcttgaggctgtataaggcagcccaatcctgtaacagagacatgatactttttactgaaacaatggtggcaagtgtctgtcaatatatctcaagttcacttcactttttggaaatgaaacctatcccctaatttattcttgaccttggttcccaacaatggtcatggtccatcttaaactctccagggcccaggctaaagtatttctccatcgactaaaagaacccctaatttgaaaagtacacataaatcgtatgcatagtatttgcatacgatacttgtacgatgcaacatttgccagccaaatcccatggcattttctggccgtttctaacgaagaaacacatgaatctcgtgtttttactctatattaagatattaagatattaacaaatttggttgttaacacacatccaccatctgttagcaatcgtacaatgatcgtacacataaatcgtatgcatagtattttctaatttcctcgtgttgtttttgtaacagtaacacttcgtatctccggtggtaggtaggacgagtggacctcttaatctgcgttggctgatcgacagtactgaccgtctgtttcgcatcaaatcgtgctctgcacctgccaagtagctactggtccagcaagcatgagctgatgagcacacgagagatttctgtcactctcacccttgaaagaggacagcagacagacaacacccagcaaaactatctcttgcagagttgcagttcccgccatcaaccgatcgatatcagtgatcagttcgaaagaagtggacgtaaccagttcagagttgagatgaccaatttcaacacatgtaatcaagatagcgctatattagtatatttcacttgcaaaatacaacaacggaatcagaaagctgccagccaaggccatgaacgctgcaggcgccacggcattgcagcagcaatctcacacgattacaacacggataaatacagcaagctcaaaaaggaaaaaaaaaacacggacggagaaacaacgtaatctgctgatgagcgtacgagaagccttcaggatcctgaattcctccctttcttatttcggtgcacgtatcgtctcttcctggatcttgtcgcgttcgcgggtggactggttcgatcagcagatgggcaggggctcgccgttccactccttgaggcactcgagcatcgggtcgatgagcttgcgctcgctgatggccaggaacaccttgttgcactcctcgccgggggacttgagcttctctccggtgaggtacacgcagccgagctcctcgcggacgaagcggtacagcgggaacgacctgctctccttgatcctgttggtgatcggcgcggtgccggtctcgaacgccacgcgcgccgcctccatctccctgggcagcgcctcgcggagctcctcctcgaacgcggtgatcttggagaacacggaggagccgtcgtccttctcggcggggccgttggcgagggcgtgctcgacgagcacggcgcggatcttggtcatcagcgggtagttggcgctgcacgggtcgtcggcgtagctgtacacggcctcgcggtcgatggcggtgagcagggccttctcgctgaagcgcgcgctgtggaggccgccggcggggcccgtggtgagcaccttcttggccaccgtcgtcacgcagttcttgacggcgctcttgaggttctcctccaggtggcgcaggtcgacggcctggcagagcgcaaccaggtaggtggaggacatgagcttgaggatgtccaccgcctcggcggtcttcctggcggagacgaggccgagggagttgacgtcctggttgtgctgctccgcgctctggacgtggttggtgaccgggttggcgaggaactggagctccgagcagtaggaggccatggcgatctcggtgcccttgaagccgtagtccaagctcgggttgcggctgccggccaggtttgacgtgagcccgttgttgtagaactcgttgaccagctcggagaactgggcgaacatgagcttgccgatgttggcgatggcgaggcgggtgttgtccatggacacgccgatgggcgtgccctggaagttgccgccgtgcagggccttgccgcggtggacgtcgatgaccgggttgtcgttcaccgagttgacctcgcgctcgatcgacttggtggccgcgcggatgacctcgatctggggtcccagccactgcggcgacgtgcggagcgcgtacctgtcctgcttcggcttcagcagcgggtccacctcgttcaccttctgcgcgtgcggcatgaacgcgctgccggcgaggatgtgctccatgatggcggcggcctcgatcgagcccgggtggtgcttcagcttgtgcgtcaggtggtcggtgtactcgggcttgccgttcatcacctcgcagaacacggcggacagcacctcggacaggacggcgaggacgttcgcgtcgtagagcaccatggcagcgagggccgagcccacggaggtgccgttcacgatggcgagaccttccttgggctccagcctgaagaagccgccctggatgccggcgatcttgaacgcctcggcggcgtccaccttcttgccatcgacggtcaccgcctgcgcgttggggcgcccggtgatgaggccggcaatgtaggacagcggcacgaggtcgccggacgccgtgatggtgcctcggagcggcaggcatgggctgaccccggtgttgatcagcttggtgatcgcctcgaggatctcgaagcggatgcccgagtagccctggagcagggtgttgatgcgcacaagcatcgccgcacgcgacacctccgacggcagcgagttgccatcggagccgttgccgaagattccggcattgagatgcctgcagggccgtgaaacagagcaattctttcagctttgcaacctctcagtatactgtgggtgaaagaagactatgtactaattacgtttcacaaatatctactgaaaattaacctgtttgttcgtccatgattggagttaatcagttactactactactccatccgccctaaaatataagtatttttagaacagtgcgaagtcaaactttttaaattttaaccattaatagcaaataaattaaaaagattaatcatgtaaatttgatgttactatatttatcattaagcgagctatcataatatgcaactctctttatttaaaacatcttacttttatagatattgttggtcaaagtaaatacttgtattttgggactaactaactattcgagatctttcgttttgcttcaacattcatgtcctctgttgtggtactacctaacatggcagtagtagtgtagtacagcagctaaaaacaagtggcacgcagttctaaaatctgcagctctgcatcagaccgagaggtagtacgtgcacaccaagataactgcaacaactggccgttcaccgacgcacggaggttgcacatgatggcattatcatcggaagcaacaaaacgactcgtacgtacagtaaaatggctctttgattagtgatttttttttactgtacctgagcagctcaacttggagggcctggccgtccttggtgcggcggtgggaggtgccgccgaagccggtggtgacgccgtagatgtcgccgccgtgggcgatgcagttgaggatccactcgctgctggccttgacgcgggggcgggcctcctcgtccagctcgaccaccacgccggaggcgtccttggccgcggagacggcggccacctggccgacgcggaggctggacccctcgatcttcaccacggcctcccgtgactgcgccaccatgcgcttcacctcgtccaggtggctccccgtcatctccagcgccgccttgccccacgacagcgggtcgctcgcgacgaaccccgtggcgtcggcggtctggctcgccatctctccgagcggtggtggcgaacaacgacgaggaggaggaggaggagctgggtggtggtggaagaagagctgagactatagagaggctgctgtgtgctcttcttggagggaaacggagtgcgggagatcgcttaaatagcagacgggtgaccagctgggttttggtgaggccgggtgttggtggattagttggtgactggtaaggtgtatggtggattggtggatcgaaacttaatgcttttttattgattttttaagcatttcaattgaacgtcaagtagtccagtgtactagtactatgcttttggttgggaaattggaaatgagtctactggaacacgaatgtaaatatgtcataaggcctactctctccgtctaaaaaaaatcaaccgatccctcttaagataatgaatctggacatcctcttctggttgaattatttttgggatggagggagtaacttgcgtggaggcagttcaactacagtgagactcaaggggacgagagactaaccgtgtctgaaggaagatgctttctgctagcagttgccactacatcgtcgttgttgaatccaacagacggtatggtttaactgctattactagcttacaagtataagctccactctacttagtgtcagctgaaagattaggatgtgttctggagtgagggtttagaaccttactccttaacacgcaaaacgaagaagcatttagcatataattaattaagtattaactaaaatagattaatataattttttaaagtaactttcgtatagaaaatttttttaaaaacgcacagtttagcagtttgaaaaatgtgcgcgtggaaaatgaaggaggtaagttggaaaactagagataagaactcagcctaaggtaagatgagaaaatcattaacatattattaattaagtttttaattatttaaaacttaagagtagatttatatgatatttttaaacaatttgtatataaaatagtaatataatttagcagttttttaaacacagtacaaacgccgatgtttaacaacacacgcacactcacccatatgaacacatgtgcacgcatcctatctctatgaatacattcagaaaataaactaacaattttaagattgactagtaatcgtgcacgtgcaagacacgttttggaaagataaaatgttggcataaaatcttttataatataagcttacacgaagatgaactctttgatgattctttcagatcaaatcacatatgttgctgaattccataactctatttctaagtgattaagaactgtcgggaataaacagtgtccaccctagagaagcatgcactgaagatgtgcaatattagtcacaacatctgcagtaggccttagtatattatcatcatccaataattattttttctggtataaaaggagtagatgaagacaagaaactaattaccagagataaccaccttagtaaattatcctggaaactcttaaatccaaacgattgtagataaatgaacatagtaataatgttataggcttttcaaccatgtacatcttcagttttcctatgcagctggtcgttaataattaataaaacatgtgaatcgacaaaaagcatcataccaaaagattctataaatgtgcaaaaagtcaacatggtgaaagaaagagtataaactcacatgccacattccatacatggtgaaagcaagacaataaactcacccatgccacatttcttgctaggagcatatgctctgttcatatatcatgagagaatggtcagtactcagtagtacaaataacaaccaatcccatagaataattatgtattcatgcatcagtgtaacttcagttttacattcaataaggaatacttatctaaaatgaagactaaaatgagaggattagggttatactcatcatttactttctggtaaacaaaaaattgtaaatatccaggtggatacatatgtttttctcaggggaacaactaacgatgccatgaaaactttttcctcacactttcctccctctgaagataacaccccccggcccgatctgagcagttaatattgctaataaaaggatgcatgggccatggttccaatgttatacggaaacattaacataaactattgaaactgaatggtgagctatttctgcagtataaaattcacatttatatgtgcatagatgaatgaacagtacatacttgaaagcatgaatgttacctgtgaagcaattgcagagcagtaaattgagtgctttgcaaataaatttcctgcaaaaagaagaaaagtagcaactgaacacccatatcaaaaagagttatgggttgaaccatatcactcttacatcaaaattatgtggagaaagcataccttttgacccaaaattcttagtatttgttttaggtaacttattaatgcccatacaaactaaattgaaggaagttttctttacatggtttctacctttttacctggtgagcttatcaaccaccccaaatatcatttttcagagttcttgccccaacagagagaaacaatatgaaagtatatttacaatgactactgttacatattggaaaaggaatcgaatggcaatgcacatgcatatagctatatcaaaatccttttttgcgcggagatatatcaaaatattcatactaaaaccagcaacgaaaataatttgtgtgaattaaaataaaaaagtggtttagatagttaattgtggattgaagaaataaatataaggatgcaatggcgacacatattcattttatatcttctattattcagcataggaatggtttcagatttttcaggttttacagatagaagcaataacaatattccaatataaacacaagaggaacactcttacttgttggtgacatctataaacgggaggcaccagggtgtcaatttagctttctagcgttcatgtcctacttataaaaatcatcccagcattgttgtttgcctgaattagctgtagaaaaaaatattattgaatggatacacaaattatctctagaaaaagtctgcactacaaaacatagaaacatgatgtagtatatcaattttaacatatagaatcaataaatcacactaatctgctctgcttgctgggcctcacagctcataacgacaacaaccgcacatttcttcggaattttgatcattgcaagcatgtcatatgctctctgtaaatgtaatgtgcatgggtgtcatatcgggttgctattcaaaattcatataaaaaaatttatactgcaccactgtgagtttatgacttacatatttatgctaactgtatccaaatgagattataatcattttcagcttacctctaatagtaatagaggcagaccaatttattgctccatatgcttcctttcttctgctaggaccgctacatgtactctcaattcttttgaagcactcattccttttgtcagcagtgagggagggatacttcgttctagcatgttttctacttaatttgagtcaacttaaattttagtttctacatgatgatgttccatatcttttttttggggaggaggagaggtgtggtaagcagaacagaacagaacatgaccgaagagggaaaagatcagctataggaaagcataataccagtgacataattgcaggaggctgacttgaccagcctccttttctgcctccaccaattgttatttatatgcattcttttatcagcaagcgcccattgatcctgcaattcatgcattagaaaacaaaattaagactaatcaaatacagctgacaataacaaattagctagctgcatattatattttctagctcttcgactcctaaccattatgcatgaaccatgcttacgcccttgcgcagaataaaggcttacatttttgcatagcagaaaggcatgattctttgcctcaattattttttcacatcatgattagtggcaagcaatattgaacagtaaaggaaaatattcacattgttcacagtgactaatacagtatcaagtttgaaagaaatacaaagaaatcacctagagaaaactcacatagattacgtaagcaacctgtaccactaatgaaaacatccaataacacttcgagcaaaacattggttataattagcagttattcagtcaaattgtcccaatatttctggattggtcttcagatgaaaaatcacatgttactcgtaatgtagcggcaagcaacttgactgcagcttctccatacttttcaccatttctacaacttgactgcctagtgctgtttgacagcttccaactcttggagaatccctcgtgattcagcatcaagcatgacataacaggaatagtatcagcaatcaccgcagcatcgtggtaccatggccacctgtgggcgccagcaattataagcaacatcgtggcaaatttgtagaagatttgcaatcaaaattgacactaaaccaagagattattagggtaaatacctagggttgatgaacgtctctgtgacggcaatcaggcagaagtcaagggccacaatatggtgttgaagaaggtggtggtctggcaacctggatgttggcctcggcagtgaagctgcaaaggggcacaggacagcgactacacggtggagtggactgcgatctggcggtgaggggctcaggtggtgaacacaacaatggagcctgctgcagactcatggcagaagggctcagggttggagggcctcggcggcggagcagccagatccacacgatctcggggtggtggccttggcagcggagcggctggatcgggccatttggcaatcaagcgttgatcgctgaagtccgctgctttgcatcgagcgagggagatcgcgattgaggtctgagcgcatagaaacatatcaaacttcaacaaaaatggaaaattatggtcacttgtttttagatcgtgttcgtacggagaagattagggattagggaaagagacaggatttgagggacttattgagggacttacttgatgaggggccgaggcctgctccggcggcggctccgagtaagagtccggcggagctccggcagagctccggcaaggatgcggcagagcggcggcagcagggaggaggaggcatgagcgaagaggtcggccgtgtcggtggggatggggaagaagcaagacccggaggtgggaaagaagaaggacccggcggcggctacggcatggcgcggaggagcggcggcagcggggaggagctcctgccaggacgcggggaggaggaggagcgagcgaggaggagaggtgcggtcttcggggctgcgggtggatgaggagcaatgtcttcgcgcgtgcaatcctcgggtgccaaatcgtgaggtggaaaaagttgtgcgcggatggacggctcagattaatccgggtgatttggcctgtagcattggaggggggcaactcctcctttttatattagtatagatgaaatcagtacaaacgattcactatcgatgggttacaacatcttttttttagataatggatattttatacccggcttcatctatcaaaagatagactcatgccaattataacaaacgttcttacagagtaacacttggaaacaaaaccgagataaaagttcagacgactaaagaccgatgtgtctagctgataaccatccattggaactaaaaaattgcaaagctgatgactcaagatgttgcgatgccgcgatcaactgtgaacgcaaatcctcaatgccgttgcagcttcgcccattaggttacaacatctaccactgaataaataattaatcataccataaagaacctaacaattgagttaggcttacttcgctatcatttaatagcttgaaaaacatgataataaaaattgagctaaaatatgtatctcaatcggaaacaaacggggcacggtagattcgtcatttctccccacggtgctagatacggggggttgatcccgatctcgtgtcgtcagtacgtgctcaacaaccatagggccacggtagatttgtcattcgagtgtgctggtgttggtgacttggtgttggccgctgaacgctaatggtttcgcccgccgtcacgttgcacagcgggggccaaactttacacagcaccgtttcggcgtcgcgagatcaagagcggtgcaggtgcaaatctcaccaaccctgaaagggggaaacgagggttgttgtgtttcacttttttaaattttccttgggcacccaactgttgcgaaccagggttgttggcacttgaggaggtccaattattgtgcgtctcggctagtagtactagttgtctttcatcgctaagggccatttctggtgtctttaattacgtgcacataacgtcacacgatggccatctaattaagcgcctgtcaaaaactaattgccccaattaaacacttgccactactgacatatacgaacaaatgagcaataacggaaggtctcatctcataatataaacagttgcaagtatcaagaacacttcaattttatcagttaggagcagttctgttagccgataacgacatatgcagtattacaggcatacttaagaagattgatgtctacagtactattatctttctgcattctctctcattatatatacaagaccatatgattagtccgcatatcatactcttatttaaaaaataaaaattagttagagcctcatacatgaaaaagaatccatgaacagaagtacctctactttcttttgccacacaaatgcaaaattcatgtcacggtatacaaatacaaaagagacttatacatcagttgtgagttagaaatgtaatgtatctaaagcagtgaaaaaaaaactttttcaccatcagaatgcactacgtcatcaaagaaatattggcggtccgattttctgttacgaatgatatgagccgtcaaattccttgattggcaaaacatcttctatatccttcgtaaaagttctttcacaatcaaacccttccacatccctgttcttattatttccattttcacccctactttcagactaccacgctgccgtgcgtgccgcttccttctcgcccctcgttgcaccgccgccactcttgagaggccaagacgccgactccttctccgcccgccgtctcttgtgattgtcttctcctccccaatgcaaccaccgcttcctccactcccactcccgtcgccgtcacgcctcctagccttattccctccccatctccaaagcgtcgcatctcctcccaatctccaccacattagttgtgggttcgtacttccatgaaaaataaacaggcccaacaatatatcacgcagacaaatcaatggtataggtagacttattgaattctgcctaatcaatagtatagatagacttctcatcccttttaattttatattgcaatctacaaacaaatcaatctaaactttttaataactagcacgaaaaaaatacatgtgtgttacaatggaaaaactttaatctatcatgctaaatcgtgcaacaagtgcttagggacactctgccgccgcggcaccgcggggccggtgaggtggtgatgctagctcataggtaccggttcgtttgaaaccgacacctattgattgtcccacatctttgcttggtggaaaatcatgaaaacggctacctttgagtaactgttggtgaaaacgactacctttgagtatatgtaggtgctgattttaaataaaaccgacatctatgctgtgagtaccattttttagaagaatcaatagctataatatatttataggtctaggtttttaaaaatcgacacatatactaatattgtagttgctggttttaaaaaaactagcaggagctgaacgaatccaactaaccttatctactcccagacatccttatccccacacttgctcccactccttcctcctcctccataccgcctccaacgcgcctcgttggcctcatcgtcgcggccctcctcttccctctccctctcgcatctcccccgcgcagcggtggctgtggctccctagcggcgtgacggctcgtgatctggccctcgagctcaggacctccacaacggcgaggagaaggtctagagaggagcagcggcggcctccccgctctcccctcccacccctctcatctcatgtgtgatttattttgtgattttgcctctcctctcattacctaagtgatttattttgtgattttcaattgaattgtctcgtgtcctgtgatttattttgggatgattttttgatgattccgattatattgggatttagtttttaggttagatttttgatgagttgggcttggttgtgggatctttagagcggacccacgttgacacgggcagacgacagatgaagcggataggaggtgcacacgatgcggacgacagactaagatggtcgaaaaacctccctgaagttttacgtattttttaattagatataaatgtatactcgtagtatatacatccagtaaataataccataaaagttgttaaattttaatgggcctaattaatactgataaaataggagcatgtagttatcaaattcaggtggggaaaccctcccctcctgtcaccaataaaaaaaagagtatatctagcataaagttgtcaaatggccagagttgattcacaacaaacctacgaatccaaccatttggaagtacctggtaataaaagagaagaacatcagatgacgtcgttccaaagcttagcaaaagttcggtgtgaatcttattccagcacgcagcagctagcagttgaaagctgaaactaccaggcaaagtgaaaccgatgcacccagccacccacgcacacggctccaaaatttgtaggccaacaaaaatgtaccgctatgctaaacagtaaacataaacgccttccctaacctgcatagccgagccgttgatccaccagaacttttgaagcacatctgaatctgacgtgaatgtatgtacaattgtacaccctgtatccgactagttaggacatgtacaatgaatattttttaacgaatctaacactttagagtgtgccaatttcatgaatataacatgagaaaaattgtacagagtaaaaagtaaaatttttatacgaagagaaaagctgtgatataaattgtgctcggtctcaggcacaactgcaaatgtgtgatgatgatggagtgagcttctgaaagttgcatgtcgcaaacttaagacgacagttatgcaattttttactaactatagatgaagattcacaaatagacttgaataactgttttctcattatcttagtttggtcacttgttttatgctttggtgtgtttaattttatttgaagtaaactctttatttctttattgagtgctagattgtaatatttagctatagctctattaatcaaagggcgggatgtatctattccattatttaaaaaaaaattatgccaggtgttttgctcctactaggacccaagttttggcctctattttcatgaggaataagttcactttgggtccctctatttgtcgcccagtccgattttcgtcccttgactgcaaaaccgggtataactcgtcccccaacttacgaaaaccgggcacataaggtcctaaggtggtttggatagcggttttggctgacgtggcgtctacgtggcaggtttgactaggtatccgtcccatgtggcattgacgtggcgtttacgtggcaattatatctcggaaaaataataaaaaccatgggcccacatgtcaactgcacaaaaaaataattttaaaatggtggggcccacgtggacccacatgtcagctacacaacaaataaatatggtggggggccccacatgtcattccctctcccctctcggctctctctcctcttcttcttccctatgcttccttctctttcttctctatcctctctctctcctgcatacggtcggcacgaagaaggccggcgcggcggcgcgacggcggccagagcggcgacaaagagcctgcgggccggaggaggatggaggcagtgggacggtgagggaggagcctgagtgacggctacgagggcgcgcgggggaaagagggagggagaggcggtggctcggaggtagactgcgccggtggcgtgcgaggtcgctgcccgcctccagtcggccagcgcgtgctgcctcctctcaagcaggtcctcgcgagccgccgctcctctcccgtcggccgccccgacgagctcgcctcatcccttgcggcgctcccgtcggcctgccctctcgccggcgcggcgcgctgcctcttctccagccaacccccgcgagccgccgctcctctcccgccggccgccccgacgagcttgcctcatccctcgcgtcgctcccatcggccgtcctctcgccagcgcggcgcacccccgcccttcttcctcccacccgtcggccggctcgacgagcttgccccctccctcgcggcgctcccgtcggcctcgtctcccaccggccaccctgcgtgtcacaaacgactcctgcggtcagtggagtcgaaggcgtcctcctgctcgtctctaggtccctttgagcgactcctggagtctggcagatacgtctcgccactgcccggctctgtgccactggaactgctgctgctgtggtcgcggctgccactgggagtagcagacaaccaacctccgttgccactggctggacccctggcggctgacgctggagcgaaggagagagcggatgcgggagctggcactggaactggagctggggctggagctagagctgcgggaattgcgggcggaggtgggttcctgggcgcaagctgaatgcgcacgggtgcagtcgtcgtcttgcggggcgtggtgcggatccggactcttcctggcgctgggagacccttcaactgagtattctccttcttcaggcgtgctatctcatccttcagagctatgatcctcactagcttcccatcgttcaaggccttggacgccttgtgcagatccgagtgcatcctgtccattcccctcatcacagcacacatgtgaccaaaggtggtgtcgttctcgccagctgtcggacggaaagtactgacctcatcaccgctggctcgacgagggtgaaatcggtacgccgtgtcgtggaagatgtagttgtggcgctcccgtagtctggccatcatcaggtatgctgcctcctgacaggcgtgatctgctgtgcctccggatgcctcaaccaccatattagctaggtaggtacccacgtagccatggaccttcaggcggacacggtgaggaagctcgccactgagcggtggaacagtcgtgtactctggcgcgttggggtagcccaccaccagcgtcatgcgtgccaattctgccacaaagtcatccatgccttctccgcggtggttgggtgggtggtcggccatctagagaagacaaaggagtaggatcaatgcatgctcaaatccaaatttaaataaagcaataaaggactcaaataagagaaacgaataagagcggaattttattcatagatcattttgcatgagagcgaataaataagacagacttacataacgataaaataaatgaggaaattagatacatactaataataacaataaaaacataaataccttgcaacccatattcctgagctaggacctaatgcatttcacccatcaaatcccaactgactgacgaataaatctcaaataattttactaaaaccctagactgacttgttttgacaaatctcacttaaacgagcgaccaagatttttctcttgaaccacaagaacatatcccaattttcccggaacaaatccaattgcaaagaacatatgcaatgaaaaggattcagagggctcttaggtttttccatttggcttgtcctacggtcaaggtcggctctgataccaacttgtcacgcccggaaattcccgaatagaattccaagcagaatgtgcattaaaatccccgtccaggaccggccgaggtacacaaacaacaattttgacattcagatccacgtcttacaaacatcataaaagtcttacataaatgcagcggaaaaacgaaagataacaggagctaagccttgacttgatctgcagcgggaacaccactccacaggcatcctcgacggcacggatgaagcctactcctcggagaaaccaccatctgacacatactcgtactctggggttggggaaaatagagcaagactgagtactacccactgtactcagcaagtcataccggaataggggtatgatgcagggaattatcaaaggagagctagagtggttcatttgcataaagtgagcatttataaacagaagttgaaagaattaaacagttgtaataattaatcatattattcatccactgtccaacgctataccacgttgcgacaggcccaaccatccacctatactatccaatttcattagactaaactagggtgagactaatcacggtgaatctggttgaccgtccataaccgcgggcacggctattcgaatagttttactctgatcagaggtgtacaactgtacccacaagaggccggacaggacccttcgcataaccccctctaaccaagcacaccacacctcaggtttcacccccactcctcgcaaggcagcgggcagtcccctctcgtgcctaggtgaatctggaagccgcataggccgtcgcagggcccatctaaactccatcacgcccacccttgcctggatgcgtcggctagagaaaagctacactacaagcccagccgttgcccacgctggcttgtggtaagtacgataagttcttccagggcatcccgcgaaccggtccttaactgccatgggtgcgaccaacaaaaccatgcacccacagcccaccatgtgatttattttaattaaccaacaccgaagcggtgtcactaatccaacattaccattagaacctacagtctaaacattaataggatttttccccaatgtgtgctagttgaactaagcatggctaagcaattcctagtccaaagtctattcatgttataccccaagctaacaaaggagcatgatatcaaaatagcatggctgtaacaataggtaaacatcccatagtaacattataaaacaatgtagtatttgaagaaaaacaatagagcatttgcaatataggatcaacatgttcaagtgacaggcatgacttgccttgctctgcagctggaggaacctcggcgactatctcaaagtacaccggagcgttggaagaaccggaatctaagcgacatacaaagcaaacaatgcaaacaggctataagactactgaaacagagaacaaaaccatttttaatggattctacacatttttcttgatttactgagacttgaatgggcttaaacggagcacggatgaattagttatgaattttagaagattcactgtgttgattactataaaaaaagtccttaaatcatttattgcgcattatgtcccagggctgacgtcatcaaaaagggggagtggtgccgacaggcggggcccgcatgtcagcgactcaaggggagagaggggcgccggcaagtggggcccccgggtcagcggctcaaggctgccggtccaccggaccgacggcccagatcgcccctggggccgatcggatgggcggcggcgacccggctcggctcggctcaaggccggccgaccggccacggcgatggcgatggcgacggcgcgcgcgcgcacgcgttgccggcgacggcaaccggcggcgcaaaggcggcggctcgacccggcgcggctaggagggagagggaggggaataaaggagggggaatgcctcaccaagagtggccggcgtggaggaggacgacggcgaacggcgacggcgagccacgggaggacaacgacagcgggcggacgagctccgagatgccctaagagaggcaaagagagagattagagggagaggggtggaccacggcgagcggaaaccatggccgaaggcggcggtagaggtggtgctcaccggagtgcaaggggatgcgggttccggcgacggacctcgatggaggaggggcggacggggtaacccttggccacgcgaacccggcggcggcgacggcgtggtgcggcggcgagcctagcggcggctagcggcggtcggagtagcggaagcggcggcggcgggtggaagcacggcgcgggagcgatggggagcacgagggagttcggcgagatggggaaaaagagagagggagtggcgatggagcttaaataggggaggggaatcccagacgtggccggtaggggcgggattccgccggccaacgcggggaggtggaggtagagagagaggcgggattcggaattcgaatcccagccatctcgggcgcgggcgcgagtgggatagaggaggaatgggtgcgggaggcgcggcgcatgcgcgggcgtggccgacgtggcccggaggtggcggggacgttggcgcggcggcggtttcggcggtggtggcgacgtggggcgggcggccagaggaaggggacgaccccgacaggtggggcccacctgtcggcgtcccggggagagagggaagggaggcttgggccggcccacaagaaggagggcgcgcgcggcggcggggtggactgggcc

SEQ ID NO: 16795 - DNA, 37850 bp, Oryza sativa
ccgcggccttcgtcgacgtgtgcccttgctggaatcgggccgctgcgaagttttctcctgccgacgatggcgttgagatcggtgttccccgctgtagggcgctgtcaaattgtcagggagggcattgccgccgccgccggcgtccgtagaacgcggctacccgctatcccacgttcagggtttttatggtatgtctttcctgagctgaaggctgaaagcactgatctgatcattgaccatccgtaggacatcaatttaattctgaactcgtccagtgtcccgaatattaattctgaactcgcattgtgatctattgtgtttgaacaatagtatatgagctgtgtgagtcatgagttcactgtttgtttttttcaggatgatctgttgagttctaggcttaagaagctgcttcccggctttatttatccacccacaagatgaatacgtgctcccttgaagatacggtgatcatggtgaagagacacgtctcgctgccgtggagaaattgaatgttagcggtacggtgcaggtatgtgccgagtttctgataaaacagtagtatatgcataagtgtgacacctcaagcaaacaacactatctgttcagctgagtggagcaactgaacttaacctgctacctgctcactagtagaaaaagacagtggctttcagacgtgtacaggatctcacgtgcatgaattgatgaatactgcatatagacatgtaactggtatctcccataacaaatcaatcttggcgctatttcgttcatcatcattcgtttgtcatgttcccttgggagtggcagcatcgatttagtaagaaaacatctctgttgtgcttctacagaactccatatggaagctaataaacagtatactgatacatgaaaattagatggaagatagaattcagataatcgtatgtaccactctgatacctgatagaatcaggaagacaccatcgataacgtttataaactgcgtcctattttagtataatcatgttcataaaccaaatggcatgacactctgacagtaacagatgaacttcttctgactgtttggagttctctcacgaattgaccatggaaaagtatcacaaattacaccctttaacttacatcaacagcagttttagtagctgcctgcctctatgcaaattgctaaatttggctatggcatcgtaacttccaaagaacgttgcaaacaagaacttaaaaaaaaatgaaagaaaaggcatacttattacagcatcagctaagcacatctgtgaacttctgaatttctgaaacacgctaatattttgctatcttctcgtcggtcctctgttcagcaatcagcagatgggcagaggctcgccgttccactccttgaggcactcgagcagtgcgtcgatgtgcttgccctggttcatggcgacgaacaccttgttcacctcctcgccgggcgaccgcgtcttctccccggtcaagtactctgtcccgagctcctcgcggacgaaccggtagagcgggtacgacctgcactcggtgatcctgttcgcctttgcggcggtgccgttctccacggccgcacgggcagcctccacctccctgggcagcgccacgcggagctcctcctcgaacgtcgcgaccttggcgaacaccgaggtgtcgacgttgcgctccgcctcgccgttggccagcgcgtgctcgatgaggacggcgcgcatcttctgcatcagcgggtagttggcgctgcaggggtcgtccgcgtacgcgaacacggcctcgcggtcgatcgcctggagcaggtccttctcgcagaaccgggccttgtggaggtcgccggtggcgctggtgctcagggtcttcctcgccaccgtcgtcacgcagcccttgacggcgctcctgacgttctcttcgaggtggcgcaggtcgatggcctggcatagcgcgatcaagaacgtcgaggacatgagcttgagcacgtcgatggcctcggccgtcttcctggacgagatgaggccgagagagttgacgtcttggttgtgctgctccgcgctctggacatggttggtcacagggttggccaagaactggagctcagagcagtacgatgccatggcgatctcggcacccttgaagccgtagtccaagctcgggttgcgcccaccggacaggttggacggcaggccgttgttgtagaaatcgttcacgagctcagagaactgcgcgaacatgagcttaccgatcgcggcaatggcgagcctggtgttgtccatggacacgccgatgggtgtgccctggaagttgccgccgtggagcgccttgccacgggagacgtcaatgagcgggttgtcgttgacggagttgatctcgcgctcgatcgacttggtggcggcacggatgacctcaatctgggggccgagccattgcggcgacgtgcggagcgcgtacctgtcttgcttgggcttcatcagcgggtcgagctcgccgagcttcttcgccagcatcatgtaggagctcccctccaagatgtgctccataatggcggctgcctcaatctgtcccgggtggtgcttaagcttgtgcgtcaggtggtcggtgtactccggcttgccgttcatgacctcgcagaacaccgcggagaggacctccgcgagcacgccaaggacgttcgcctcaaagagcaccatcgaggcgagcccggagccgacggccgtgccgttcaccatggcgaggccttccttgggctggagctcgaagaagccgtgctggatgccggcgatcttgaacgcctccgcggcatccaccttcctgccatcgggcgtcaccgccacagagtttggtcggccggtgacgagtcccgcgatgtaggagagcgggacgaggtcgccggacgcggtgatcgtgccccggagcggcaagcacggcgtcacgttggcgttaagcagcgtggcgatcgtctcgaggatctcgaaccggatgccagagtacccctggagcagagtgttgatgcggacgagcatggctgcccgcgtcgccgcggccggcagcacgtggccgtcgtcgccgttgccgaacgccccggcattaagaaacctgtcatggcaaccattacaggaacacacgttaggcctctgatccacacaagctctcaccagacgaacagcaaactcttgcggcttcttaccggataagctctcgctggagcgcgccgccctccttggtcctccggtgggaggtggcgccgaagccggtggtgacgccgtagctgtcggtgccgttcatcatgctgttcatgacccagtcgctgctggccttgacgcggccgcgggcggactcgtcgagctccaccctggcggcgccggcggaggccaccgccgcgacctgcgcgatggtcaggctggcgccctcgatcgtcaccacgggcctgcggtactcctccaccatgcgcttcaccgcgtccagatggctcccggacagctcctccgccgccttcccccagttgagcgggtcggcacgcggcttagccacgcacaggctgctgccgttggcggcggcggcgacgtgcccgttctcgcactccatcggaacggcgaagcagaggggagatcgatgtgtagctgtaacgagtggtggttgctcgagcggtttgctcccgatggaggtggaggagttgtgtgtgcggaagagccggggatatggaagctgcagtggctttgctcttggaggggaatggagggagttgtggggagtttaaataggaggcgcaggatgggtgggagtggggagtgtgggttcggtgtggccggttgggttgaccacgggattggtgtgccggcgcgagcgagtttgggagcgcaactacgggccgggtgggcgtgtggctacgtagaggtttcgtggtggtcgtggcgtgccctgtgccggttgggctcggggaaccgaagcggccgatgcggccgccagtgccgggagtgcatgcgggggaagagagagagagttgcacgcggcagcggcggcgcgggggaatacggggcgtgaaacacctcgcgtcgtcacgccacgaagccacgtttggcttgggggcgtctctcgccgtttctgcggctgctgacggtcctcgactcgtcgtctttcgtttcgtccgggcgtccgtttatctggaagggctgtgaactcatatccagatatcatttccttggtcccccggcttatctttctctatcgctttctacttcgtgcaacacgtttgtttaggttttgtgttctagttacatattccataggtcattggttctccgcacgtaggtgatgggctgatggtcaagcggtctgtgtacaaacaacaaaatttttctggggttttgggggtgcatgaggggggaaactacggcacaagagaggtaccaatccaattgcgcggtcaccagtcccccgacaaaaactggtgttggcataaccctttcatctgtctttagcaagtcctaatggttcataccaagtgctagtattctctccgagctttcgttctgcgcaatacacacctgacttgactgagaaaatatagacagttttttctcagaactagtataatgtctgtgcgacagaaaatcttttaaaaaatatagtttattgtgtatattttaaagaaaaaaagttaattatactctcaactagctggtggcccgcgcaactgcgcggctagtacacaaacaaaattatatattttttaagtatgattttgcttaaaatttattaaatagctatttcgttgtcttaagactttgaaagaccaaaccttatcatctccatatttctaattatatggtttttaaagtcacaccagctgctacgtcttacttttctcatatcattttttatttgcttgctcaatctaccactatttctattcattctccttgaaacctttaaaaataggatcttatagtttttagagtttagtgtctcgttgggtttcgtttttataatttctataagtcccgtcaaacgctgtcattatactcctctatgccccgtcaattgtcttttctatttattatcattgggattttaaaaatcgaacataattatcattcgggttcattttttactttctagaagtcctgccaaaccgtcagttgctttgccactgtactcctctacggcccgcccgctgccgcccttctttattgtcattgagattttaaaaatcaaatatgattatcattagggtttatttttttattttttagaagcccgaacctttaaaatttgaaccttatagtttttagagtttattgtctcgttgggtttcatgttttttataatttttagaaaacccgtcaaacactgccactatactcctctacgactcgtccgccgcatactctttattgtcattgggattgtaaaaatcaaacataactatcattggaattcattttttactttctagaagacccaccaaccatcggcggctctgtcattgtactcctatacgacccgcctgctgcctctcatttttattgccattgagattttaaaaattaaatatgattatcattgggatttatttttttttactttctagaagtccccgccaaccgcattaaccgattgcttcacgacctgcccgccgtccttccttttaatcgtcattaggattttatctgattatcaaccaccaccactctgcttctctctagccatgttacttaattaatctcgtcatgtgttttagatggtcttttctttcaatagtcttatttttttatcaccaattttagttatttataaatggtatttctagtgagatcttatttttctttttctgatttcagaatttattttatttttcgtattgtgttcttttgatatttttattttttattttcaatttcagttgtttcaaaattgtacatattttaactctctttttaatttgcctaattttggatcttttttttattttttattccgaattttaattaatctattattggattcttatatggactcttattccaatattgcttatatttaattccgaatttaagttaattttaaattgtatttctacttgaactcttcttttttttattttttattcaaagttttaattaatctcatattggattgttgtatggactcttatttcaatattccttatttttaattccgaatttcagttatttttaaattgtattcccactcgaactcttccttttctttttctaattttgagatttattttatttttattctgaattttaattaatcacgtattgggttcctatatggactcctcttttaatattgcatatttttaattccgaatttcagctatttttagattgtatttctatttggattcttcttttctttttctctgattaatgtgggaatttatagcctccacaatgaatgtggtgcatcctttcaagactgttttaatattataatagatagataagatatattatcgtgatgctacttttgctatcggtttctatgcacctactaagctgtttgtggcctatgaggttgggagatagcgaaagtcttgcctcactatgttgtgggtctcgtatgctatttgggtggtggtaaattcatcgccactactccctccgtcccaaaatataagggactttggagggatgtgatatatattccagtactttgtctaaattcatagaattaggaatccctccaaaatcccctgtattacgggacggagggagtactactaggtgaaaccccgcacattgctgcgggaatttagtatgataacaataaaaaaataacgtgtaagatagctagataacatcagattaagtaaattaatgtggtttatgataatttaaatttaaatagtatgtagaatggtgattcaaacgtaaaaagtaaggtggtatcactttatgaaagaagaaaagtagggagatagtttggactgtagattaatcatctaaaggctaaaaacaatcgatgtgatatgacttaattagagaaaaaaaggagaaagataatttataccatagattaattatttaagcactaagtgaggatgaaccatataagtatataggatatcataaaacataataaggatatacattaaaacattatgtgaattatgttggatgataatttaacatgtttgtatttgaaaagctcttaaattataaaaactataaagatatagtatgtttgcatgatgtttaaatgtgattattgttagtggatgatgacgtggcatcttgttagtggatgatgatgtggtatctttgcatgttaaacttaagaagttagtgggggataactttatagcaagataggattagtatagatcttacgggtggggttaggaacacctcctctcaggcacgtaaatcaaagcacacattaacacgtgattaattaagtattatctaaaataaacttgaaaaatatattaaaatgattttttaaataactttattgtagaaaatttttgcaaataaatgcaccgtttagcggtttgggaagccttgtgaaaaactaggtgacgttgttctctcttttcattgaacagtctacaattgcgctgtttgctattacgaagattttttaagtgtacgttgtggacgaactgagtctgaaactgcatcataacttccagtggtttctgttcgtcattttattttccatcttggacttgcagtcgacctcgcccacttggcatgcacatttgcaaagtcatctttccctcttccttctgaatgaatatgcgactatatgcatacttgtttcttgtcagtgagtgcttgagtgttgaatcgcatatttttcctctgcacgcgatggcaccgaaaatgcgagagaaattacaactccatttctccctaattctaaaagcagttggagtgaagttttccattgtgttagttgactaggctagatgctagagtggtcaagtcgtcagacatgtctgaatcgtccaagtctggaatgccgcagagcgtgttttcgcccaggtcagagtcatgtgcttacgagtacatacttttgctgagttgcggtctctcgaaaaagatttcaagttgacctgtggactgtggtggcaacaatgtcattgcaaatgtgcaactgcatgcgtacgacactaggatcaaatgggtcaccgtacgaggaaaaaaaggagggagatttcgtggaagtgcttatggcatttggtgttctagattttctatcgaaagtccttcaactttagttagcactgattgaaaaggctgtactacctcttaggattagtacatgcatgcaatttctctcgaaccagtggcaatgttccggttaattcaggcgtaatttacgtccgtgtgcccatcaaaatgttgacagtaacatgtataccgcaaaatttgtagggcatttacaaaataaacgggcattaagattttcaaaaaatgacaagcatttaaatgtcataccacataataaggggagaaaagatagatcctgccaacgaaatttgaaagggtggaaatcaactggaaccaaccatttcatcccaattttctgaagcttgcatgcaaactgtaggaacatattgacaattttgacattggttgcttcgtgtagtcgtgttggtaaccatgttatatcaagctgagaactgtagtcaaatcatcctctccttttttgccaaaaagacgctcacacttgtctgcagctgtgtgagctgcgacagagaaaaaatttttcgaggaaagctgtgagcctgtgacagagcaaatgtaatcgacttatctgatgtttctcccgttttcagctgtgatttgcaaattactcttcagcatgctttccccctctgggcctctctgggtcaatttttttaccgttgaccttacgtacattggtcaaatcatggacagtaaccaaaatgataaagacaaattaactcctcaattggccgaaacataaccattttcggtatcctcgaaaaaaagaacatttcatgtgttgggttggtgagacacgttcaatagtaatggaggagttcaacgatcagcggcggcctaagcagggaaacggccaccaacgctttcgtctttggtcgtaaaaggccttcaagtgttgactcgaagagcgtcctacgctcctgctcacatctttttttaacacgtcgttttgaatttgtgcagagtcattatttttaaaactatacatgtataaaatatataaaaaatatttatgacaaaattactaatataattaagcttcagtttcatattttaaatcctaatattttaatatttattaatgatttaaagttatgttcgactatatatatttcaccatccttttaaaaacagaagtactttcaagtttttatgtccttgccccctttagaggtcaatcaccatctcgtaattagttagtactcccttcgtcccgttcactaagatgcgcacctattttacaattcgaactctttaaatattttattataaattaaattttattgatgaaaataatatcgttgattgtcatttaatttttctttcagatgattgtgattttgttactataaatatcgtagtatataaaaaaattaaaattaaagagtagttttaaaaattatgttgagtctaaccgtgccttagctagtgagatggaaggagtactagatcacaaggcctatcgtttggcaaatatttatggaaaatcaatcgaatttgattagcttgtgttttcttctgttcttagatgatttttcaccaatagtatgttttatctcctagctttgtttggtttctcttggtaaacaaaatggatagcggcagccaagaggtacgcaccaacggtccggcgaaaaagaggtacacgcaccaaccttaggacttccagagaaagtttgaagacattaaaacattcaaacttggaaggatgttcatacaagttctggtagctacagcctacaatccttgaaaaatgctggaaaaactagaaagctctacaatgcttggtaggtaatcaaatgtgttcatctgttaggtgttgcatggactcgtgttaaaccgcaccagacaaccctctcatctgcgcctctgttcttcagaaaattgacatggagatgtagcacttgtaaatcacaatggtctacgtgaaagcctccaaaacaatgtatagcacgtcatcactgaatctacgtaccttaattgggtggtcacactataacttccacaaaaacaagagcctcactccggtgctttctacttatagtagaaaataatccgagccgttgatcgtatataatcgtagggttgagatctaattctactaccaccactcatagtggtagtagaaacgtggaggtgtatatttgtccatagataataattcatgtaagggtattatcgtaaattattattcagtaactctaaaccttcgccattctcaagcgcctgaccccatccatcgttgacttcgtcgcttgtccatctccctctccgcctccatcatttccagcgcgatcgacatctcctccccctccagcgaccaagggtggcccttctcctcttcgccaagccgctgaaggtccttgcccacggcggacgactagtcctgccatgtagctttgaccaagacaggagatcgccgggcaattggacggcggacgaaattcaacgggttccggcgaacggcggcgaggtaggaggaatgggcaactgggaatgaacgagtgtagtatggggatgtggtggacggctcggattggccaagaaatgagctatggcagccggcgacgtgcggtggcggagctcgagtgaggcggtggcatttggtcgccgccggcgaccgtacgagcggctaagggacttgggaatgaggtgtttggatgctacatgaatagggactgtgcatgacttcacaagctgccgcggagctaatgcaaatgcttttgcataaacacgacagtagaccagggagtttgcagcaaagagtgaatcaagatgttctaagcccccattagtagacattgtcctatgactgaaaaaaaatcaatttagtggcaattgagggcttagctacccccatatgagcacaagaaaggaatcatgtagcgatgattcagagcgccagaatatgacagaatgcagttagatgtttcgatggtatgaaatataaaacaaatcctgaattacagctctgactgaaatgcaatttacatatgggcaaaactctaatagtgaaaaatctcatttaagcagtttatcagattttttcagtctcactctttcaggagcaaaacaacttgtttactgatccaggagcaggatgacatatttcagttcaaattgcttggattcatctcaccccatcacagttgcacacaaaaaaaatgcacaacacactgacatggtcaacacattgacattactagtagtccatcactattcaccttttcttttttacttaaaccattactgaacaatgaatatattgggacagtcacaagatccaataaacatcagtatctcaaagctcatcaattagtcaatgaagtattcgacacaccatacaactgaatattacaagcagaatgaactgggcaggccttcttgttgtcacggagccacttcgcgatgttgcaatcctcgtggaagtcatgcccgcaggagagcgtgcggacagtcgccggccaccatcctgagctagcagatcgggcatgccacatgcatcgttcagcgtccgatccagtgtcctgacgccgccgcgagcacggatgtgctgaaacctctgagcattgcggtctatcaggttcgccggcgacgccttccacggcaacacgcagcaagcgacactgttgcatattctgcatctcatgccgtgctcgcggtcgaggaggtgctcgccgatgcaagccacaagactcgggcacgcacggagggggaccggggatacggcgctagaatgtatcgcagctgcctcccaagtggccgcagcccacacaatcggagcaacacggaatggagatcactacccgccggcggaatggattgaatcctccaaagtgggcgctgccaagaatctcaggtcttgcgcaggggctccggcggaatcggacgcgcgcggaaggccactcgcagcggacagaaggccacgatggcgaaccaggatgccgacgtggaatactggagaggaggaggaacggatagacaggtgagaggtgggaggaggggacgcctgagggtttcgccgcaccgcgccacggcgtgccgggaggagtagcgataagcaacgtgcgtcgggcgagatgcagtgcttttcgtcggacctgatgcgatcaagccaagaccgaccgagacagagaaaatagatcctgccaaaattgcccctaatatatattaggagattactaatctaccctttaaaatgaacggtcgagattaattttacctgtagtataatactccaagtagaaagcaccggagcattgctccaaaaacaatgatggtgactacagtaccattattgcctagttctgtttctttggacgcaaggtgcttttctttaaagaaacgtatttttgaattaaaaatgtcaatacatgtttttttaaaattacacggtacaacgcagatattcataacgcacgcacgctcacctctataaacacacgcatcaatacatgtcgttgaacagaggtcacattctcggtatctccacgacggcgccttccctgctctgcttagctagcctgatctcgacaccgttgatgaacaaggcgtgtgcctgcgtggcccatatgcgattttgcaactacgagagtatccagcgtggataacttgacacttccgctgtgccgggcggcaactgcaactctgcaagcacgtaactagagctaggccggggcgacgcggccacggctgcgtcgatcgctgcctctaccacagaaccgcatcgatgcggaggtcggtaggtagtaaagatcggtaggtggtagcgagtggcggacatgggcgggtgggggtttgagctggcttggcacgccgcggatccacgcattccaccaaacacacatcccccccaacgggcaacgggtagctgcgctgctagcgaccagcccggccgggacgcgtgcacggcgatgttcacgctttgcgcgcgcgctacacgcccacacgacgcagacgcagcacagcaccaccaagcccttgcctctgctgcgtgccaaattcagcacgatttttttatttaaaatatttaaaaataaattactgtttcgacgttttgcaaaaatatactcctcccgccctaccataggacgtgccatataaatcgtcctatagtagagttatagagcaatctatataacgtggcgcctcgctaaaggagtgtgcaatgacaattttgtagacagccccttcccggagatagtgtgatttatcgctgggagggggaccgtctacaaaattaacacggtgcaaagtttggtgatgcatgggacgtaccatagaaattttgcaggtgacgaccttcgagtgataaagcgtcatttcttaggtcaatttatcctcttgggccgcctgcaaaattattatggcgcaccttccaacttccacaagatgtcacatcatatatattaccttaatgtagagcgatttatatgtccaagccctgcaaaagggcgcgagaagtatatttcaaactttgatatgagaatttattttttaaatcttttaaaaataaatcttttgccaatacttttggtacgtcatccgtgtttgaatcggtttttaagttcaatttctttaggaaatatagatccgtgttagagtcggtttttaattttgtttgtttttagaaatacagaaggagtcgtataaaaaatcttttttaaaaaacttgcatgctaacttgagacgatcggacccctaattgtggctcatgattttgtaaaaagaatatccaagtgaattcttacggtgaattcaccttagctaaaccgtacaacaataataagactaaaatagtattcacccgttgcaacgcacgggtatttttctagtaaacattaaaaaaatcagcccaagcaatgtgccagtgtggccgtttgggtgtccatttgcgagtgtgaagcaccgtactacagcacaggccgacctgggcaaccatcggttttccaaggcccaaaaggagttctttattaggccggtaaagtactaatgggttgtacacaaggccggtccatttaaactaggaataagttcaccggagatccctcaacttaacagcgagattttttaggtcccttaaccacaaaaccagaaatgtctacccctaaacttactcaaaccgttcaccggaggtcccttggcagtatttttgccccgttttgctgacgtggtatcctagtaagcaaaaaaattttaaaaagtatgtggggcccacatgttagttgcacatctttttctcttttcttctccttctcttctcttttcgcttctgtcctctctcttctccttcaggctggcggcgggcgcagccgcgatggccgagcgcaaatgcgggcggccggcgagcgcggcagcagagcggtggcaggctgtgggcggagcggacggcgggcgagcccggcgacggagcggaggctacgggcggagcagccgcgcgccgtgtccgccgtcgtcatcggctctccactgtcgtcgtcgccgtgggcgaggctacacggtgcggccgttcggcggcatcggccaggcgtcgcagtggccgtgcataggtggctcgaagtgccggctgacgatgcaccccagtcgctcgcgctcctcctgtgccgcggcagcggcagtggtggtggcggcagcgtcgccggcctgatcccatggtcctcccggacgcccagctcgtgcagctgtagcaggagcgtgtccacgctcggcgtgccatcggcatcgtgaacggtggtcggcgcgggcgcggtgaccctcgtcgtcttcgccggcgtcgcggtagcacttgacgtcgtagctcatacgcatatacgccgggtacagacggccgcatgtacatgcgtcttcgtacgagcatatatatgcatgcatggagacgaccagctatagcctagctagcttcttgttggtttgccgcccgataacatgcagacgtatatattagccaagcatgtgtatatggctgagcacactcgcatgtatatatgccattacgtgaagcggaggagcgcggatgcggggggtgcagcggaaggcgagcgcggcagaggagcggcggcgggcgagcacggcggtgggcaaagcagcggagggcgagctaggcgaagcggaagacagtggatgggacgaggagctcccccgtgctcggccgccaccaccgccgtgcccccgcgggtggccgacgatgctaggagaggcaccaccggcgggagaaggggaagaggcagaggaagagattgtttcttggtcaccggccgcctccccttccctcctaaactcgctggtcgccgctccgcagccgcgctcgcgctctgctactctgtccgcggcctgctcgcgctctactgctcggcccgccaccgcgcttgcgccttccgctgctatgtgcagttgacatgtgggccccacgtgttttttaaaattttttttgttgactaggatgccacgtcagtaaaaccgggcaaaaatactgccgagggacctccggtgaacggtttgagtgagtttaggggtacacatttctggttttgtgattaagggacctcaaaaaatctcgctgttaagttgtgggacctccggtgaacttattcctttaaactaaaccagggacactgttatatttttgcgaaaagagtccactttaggtctcccttcttgtttactgaatttcaaaaacatccctgaaccacaaaaccagatacaacacatctcctaacttacaaaactaatgtacacgaggtcactcgacagtattgtctctagttgtggttgacgagacgtctgcgtggagttgacgtggcattgagtaaaattaaaatttgcagaattgaaattaaatatatggagacctatatgccagtcaatcaaaaagattaaaagaatatgacccatatgtcagtaggtcctactttctccagctcaccctctctactcctatctcctctcttcattgggatcaagactaaggcagctgttgaatggaggcggagagggaggaggccaacgagcaaggtggaaaaagaggaggtggggaggccgacaagggaggtagggaggccagcgagccggacggagagggaggaggccgccggcctcgcgccttcttccacccaactctctctctctctctctctctcccccccttcctgtgccctagagagcaagggcgctcggtggcgaggttgatgcctaacgcgatgaggttcggtgcggtgatggtggagatcaagcgacatcgcctgggagctcctacgctatcacaacctcctgacgatatgggtacaacgtccatgggatgagaaccaagttaaactagacatgtagctaccatgtcagccgaaaccatcgtccaaactgcttttggaacctttttcattccggttttgagggacgaggaatacgttgtagccggttttgcggttcaaggatattttaagaactcaacaacaagatgagggacataaagtggaccttttccccctatttttgctcctttggactttatcctattttcgctcctttggaacaagggattttcataggaagtttgtagaattgaaaccccatagaaaattttcatattgggccctttgatttgaaggattgggctagaaatttcccatagaaatgcatcatttccttcactttttggtggactttaaagagctcaaaccttatggtcttgatttcctttggaaagtccaataccctatctttcttcatctctcctctcaactctattcttaaataatgtttttcatatgaagtttctgtgtggagtatccaaacggtttatttgacaaattcctgtgttttcaatttgttagagttgtatatgctatgacattcaattcctatattttttttattcatgtatttttcgattactatattctaaatgggtgagagtatgcatagtacacgacatggcactatggcaggtcggtggctgatgcagacatgcaactcccggagtgccggttgctccgctctagaagacgatggctttcttgtgtgatcagtgatcacctttcacccattgattctgtgggggagaggtttttttttttaaaaaaaaaacctttctggaacgtatagcgtgcgtacggagtatagaattaaacgaagtagctcagtgacagtatacatgagtaaatgtaagtctggattttgattcggtttgcactaagacatcattcatctgtaaaaggaaaaaaataggggaagattcaacagaaagattatggcaaaacaacgagtagttcaacacaattcaccactgacaatcatggggaaaaaaaaaggaacaatcctcctactaaagtagtacaaacaaaggagaaattggaagtttcaacagtgtgaaacaaaccaaaacaacacgacgcaccctgttacttgcctacttgggcggggtgggcggtgcgaactgctgcggcggcgcgggcggtgcaaactgctgcggcgatgcggcctccgcgcggccacggttccggccgagcaggtagcaccccagcgcgatgacgagaaccaggaggatcgccgggatcgatatcacgagctcaaacatggatgctgaacaatgaatagccccccgcgcctcctcttcacctcgatccaaccctgcgcttccgcgaccgcgcggtgctagacgaaaccggaaggcgccgacgaacctggagaagacgggcgcgcgaggccctctatggcgagcggtgcaacttcccagcggcagcgatgcggttccccgtcgcgaatggcaagggacgtcgcggcagctggcaacttggcaccgtcgtcacagtggctaaggttgacgctccggaacgaactgtatcaggttagataatctagagaaaatccaacacgccggaagcctctaggaggggggctatagatccagcaacgaaaaggacgcgtaagcaaccacgatttggacgtctttatttaaccaaaactgtttcaggtttctgtcgtcctgattgagcagcgcacgaaggaaaattgacaaatttttaggtccttgagagaggtaccttctggcaagtggcaactgatattgagttgttccaacttttacactagtagatatggtacttcccagtacctcctcaaaaaccatgaaatcacccaaggaaatttgtagttttgtacacttcagatcgcctacagcagagcagagcaatggcttgcagctttgctttatatagtcaatatgaataccggtacaacaattcagtgtatcaaataatgactacggactacctgtatcagtgtatctcattgtgtcaaatgatcgaatccaatctaaaatttagggtagagaattgcaaatacttggcatactaatgcggttttctcggaaaacaatgtgacagcaatcacggacaatactatgggtccaaattacaacaaacatctatttttcacatacacaagtacacaaccaccaaaggcagcatctagagaaggaatagaaaaaggcttctcagtaataaacatacctcatcagttcctctctggttgctcagtttacaactaaataaacaggtgaaattacatgttaaaactggtcaaaatatctcacttgcttactgcaatttcctgccttgcacaagatagttcccaccttgcaaaatggtcttcaggttactgcaaggcatagataaacaacgaaattgtcttacactcggatgaaccagagaagagatatctcatacctcgacagtttccaaagaaacttgtagaagtggaagcttcaatttgaagaaaaaaaaaaggtgattgaaggattcccatgatgggtatatcatactaaaccagcatgtcaaatggagataccgtacttggattggcatactattaaggtatttcctactgtcattatttatgatattgcattttgcttggattcaaattaaatacagattgaaagtatcatactactgaacattggctttacaggaatgttcagggaaaaagggccgggaaactttcagcacattcttaccagccaacaagaaaggtaaatgaatcacggggaagaagattgtacctctgaaagaacccaaggacataccggagaatgtaccatagaaggcaaagcatcaatatatctgttatagtcaagtgattacatactaataactcaaagctcttttcagtttgctgagattagagacaaaccatgtggtttgccaaatagtataagtacagatatttcattcttttgtttcgaataagagatatttcaaacattctttccaagaaatacgaataaagaacatcccaaagctcaactcccacagaatagttgatagtgcaataaagtaaaaagatcactccagattacgaaagaagttttgcaagaaaaacagattaaagaagcagaaaaatcttggttgtaggacaattaaaatagcatacagtttacagaacaaaaggttgctagaaaagaaaatacattgttttgtagtgtcaaaggagagtttccctagcttagttctatgtgctttcaagaatctgttggtgtttcacgttcatttcgcattccatgtcttgctttctttcatgcaaatatgcatgtcatccacacatttcagattttttttaaaaaaaaaacaacaacaactagccaagagcccgtgcattgcaacgaaaaaaaaatagttcctagcttattaagtcaattaagcaaatatttagtccaagtagtatttttatgattttcattgaacaaataggtgatttcaaaatttgggaagagccagcaatgaaacaggagactcattggagggtggattgtgaggcccaaatgtcggtgataggttgtggcagaacgaccaccaccactatgaacattttagctagtatagatacttgtgtggggaaagctcacttatgtaatgcagttagtttatttttagataatagatcaatacccggtctctacatccaacaaggatgtccatgctatgttgttagcggcagtagatattggcccttggttaagaaaaaaaatcaggagaaacgagacttaacttacagaacagttgaccaaaaatccatcaagtacttagctttaaaaccgaatactaatactagtttttgccatacctaatactcctaagagattctacaatcccgaatttgaaaaccaaactaattcctcaaaggggatcctaagattccgaacggcttcaaaagataagatcatacgttcccgataacaagactattcttttttctttcacagacaccacgcggtgaaacggacagatatcagaatccaataatttcacccgcgcgggcttctcagattcagagtcaaaagtaggagataaaactagaccgaacaagcagcagatttgaaggaacaaggaaatcagtacaggggacaagaggaagcaggcagtggaaggatactgaagaggtagcgctcccaccaatcgagcatgtagagaccgacggtgacattgtagatgtggatcttgcgcccaatccagttcatcctccacgaggaacccgacacctgcagatcacctcgctcagatccggagggagggagcggcgccgcggtggggtgtcagattttcagagggggaacagtggcaactggaaggagtagtagatgcgaacgaagagaagggcttatttgtacaattcggatctaaataaggggcatattttaaaattgttggtagtggcccagaaaaataagttcactttagatccttcatcttcacatcgagtttgaattgtatccttaaaccataataatactagataaaacgcatcctttaacttataatacccaagtacctgaggtcgcaaggtagtattgtgcctagtttcgactgacgtggtagctgactccacgtgggacccacatgtcagtggcataatctacttcctcatctttttcttgtctctctccaagcggcctctaaggcatgcggtcgatggggagaagggcggcgagcagtgaccgacgagaaaaagagcggtggccaatagagaggagctaggcagagaggggaaagctcaagttaggacacttgtcctatcctcctaagttaccattgccgctgttgtgaggagctggtggagatggggaagcataggcttgacgaggagagtgggaggtccaggaagcatggtgtcgcctcaccgccgcggcctccaaatccgcacgatgctctgccattgctagcagcattgacgattgagctcaagtgtggccaccctcctcatcgtctatggaggagcgcaaggacttggcagcgtccagggacctccccatcctccgacgtcgataggatccactggacgggaaggagcatcatcgacatccgctaccgccactcccgcctggatctcaggttcttagtaaaggtggcacgacaaatctggcaaatccattgtggccataacacatggaatagtgtcaccctttcatctatcgcctgcaacgatgctgcccttccagtctgatggctggtctgcacagctgcccgctaccatcgcctcgcctcctttctccccgcatcgaccgcaacaaaggcgccccctgccacccaactcttctcccgtcgatcaccgctcttctccccgccggatgccacccggctcctctcccatctaccgcagcccatctccatttccccatcggactgaagacctagagagagatagggaagagagggtagagaggaggaagaaggactaggttactgactcagccaggtttactgcaatcaactcatcatcagctaaaaccaggcatagtactgccaggagatttcggatgtttcggttttagaaattgaggtacgcgttacatttgatactgtggtttataagaatgtataataactcaacctcaacgtgaaagtgaggtacctagaatgaacttattctggcccaaataagaaccggtgcaaaaacgccatcatatgggccgggcaatagcaggtgaatcgatcgatataagctttcatctgggctgttatgggcgggaccgaagcgaactcttcctctagcttcgaactcttgcacggagtaattgatatcctgattctctgcatctttttcagaacatatgacgaattcaaagctcgggcatgacctcatgaatttcatttcacgggttgtaacttgtaagagcaagtataatagtgagctataagattactataaacttatgtggagaagagatgtaccaaaaagttaaaggtgttggctctcatgcaagagctagcttaacacaagctccaagacatatacaattagagcaagtataatagtgggctataagaagtctgaatgctgaggtggatgggagaaaagaggagagagatgagaagcgggctgtaagtttacagccggcttaggcacaataaccaagaaaatttgtgagatagacatgtgcaccatatatttatagtgaagagctaaccattatatgagtgagctgatagataggctataagtaagcagctggctgtattattatccttgctcttaatgtataagtgagagatagaaagatgagaagaaaattgtagtcaaccttataactaatctattagagcaggtacaatagcaagctataaaccagctataaccacatatcgagaaaaaaagagaagaaagagaagaaagcgggctacatatttgtagttagctgcaacatggactccaagacgttatgtgtgatgaaaggtgggaccgggtattaatggtataatatatttttatagttaactattgtataaatgggttattagattagctacagttgttttggagccaataattggctatactattaaacttgatcttatatatgttggctttaagattggctaatagtaggaagtgggctctattattatccttgctctaagcattagtttcacgtaggtaggtgcgtccagttaacttgacagcgtacctgtaaactccacgcaccggcaccgccggggatgttcaggcgctgtccaacttttaggatgtttatctggcatccatacattttcacttatttcaggtggagtctctgtaagtctgtatcgtatcataactctgatgatggttaggtcacacattttcactagttcaaacagagtctctgtaattttaagtctgtatgacatcataactgatgatggttaattaggtcattcattttcactatttcaagtggtctctgtaaatctgtatcatatcataactgatgatggttcagtgcgaccgggccattctacgttcgcgttgaacagttcgtgtggtaaacatctcatcagtaatcacaggaatcaggacacaacatttaaaccaagctcttcctgtgcagtttaaatccgggtcatcactagactactcgaggtcgtcgcagcattgcagcaaccatggcttcgcctctatctgctctagcacctctgatcccgcccgctccgcaggtgccagtgccagtgccactgcttcctcctcctcttcccgtgccggtgccgtcgccgctgaactccggcttgcagaaactgtagtaaatctctcacgcatacccctgtcgatcgttgaaacggggggtttttttttaacaacattcggtagctcgtcttgtttgaagaaaggctacagttttactcgcttatatatgcatctgtttggttgtttgttggttgcaggtcgaggttcttgtgctgcggttggcttgttctcatgctgctgctgctgctgcccaccaaagcgtgagctaggatacctcttctgtagcagcggttgcagccttgcaggactgaagaaggtgacggggctgaggaatcagtcatatatccgctgctgatcgatgcattgacgctgtcgcacctgcaggctatactctgttgcggatatatgatttctgtgtttctaaaccgttaagtcgttaactgtgtgcactgtggtgctccttataattctgttcgtttgagtacctgtgaattgtgatgcatatctgtgaataaaaggagacgtgcttgctagcgtagtgtgaggagtgttcattgactcattgttcaacacttcaactcctaacacaagttcctctttattgcttatttttcacccgtaaataaataaaacgccattatcttggtcttattagaatatctttagcatgctactagctgttgatttttttttgagtaaattgccatttggtccaccttttattacccaaatttcaatttggaccacccttaaacctatctttttaatttggacagggtaaatttaccattgttgcggtttggactaccatgacaacttttctcgtcatgtttaactttcctttcggcaaacatatgaaccatatatagaggagattggccgtatactagagctgatgtgtttaaggtcgttgattgcatgagaaaaaaaatcattcgtggtagtccaaatcgcaacaatggcaaatttatccggtccaaagtaaaaacatatgtttaagggtggtccaaagtgaaacataggtaataaaatgtggcccaaagtgtaattcactctttttttttcaatgaaaaacgcgacttgctaagttagatcgttacctcaagtccacatcccttgcacattttcacatcttgttacactggtgatcaaatatcgaactctgttgacgagtcttgactctttgggccgatctatgagttggacaggatcctgttaaaaatatagttcgccttcgtcacggggaataagtccacttttaaccccccccacccccacccccaccccctacgcaatatgatttgtaccctcaatcacaacatatgatattttacaccccaactattaaaaccaataaaattttattctcaagatagtattcacagctaatatcatttgtttggtccacccagctaaatcagtatgtgaggccaaacatcgcctcttatttgttttgtatgtctcaaataccaattcaaatagtaatttaaaaaaatctaaaaacttgacaacattgatacattactcatctatcatcctgatccacagaccgaggaaaaaaatacagctcggttagtaataatactagaactaaaaaaggcacccttctctagtagtggactatgggcaatcataacccatagtgtctataagcagtgtctatggtgccatgtcaataagacatcacaataaaaactacactctacaacctatggtttcttaaaatggactattaataaatacatcatctctcttctctaccaatcatatttattcttcatttattatgaagacattattctctcccaatgtaaaacttgatagtgtctagtgcataggttctcgtgttgaagctgtgtcttgcatgagacccagtttcttcctctcttcactctctctcttaattaatatagtgccaaataagctaaaagtcctatatggcaatgtagttaaatgctatagacactatcctaggtggaggattgagactgccctaagcgagtagttcatgagctggtttgtttaacttaacaagttaattaaaatactaactcggcttattaattatgactacagatttaagctgatccataccgaactcgaatactcgatacgagcttcgagcttttctattccacttacttccagtactagtcaaataatctgctttagttatcacactatccaatcgatagaaaaaactagagaaaattcaagaaatactattgacaagcgttcaattccaaaaaatatcatttataaatatgtgttacatgaaatgtcatcgtacaaacgattatgttccaaaaatcatcgccgttagggttccgttaacaactctgttaaatgctatatgatgaacaatatatttaacgacgcgggatggacggaaaccttaacagtaatggcatttctgggacaatttgtatgatgacatttctggtatttcttggaatttagcgcttgtcaatgacatttcttgaatttttctccaatactaaacttaattgaaagactttgttcaggagcagtgctaagtaaaagattaagcacttgtctggcttattatcatttcaaaccttaccaatattttggtaacactaagatttggtattgtcaaaattttgataagaggcgtacgtgattgtttggtttggatcaatttttttttaagagcaaggctcttgttcgtttttcttggcaaaacttcagccgtgccaattttttgggtagcaatttaaattccatctaactttgttgacaatgtcattttttaattttggcacggtaagtttggacaccaaacaattgcttctagtacgatgcaattgtcggggtccaactcagtagaagtaggactgcgctaactaattaaagttctgaaccgatcagcctcataattggttgattcacacaatttattattggtccccttaagtatatattcgctgtaattctgcctcccccactggctatgctctgggctgacatggatcagcttgccactagaattttgcagttttgtccttactaactattaatgaatgcgttcccggtttttaaaacggggccactgctaccacacgggagggacgaagcacgtgcatgcttaatttggaaccagtggcactgtggtctgtggatcgttatctgtactacctccatctcaaaatacaacatctcaaaatacaacagtatattccccgtaaaaaaaatacaacaatatatagaataacatgttagaaaattgatagaaaactttaaaacatttaaataatttgtggttcatatttaatttaattgggagtacccgatcctcgatctcatcgtgccctacctaggggagagaagcatcctgactgccgtttgatgatgatgcacaagatggcagtatgatttgatgatagaataacaaaaagaaaagacaaagttacccttttaatccataccgtttgatcacgtatacttgtagtaatatattgtaccataaaaactctcaaatacaaatatataacttagctactaaactggatatatatttatccaaattttcatatagctaaaagttgcgtatcatattctacgacgaggcgagtacgtactatgtacctacattaaagatcgatcagtacagtagagcagtagtagtactccaaagaagtgtacagcttaacatgcaaacggcgagaattgcacgtacatgtgcctacctgcctgcctgcgtgcctgccaagccacgtgaaggccacagccagacgacgctcgctcgatcgatcgatcattcatggtcttgccaacaaaagcgttctccagtactcctatagtgcccgaccattagcttggctagctaggcgcagccgtttgctgttgcagtaattcggcgagctgatcgagcgcgtgtacacgcacagtcacacgcgcgtaagtgcgctactgctagatgcacgtgatatgcccttgattcaacatacgaatgacgaaaaaaaaacatgtagcgtaaattttatatgtagggtaaatctggaagctacagtaaaatatacagataaacacttgttataaaaactaggaaggttagttccaacaaaataagttgaaattaaagtaaggaatttttctttttaattcaattctcattgtttattttttccataaaaagtctcgagaaacttttattgctagtaatttttttaccaacgtgcttagctttctttttaattgatcaaatatacgtatcttatttaaggcttctctgtaatatgtgagactctatggtattttaaagaaaagacctagtcaatataaatcttaaagtaataatttattagaaaaaagtatagattataagaaaagctactgatttttgccgccttagaggcttatacatgaaggttgtggagaaacccatggagctactttgaagaatatgaatttactgaattttgttgatttattattgaccttcatctcttggattgcttaatatgacttgtatgaagacaaatataaaacaaattgaaagaataaaatattattacgttgtaaaatgagctatgttttactataacgaaaggagtagattgattcaatactatcttacgtgttaagtgctccactaaaatagttttatgtgtaaaagcttcaatgctacattgctggttaagcaccccataaaatagttatgtgtaaaaggattgcaaaagttattttcaaagatgaaccttgagtttgaggcaagaggcttggcacataggaggctgcacatttgagtcacatgtgaaaagaatgctcgcaagaaccatttgtgtagtagtgggatgaaaataattatttatacaattaaaaggttggaaaagtgaaaataatggtacttgtgcccatattattgtttgccaacaaccgatagaacttgatagaacttgatagttctttttgttatgtggtataattggctagatattttagaacttactattgtatcgtgtagctgatgtacctactaatatttctctatatgctgcattttctcattgttgattaatgcattccttggtgcatgtgacacaataaatatttcaaaaaaaaaagtctagtcgagtctaaattgattttggattgtgggaaataactcattgtttcatgtagagtgcgtgggacttcaaatagactacgaatataatttcatagataaaaataactctgcaagcataattattattgtaatgtggacttttcatgattgccgtcatgatttaaaaatttttactctaaaatttataattcaaggaatttatatactcgaaacaatcactctttgtaactttcttttagctaacatgcattaggcatttagtattacacttatgtgtaaagtattactttaaattcatagccgtataataaaagggataaaaattttgacagtataaggagtataaatgtataaaatttgacgatctaaaagtacaaacaataatttttgtacaatttttagtgagatatgtgtgtgtatgtgtgttagttggtttacaccatgtgttcacgtagtctgtgcataatcttcaatgcgaagcctgcaatacctaccctattttatcttctttctttgaaacaattaggcatttaaacaatcatggtagtttattatgtccattgctataagatggcataagtacactgaaagtaaaagttttactcatgatgatagtttttaggtttgcaatatatgtggtttatactacatattttaccttataattaattaaacctctgtttatatgcatcgcgccgccctcggtcccggcggtgcacatgtaaaatcgtttgcttgaactaaccagaaaacaaattcactccaagttgtttgttgcttatgtatggcattatatatatctatggcctgtgtttatgagtatgcttaagtatatatatcaatcgttagtttgttctagccaacgaacaatttagcacaatacagtatgaatcgggacatatccatcttcataaagttgaagttgtgttgtatacaatataaagtgtagctcatcaaacaaacctgacaccgtgacagcgatctcctgcaacgttggagatgtcgtagaatttgtttacaccgtgcatcgcatgcacttggtaggtgacgtgggtttgaccgcttgaggctctgattagttagatctttctaatctaacggtgaaggccctggttgttctctttcgataatataaatccggtttcatcaatttaagtgaaaatcaaggatgatatatttttgctttttatcataatttatatgattttctaaaactattaaagtatcatgtgatgtcttagaagcgtatgtagaatgtcatgtgatggttcagaagcatttgtagaaagtttgaaggacttttatataaagtcatgtgtttgtgcaagtatattaccccctattaaatttacaataataatgaacaatgtacatatgtgttcgtagaacacatttgcacagtagatataaagttagcacaattaattttttctgcaattaacaaaataatttatcaggcattggtgtgatcttggtacatctgatcagtctgtcatgaccaatgctaccatctcggccgaccaatgctaccatctcgatcgatcagcagaaagagaggctgtgaatttgccggggttctgtcgatagatcagtcgaggacttctccggctgccatcaattaatatgcctggacgcgccggattaatggaacgtcgatcgacccaacgttcggcatcacataggagaggattttttttttggcataattgtaacacgcatgggaattcaatttgttggaattaatggatgagccttagcccactcaaagattaattctttggaaaatcacagaagcccacctcatgggatggcatgcatgtggagtttagtaccaccttgcttattctaggagagggggacctccttaaaagagaggatgccctcctagccacttgaagcatgtgtggtggaaagaagagggggaacacgcttgctcgcctgccaaggcaggcggcgcgcgtgcatgacgtacgcgtcgaatgatccgcaaaattgactcctcacccttgcgcagatgcagcctccttttgtagttttgttttgctgcaggaaattcggatttgttttgttctggaaacattccgaaaaatccggtgcgtgaaaacggcgtggagtccggataagtttacgcgcgacttacccggtccggttacacggagtggagacttttgcagttttgttttgctgcaggaaattcagatttgttttgttctggaaacattccgaaaaatccggtgcgtgaaaacggcgtggagtccggataagtttacgcgcgacttacccggtccggttacgcggagtggagatcatgcggacgccctgatcaagcgacctatctctataaaaaccaagccgccgccttcacgcaacacaagcgaaatcaatttagggtttgcctcctactctgtattacgccgtcgctcgtagactactccatcctgcttgccggcgtgcaccggcgatcgggagagcaggtctccggaacctctaccttcgacgtcctgcaccgggagaaggtggcaataaggtttttgggaagcgcttcgcgcgactgctccctgttcatccacaacagctcgcctttctctccgctcgcgtgctgcgcgccttcgtcgacgcccgcaaccgcgagtagttcctgccgagcaaccagtctttccgctacctcggtacgtgttcgtcatgttgcgcatatttgatctgttcatattttactgcttagtttacatgtgtagatctaatgatgtgtttatgctagtttacatctgcaatgtcataatttatttatgaaataaattaaattattatgtgctaaataattcaacaggttcacgaaccagcttgggtattctgacaaatccactcatatttcattgcttacttcaactacccggtacccttttctttacagtgtgcctctcaaaattaagaagcattcttctttgataaaggttatgagtatggcagtgttgaatatatcttctcaatggtcaattatattacatgacctaagttagtcggttgagtgggatgatttgttttaccaactagctaagatgaccctctcagataaaaatgactgctttaattatttggttgctagaaaaagctaatttttggtcaaatccatttacagggcaataatgaatttcaatgtaaaaatccgcaagagaattttaggagttaaaagtatcattaaaaatagaagtctttacatgaatcttttatatataaaaaaaagtaatcctaaataaacatggtaaagagaaaagagggaagggggcaagcaaatgtgttttttaatgcacaagagatcatttaacacattttcttagactgtcatgttgttgcgtgttttgcttcgcggtgtatcttttttccttttagtgcaaaagaaattttgggtggtggtatattttttctttttttctgattatggtcttacagggttgtaattttgcttcttttttttttttttatcaatagaacttcgcatcgtatcaggcgagtcattccaaaaaaaaaaaaaaaacaaatgctcccaggctccctgctttgcctggtcgatcggccgggagactgcctgtgttttcctcgtccttcctcctctagctgtaagcctgtaacctcgctgtaaagaggagcctgtgttcttcatcagagtctggaccgtgaagccattatccactctgaacagttagcccttcaattctactcccaatatttactgatgggatggtccagaaaataaactcccgcactgcgcgcaataacttttcaatggagttgcaaaagtctgctgcaacttaattttgcaacagtagttgcaatttacagctagctcgttgcgatgacagtgcttagacttgaagcataaatgtccaaaagaatttcaatcgagatgatggatcattggaccccctatatattacactggacctgtagatacataatgagcatatagggaagtaagtaaagtggccgccccccctatatgcgttttcgctctgcctaaatgcatcagactacattcagctagtcaggattccctgaacgggttgcatgtgcatgtttcttctcttcttcctttgctcggaagtctgtctatgtcatcttgatgaaccctagctagtgtataacaagcaagcagggttgtgtcgccgacatgcataaagcttttttggacatgcgggcctgcaggccgcagtaagaacgagccggcatggtctcatataaaatctgaactaaccttttgagataagaaatctgaagtagctagcacgaacggtcttcacttctgctaaacaaacaccggaagagatcaactaacagagacggcattattagtttaagtgattccaagtgttctccggatcaatcatattaatttagcccttcttgatgcatgtcctgcgtaattagcacatcacattcagctttctgctttctatacacccagttaggtcgaatcacacaacatgcagctaccaggatatatattataccaacacaaaataatcagatgatcagatggggcctacaagatacctatatataacagcaaagcggtagtgcactcaagtgtgagcaaagccatgctgtagtgggatctctctccatccattcctgcagtgccgccactgctatagctgcgagagctatagctagaaaaatatcaacgtagaaagtgggaggagaagtagatgatggatacagatcacactgagataattaagaagggagaggcagtagtggaagccatggctctactccagtctcggttcaggaggatatgcgtcttctgcgggagcagccagggcaagaagaagagctaccaggacgcagccgttgagcttggcaaggagctggtacgttctactatatttctcaattctcatatatgtaatcgtcttgacaaagcagctgcttcatttttcaaccttgatcatgacatcctttctgagatcttgcttctttaattttctctcgttaatcaaaaacaccatggccatggagctttttactgatattcagcacaacgcgcctggtgatatgtaggtatatagagagtacctgacaaggttttgggtttcttttcaacgtcgtaatcttggagtaatataattatcaagctgtgtagacgtacacttgctgaacaagggctaaaatttatctctctatatatttaagtgacaatatatgcgacattactgctagctgtagacgtactcttgcagtgcatgcagcttgttcttagtagaagatgagagcatatgcatgagctgagcacagcatgtgtaggtctgaattgaatttctgtatcatgcagtaaaacccacttgtattacaaaggagaatgtcatgagggcttgcacatgagcttattaattacttcacatgaaagacaatatgtctgccggtgaacatggaattctatatttatgcagcttgcatagttccatagaaaatgacttactccccaggaacctagtactggattaggttatgatcttgtataaggctgctatattttgaaacggagggagtactagccagcaagttactacgcgcatttgcatttgtatggtgacttttcgccgggattttcggtgctcagcgcatttttctctatccatttcgaggcacggtataaatgcaaaaatgaaatagacaagtcgcatggatcagtcttaaggaaactatatatagtgtgtactgtatgtagtagctagactacatattctagatcacttgatgatatatattatagaagactagattctagaatgtggaaatgcatccccactctccattattatggtttcaccacaggtagcaaggaacattgatctagtgtatggtggaggaagtgtggggctcatgggcctggtctctcaagctgtctacaatggagggaggcatgttattgggtatgtaaaaacgtaataattgttgatcattcttcagcactgatacatggaaagaataactccgtatatagtacactttgtaagatgtcatcttgtcatgacaatagacttggattatggttcctttcctcaggtgctacatgctagtactaatatataatttgccattttgttgtccctatatacacgcagggtgattcccaagactcttatgcctagagaggtaagcacgctcatctcccttccaacaagtcctgacatagtttattcacatgcaacgattcccatgagcttgacatcattgttgctgatcaccggttaaaatctcatcattttcattggaaatgtcacttgaaaaaaaatctagttaatacttattgatcaagcatgttaagtattttgtaagcatgatagtatcactagatgagattgctttttagaaaaaagtcagtagcactgatctaaaattatatcacttataggtattagaaaaacatatatatatggtatgtggatacatactactactggaaaattatgcttgttcattatctttcttgaatcttgatagtggaaagaagaatgcgatcttatctgcttacaaaagatcgcatggaacgttcaaagaaaatcttgtttttcctttccctcgtagatgaaatcctgctgatcttgactgccgcttctagtggctgcccctttgttcttaaggccttgatcctttaagcagatgctgactttattaatcagaaagaaatgtccctcacattttctttttgtcccccaacaacagcaacatgattgcctctcctgaacctttgctgcgttgctctgattaaactatacatgctaccactcctgttaaacagtgctcatccccttgctcgttggctagtttttgcatgctctcttactttttgtggagcagaaagctgcagggtgctcctgtgtctgtgcgagaggctttgtcacatacgcatgcgtgtttgcttgtgtgtgcagattacgggtgagacagtaggggaggtgaaagcagtggcagatatgcatcagaggaaggctgagatggccaggcaatctgatgcgttcatagcactgcctggttagtctctctcaccacctggatatattttttttaagataatgaaaccacctgaatatatagcttcatcaacttgtgttgagtcgacatgtactaatttgctttacttttgttgtcaattgccttgtcatattttttcctttatcatgttatgatacgtggctagtggaagtgtgagtggaaagttgcgtaaaagcaagcacaagcagggtgcatgagtttgactttgacctgctaaattggcttgcatgcatgctgctgccgcccagtcggtgcagaatccttctttatacgcatgagctggtcgatcagattgtcagatactcggataagagaggacctgttgagccacttcgtgctgatattttcagtatcgttcgtagcttatctttttcagttatttgattctttttcctaatcatcagccaactgaatttgtgattcgcccatcagtcttaaaaaaaaattgtgatacgccttgttagcaaggaccaaatttggcccatccccgaggatgggctgggaattttaactagattcaggaccatcctagtgaaatgggctagtattttttctgccttctcaaatcaaacctgacacaacttcatactactatggatttatgaggttcaaactcagcctagaaatattctgaagataatgcaaacatccgacaattatacccaggcagatgctgtatccgcagattccctcaatcaatactcgtatttctggaggagagagagatccagagcgagcactgttcattacttaaatttgtttactgcaggtgggtatggaacacttgaagagctcctggaagtaattgcctgggctcagctcggcattcacgacaagccggtacatactgaaatagttcatgatcagcttttgcacatgcaacatatgtacacgcactgatgaacaatgcacgtatatacacggagagccaaaacttttttttaccttggcttaatgtggacgatcgatgctacgtacaggttggcctgctaaatgtggacggctactacaactctctgctgtcgttcatcgataaagctgtggaggaagagttcatcagcccctctgcgcgccatatcatcgtgttagctccaacaccaaaagaacttctcgagaagctagaggtgtatatacttatatatataatctatcgatttttctgatgcatcatggcacactgcaaaggacagaagaaaacgccggtttcatcggtgaatgagagatcgagctgaactttcctcttgctcgcatgcaggcgtactcccctcggcatgacaaggtcgtgccgaagatgcagtgggagatggagaagatgagctactgcaagagctgcgagatccctggcctgaaagaaggcaacaaggcgaccatccaagcacagcgaggaagcatgctctgaaatttactgtagcactagctagctatagcttagccaatgcgtgcagcaagaagattcaaaacttcttggtgcacatgaactgcaacttttaattcatgtaactcggttcattagaaggcaattgatcactgatcatgcaattagtcgtgtacgtagccctaagaatgaaatcatcagtaagatttgtaaatcacagagctccagagcagcagactgacataaaacgatatgtgggctagatcgatctcctccgtgggctgggccggatttaacattgggccaggttcagcaaaacataccacagttcgacagttcgtgtgaacaaagaaaagagcatgaactattcgtatgcatgtactacgtaccagatgaagaatttttttcgtttttagatttttttaatatttacagaaataatctatcgaccaaaaaaattgcagaaatagtccctgccgccctaatggtgggcggcaagctgacgtggcagacggtgggtcgaccgcgccgtctgccgccgtcggccaaaattgcaattaggcccttgccgcccatacagaaggcggcaaggggctaattgcaattttggccgaccataaagagtttg

SEQ ID NO: 16796 - DNA, 5754 bp, Oryza sativa
ccagatgaaaaaagtacggccaaaagatttttctatgttatgttaataataaataaagaagtatttattggtaaaacttgttaatattgttataaaaatgtattgaagttggttgttgcgcaatttcatatgttaagtgaggtattattttgtaccttattcgacgtattagtactcggataatttatataggcctatcacagtctgggccgtagaaacattatatggacttaaacaaggagaattatgtaacatgaagaaatagtagtacaatttgaacatgatacgactattttcattgcggttacatagatgatattagattcgaactaggagggaggtagtgcaatagttgaacacaacgacgatgtagtaatgggacaaggaagcatgatagtagaaatttcaataagccaagttgtccgataatagctaactcctacgtgaggatccctctcctctctcaaaccgcgctttagtaaccctttattgctctggtagttcaagctgcacaacacggctaggtggagttagaacccttctggtgtatatccattctctgtattgacatctccttggtggttcctgggaggaaagaatagatgtaaagcaagcaaagttagtaaatattgtgagaaaataaggattcatgtaatcaaaatattcttaccatgaaatcgtcgtcaagaatatttggacaaacaaagaaccttcgacccaatgttgtaggatttatggagcgaagaacctgacaacgatcaccacacctgcatcttggacgggcttcccatggagggagtgccgtagttagcacccgccagtcgctctgttgttcacgacattgtcgttcataagccgcttttctctgtaagtattgctcagtactttcggatgcgaaataccagcgaccttcttgtaaacaagtggttaggtcgagaacgggattttctgtatcgacccactcgatgtatgcgcaagccgtagtgcgggtctgccgaatagagtagtgttacgaagaataaaacgattgcccatacggaatgaataagcatatgcagataataaaatacctcacggtcatagttagggcacctaaaaaagcgccttcctcgaatatcaggattcctcgaagccattagttggcatcgatcaccgcataggcagagaggacgctggcaccaaggtggtagtaggtatacacaaggatcgctatgccagtttggatcctcaacaccccggcgtctagccattgacgaaagccggtcggatttgtaatgaagcaagaggggaagagagtactgattgtgactgagttctgaaagattgtgaggcctcactcgttaaggaaacttatataggcgcaaaaaatcgagtgatacccctgacatgtgaacgtggtggggtatggtgggtacgcctgattggcgccgaaagatacatgcatgatcggcgccgaaagttacattggtcgtatgcgccaaatggcgggcaaatactcgtatcacacgcgaataaaggaggctgcatcggtgcggcagaaagtagtcgtgcatgcgccgaaaggtatcgtgcatgcgccgaaaggtatcgtgcacatataacaacaacgtagtcattacacaagcatacagtactggaaagtgaagcaagtaaacaaagagaagattgctctactggccctgccccgcgccgcgaccacgcttggtcctccgggcctgtgctcgcacgtggtcctgggagtaggtgaaacgatccggtggcatagcacgggtagcacgagtgtcccgcggaggagtggcctgcgcctggtcctgcgtctgcaccggcggtgcgcctcccagctgtgaggggccaatgacgtcctctgtcgagcctgaagcgaagtcgaagtcagtgatgtcaaagagcaaggtggaaggcagcaagcggttcgacgaggtcctagcatagtccagtggtggaccctgactcgacgtgccggctgcctgtgacgaagtcccggtgtactgccagaactgcgctgagtgcgaggtcgacacagctacctgagacgctgaccctgcagcctgggagaagtgggcggcctgcgtcatagcgaactgggcgaaacctacacatcgacaaatgggacctttgtaagctaagacataaaatgtatgtaaattgattgtcgaagtaatgttgtttttttaagtacctgtggggggcacaacagaaggcctagccgaggaaggcggggtgctgaacggtgtacgaaaccctgaagcaatcggcaagtgaaacggctcacttatatgtgcgaggcatgtacagaaatagtaataaaaatacttacctccgtgtggagggggagtcggcctaggaacgtgcgcagctggacggggaccagtcggtatggttggccgctgtacagctgcgtctgctcgagcaacgtcgtctgcacgacaggtgagcactcggagaatcgagcgcatcgactccaccatccgcgtgtacgtcgtcaggtgctcctctacgggtaccggaatccccgcgcctaaacgttggatcgtcgttgaaccgtcaacgacgacccggttgatgtcgtcgacctgcatggttaatttattcgtaaatattcgtaaaatttgacgaagagaaagacatgaaaacataaaggaatggtgcgatgcagggtactcacagcacgagcgaagtcctggtcgcggtgcctggcatagaggtctctagtgctcgcaacgtggggctgctgctccaagggagcgaaggtgaccctagtacaggtgcgtggctagtaccagcgtaggtaggcctggtacgactcctcagtgtgtggctctccctcgtggtccacgacctcctcggttgcgagcaaccagtcctcaacaaaagtcgccaacttggcgggccagtcgccagctgagtgctgacccttgcgcgagtacctgcgaattaatgtgtaatattagtgtgaaacgacagatgttacaaattattgtgaacaggcatattttaatgcaacaacggaaagcgtagtgcaagatcttaccggtgaacagcagctgggatggtggtcggaaacggtactggaaagggctgacggaagccgaactgccgcatcacgcggaaaggggcgtgaggctcaacgcagatgtcgaagaccatcggaaccgtagtcatccagtacacctggtccctggtgcagagtgtggacagacccaacggcgcacgagcctgggtagccgctgcactgtagggctcccacacgatgtcagtcggcagaaggcggtcgaactccataacaaactcaggatacgaccgcctaacctggacgtgagcccatcggcgctgcaatacgagacgatcgatgtgatgtacaatgaacttagcaattagcttaacaatacgataagatcgatgcaacgtacctgacgacggcaccacagagtacccatcgtagggtaatcgacctctggtcgctcctcgtaggtgtgcccatgtaggacaatgcttgtaggtgtgcccatgttcatcgcatttgctgcaacgcttcaccctgccagcctccgactcgtccatatcgttgcggatgcgacgagtcctcctccttccagccttgcctcggagcttcgatgggtcaggaatattgagtacttcatcgttagtctctgtgaactccccagctatgccgaacccataaatctcgccgctccatgtatgatatattgcttgcttactgaagtactgtgacacatatactgcatctggtatgccacactccgctgcggcagcaatgacatgggtgcatggcctgtggagcagcttcggctttgcacaagagcaatgacatgtgccgtcggctttgagaacacactcctgcttcactctcttgcggtagatacccctgcctgccttattttgacatagtatctcaaacctgtgctgttgggtaccttgcactacagctcgatgtttcatggcctttttacgcaactcctctagctttttctgcatgaaagctccaaacaaaatgctgttgttcagcatagagggaagaactgcctggaaccgatccctaaaatacctgcatgtcccatgtaaaatgaactccactatgccaactagtggcagtccacggacaccgcgcatcacccagttgtaaacttctgccaaatttgttgtcataattccatatctagcaccacctgtgtcatacgccttggcccatttctcttttggttcatgcagaatccactgagaaaatttccgaatctccaatccagtttttctaaccaatgttggactatccgttgggagaggtccaagagcttgaggagggtcagcaacggcggtcgatggagccgctgcacgctgatcactgcatttggctgtcaactcatctaatctcttccaaagctcattgaattttttctcctggttctgattgcacagcctcttgaacatgttcatgagctctttgttcttgaattgcttgaagaaattagctcccatatgacgcatgcaccacctactctgtacatcttcccaaacaccggggtatcctcgttccatactcccaaattgcaactcttctatcgctcgcagaatgccagcgtacctatcatgtatcaggcacacatttggcctcataccaacaacttttgttttaaccaatttcaggaaccagtaccagctgtcggtattctcactctcaacaaaagcaaatgccaagggcaatacctgattgttcccatctacccctattgctgttagtatctggccccgatactttcctgtcaagaatgtcccatcaatgcagagaacagaacgacagttcacgaatgccatcttgcatgcatgtagagctaagaacgccctttgtagcacactcttgctaggatgttcaattgaggggaatttcttcacttcgtaagagctcccatggtttctttcctcgataacaccaagcaggcgtggcaaattgtcatacgaggcttcgtaagttccaaatctcatctctattattttctgtttggccctccaggccttggcatagctaatagtatacttgtatgtctcttcgatgtgtcggattattgaccttggttcatatgtgagattatcgatgacatgcgcatacatctcagatgcaacaaatgcacaagtaatgttcctgtggtatttctgaacaccaggtagaaaacatgtatgcttggtaacgactgacactgtccaataatccttccatttccccttatacgcgtgcactctccagggacaaccatctttttccttaacacaccgaacttcatattgcgaccggttcgacttggcaacccaaaactctctatgaagtgacactgcaaaatgttttaccgcctccttcatatcttctgctctactataaatcgctccccgaataacctcattttctttgtactcccatctcacactatcctcttcagagacgatcagcccagaaaaatcctcactagcccattctgctggattaatatccgtctcatcatctgacgaatcaccttcctctacacgctcgttatcagaatcctccctctccatttcatccacaatggcaccgacagtctccccctcgtcggacactccacctggttgattgccaactggagctactacgcccccgtcctctcgtgcgttgacctcctccacagaagtctcgtttaccttagcacttggtccctcgccatcatccatgttcatctgcacacctggatc

SEQ ID NO: 16797 - DNA, 2480 bp, Oryza sativa
cctgtcgccgctttggccgcgaccgccgagcgctagccctctcctttgaccgccctaagtcggttcccaaaccgacattgccatcctataaacccgagctccccccctttttcctttcctctcccattcacctccgcgccattgccgcccctctgtttcgccatcgccgttcgtcgttgcgcgtgtcggaggagccggcacgagcaaggacgcagaaggggacttcggccacgccctctccttcctcttccccggcccgaggccggagagattactcccgcgccgtcggcctctcgtcacagcgccccgacccgcacggtagtgcctctctccgttcttcctcctcgctccatctccccccccttagttttcggtggtagcacgagtagcctccccgtagctagccggcgccgccccgaccgttgccgtcgctcgccgtgtgctcgtcgccgtcgccgctcgagctccgtagcacccgctcgtcgccagcctcgctcggcgtagctccgcccaatccgacgctaacatcggattcccgtagccgcgtagatgctctcaccgccgggaatcggcccctcgtgaccttgtcgccgtttccctcttccctccccgccggttgccgccgccgcgattcgccgccgtcaagcttcctccggcgaatccgagccgttggctcgtctcccctcgtctcgtgcaaccacccggtgtgctcgttttcgccggtatcgccgtggttcgctccgccgctcgccgctgttgtccgccgtccgttccggccggcgtcgtcgtctacctcccgccagcccacgtggcagccacgtaggcgccacgtcggtgccagctcagccgaggtcgggacgggccgaccccggtcagcccctcccgtgcgcgcgttccaccgcgagccgtgaggctgcgcgtgggcccgccgcatccgttcctccgcagaccgtgcgcgtgcaccgcgtccctcccccgcccgcgcgcgtgcgccgcgtactccctccgcacggtgagccgagccgctgacaagcgggtcccacccgggaccgcgcgcggtgagcccggtccaccggctctctctcctccctcccgcgcgcgcgaccgtcttgggccggccggcccatttagctcggccggaccgccccaattctcttgggctgcgccctagccgcccgagaaaagtctattttccctccctcttttcttttcttttcttttcttttcttttccaaaaaggatttaattaaatccttttcctttagaccaaaaatccaataatcttagaaatccaataccttcccaaccgtaaatccgtttgactccgttcaacttccaaaattcctcaagtctcgagatctatctaatggcacgcttagaggtcattaatagggctttattttcgccgtttgttgagttgttccgtttcgcgtgtagtttcggagccggaagacccgcagtgcgaggatttcgaggatcaagctccagatctcgagcaaggcaagccacctttgaacatcttgagcctatatttgaaatttaattatgttgcttgaaaaatattatgcactgataggatcgcacttaatctgttgtcccgtctgcaaggcagtttggcggacatacctaatttgttgcattgatcctccctttgttaattgttatatcatgtccccttgtaaccatctagatgcgtctcgatattcgtgcaccctgtgcgagtatcgacggacgccttcaaacttaaaatctgaaaaacaacttgggtaaaacttgggttttacaaaagacttggaaaccccgacacctgggtcggtgcttgcgaactaaatgaatttccaaaaccacggaccggggaacgtaccgggtgtacggtttcccgctctcgcacttaaggaccgattccttggaatttcatccaaacataagtcaagtacgaccacatgggtggaatgggacacccctggctgagtaactagcttatcaggggagccttgatgccgagagacatgtggatttgccggggtggtgtcggggaggacccctgggcttcctggcacagtatggtctgggacctaacctgttgttggtctgggacccctctcgtcggcatatggtaaacctgtgtcggctttggaaatgccttgtcatgaaagcttggaggtctcccgacgtggctgatccccacgggctgggtgatccgggttagtaatgtcgtgtgggtaaagtgtaccccctctgcagaggttaacaaactgttcgaacagccgtgcccacggtcacgggcggatgtgaggtgattcctagcgtagttttgtttgactactgcttgtgaaattgctgttgtggaaaggggttcgatgtttgaaaaatcagcagctgacgggatcagctaggcccgggtggccgtctgaaagttgttggcccgggtggccgtttgaaagttgttggccgggtgccaatcttgatcaattctaaag

SEQ ID NO: 16798 - DNA, 7332 bp, Oryza sativa
aattctaaagactgatacattgcacaaactctgaccggacgagacgcactgtctcaaccgtgtcgtttgagaagcactcacttagttgctttcagaaaagagttcaaataaaatcaattgcaaaaacaacagcctttccttgaagcctgcattaaacacttaattcccatggcttgctgagtactcccgtactcacccttgctctatataaatatccccccccctcagttgctgaagaagatgaagcggatcctgttgatgaggagttcttccaggagcaagccagctacgatgagttttagggtttcggcctagttcccaagtcgcgcctgtgttgattggtccaagtcctggcttccgttttccttttgtaatgcagttgtgagcttgggatctgtccgcagcccaacatgactgtacctctactctataataaagagacctctgttgctgtgatattctgtcttcctgtgataccagcactatttcctgggactggtatcgattaacaggttaatttggagcgtcacgggctagttccggtcggaactagttcggggcgtgacagactccctcagtggttttgaaggacagtttttgctaatgtggcgatgttgtcctagtcttagtcccacgtgacgcttacgtggtattagaatttaaaaaaatatctatacgacccatctgtaattcacacataaaaaatattgtgggccccactgaccatgtgggccccacatatcatcctctctctatcttcttcctcatccctctctctcccttctctctctttatctcccctttctcttcaccttctctctcgtggcgcaatcggcgggcaggggcggtgacagcggcagatgatggccggagcggtggggagggcgggcgctgcagttgcggacctgtaggccagagtagcgggagagggggaaggtgatgtggccccgccaggctacttccctctcgccatcgacctcgcccttgccgcctcctcctcatcctcctcctcccggtacgaactctgcgctcgcgccgaggggtggactttttggtggtgagaggggacacagagagtgggtcatggtggcactacaagaatcctgttaatccgtgatgaaaaatatctgtcacggatcactagaaaaccatcaccaaacagcatctgtgatggtttaagaaatcatcacggattgagcgtcatggattgacatgcgtgatgatttgtcgaaaaccatcacagagtaccagaatcggtgacggttttaaaccgtcacgatattgcccaagacctagttagtccagcccaagcacatttcctgtgacgaaaaataaccgtcacggatgaattgccacatcatcatagatgcttgcatggttgcttacatggatgatgacatggacactacctcagcccatttgttaacaggccagaatcaaagatgggccaattttggcccaatttcagccattttcgcagcaatttttcagccttttttgcaagcccatttcagcatactgcagcccaaattcgtcactaatttttagcccactcttcagcccactactgcagcacatatagcccatatacacagcccattatcaaacattcagcccacatacacagcccacaaggaattattgtagcagcacattaaataaaaaaaaaccttatgtttccatccaacaacatatcacatgaattttcatccagcatcacattacacaagtcttcatccaacaacagttaccatacaaaagtgcacacagctaataacacagactcaggaaatgcatacaagtccagcagcttgattcatgcagcatgcagtagcagcaaaatgcaagtagcagcaacaaaatatataccaccatgtatgacttaacttggtcgaaattgacttgacacaagttagcagcagcaaaatgcatgtagttagaggcaaaagatatgcaccatgcatgtcttaacttggtcgaatttgactgagcaaaagattaagttttgcttccatctcagattgactcctcttcatctcctctcggtctttaatccttgcctgctcagattcttgcactttgtttgacaaatcagccacctgtgcacgaagctcagcattggtccttttctccgcttctagttctgtctcagtgctctgctcactgaatctaggctgggcattatggaaccccacattcttcaagaaccgattcttcttggtgttctcagcaagcacatcagcaacaacttgagccgctgacttaagttcttcaccttctgttgttgtagatagcttgttttccatccgagtctagcaagaaagtagcaaacatggttgatgttgagagaattaaaaataagcactacaaagatcaaagtctgaaaattatcttacaatagcctcctgtacaacaggggtgtagcattttttttcttgctgtagtggaactccttgaacaaatcaaatgcattaggttcttcatcattgtatttgtcatcctgagaacaacatatatgcattaggtctagcatgaattaagatgttacgaaaatctgggcagctactgttcaattgagaatctaaaagaacatgttcaactaatttctagcctcatttgttgcacacagtcacactatgttttccacttagacaaacaactgcaacagaggtctttcactgcatacacagacataaaaacaataacttttaatctattaacacactcaacttagacatagatggaaacctaactcatcacctttcacacaatgtattggcatcggatcagatatagtgtccttgaacattccacaaactaatggactctcatgaacataacaacatgagcatggacatcatcttgtttaggctgaggcagacgtatttaagcagtagcttgttcatacaaaaaattatatggtgcttaaaatggcccacttaccaaattttcaacatgaaccatgtaggcacgagatccggttgtgtgatggtacttaacattccctcggttttctttgttcttttgacacatctcctacattaaagacaacaatacatgtaaggttggtgatagattagcatgcacaaggcatcaatctggttttgcagagagaacataccatcttttggggactcttccatgattctaggagttgagtccactgttcattactcatgaatttgacaggagaagtttttgtaaccaaatgtagtggaaaaggatcaaaatatttttgcttcagcctgtatctttgttggcgaactgcggacttcatcatctcagtacaagccattttaactgtatcatcctctatgtttatgtcaaacttggcctaatcgaatggaagaacatttatagaaaagaatatcaattcagtaatttatggcttaaaataacaaacaatggatcttctattgagactaaatgtggaaaggaccagagaatgcatgtacctttagttttcctaagaacagattaacgtacgcagatgcaggtttttccttgtatagcttccaatgcgggagtataggcacatggttcctaactatgatgttgcattcagttgcaaactttgcagcaacaagaggaaccactggccttatattcccttcagttatgacaacttgcagcttgccacggcacgctcggtttaacctttggagacaacgtcccatattatttccccggtcccttctctccactccccctagttgtaaatgtacattgcagttgaaattaaaactaaaattattgaggtgaagcaaacattgatccaagatgatcatgaattgaaagctttgcatacaaatattgatcaactgagacaatatgaaatatggaaaatagatgaacaaactcaccttcgttggtaatctggttgtggtcaccgtgttgagtaatgccatcaactacatcagccacaagggtgttgtcatcatgctgggtgaagccatctaaaaaagggcagcaagtaagaaaagcattcatcatacaaacaaaacttacataacgacagtaagaattcatcacctccattgtccatatggttgtgctgattatgttggtcgatagcatcatacccggtggtcatgtgagtgttgtcaagtaaaaatgtgaaaattggtttcattaattttttttattcttaaaactcaagttaatattttcaaaaggtaaacaagcaataaacttagatcagcaagttaaacatttttatagctgactcatgttaatggaatgtaaccaagaaatgtggcagtagaactggccttcaacagcagcctgtgtgtggtcatctaagttgccatcgagatctccagcgttagcttgtgatgtagctggcatacaaatatcacttggtatgagacttgcatcttgttgggcaatgcttttctttaaccttgtaactttaggagtcatttgctctgcataaactctcttgcgagaccgaaacttgactccaccagtctggatgcttgaagttttgttgttacagttcttgcgagtcttctccttagagcactgctggaaagaaaagcatggattggtcaacatagtattacattgaattaggaagaaaaataacaagttaagacttgtcaacataaaggaattacaacctttgcattctcatcatcaatctaagggtggcggctggaagatgggttttggaggatgggtggcggctaggtttttggaggaattgggaagtgctgtttcataattaccgatgtacccttgagaaattttctgatggaagtgttctctatattttatattttatgaacctaagggtagtaaggtaattcggactgtgaaatatttcgggctggcgcacatcaagcgcgccaagccgcttgggcgcgcgggatttccccttatcctgaaaactcaaagcccctgttttgtttggaaccttctagatgagtatatattataataagtcttatatttgagatttgctactatgtaaaatttgttccccttgaatgattgaatctgtctcattccttcatactccattaattttttttgttggaattagaaaatcaggttagacaagcaccatatatgatacacatagttcatcatgttatgatcccttatgttgatgattattatcttaaaaaaatgttgataatgattaataaaactatataggtgttgataatttcccaattagtgcttctagctagtaagtggtataaaacaatgcatgaagcaaatttgttcccttgaatctatcttattccatcggtattagtcatattccactaatctaaatttaggaattaggaattttggccaaacaagccccatgatcccattactttttcgcgaacacgcaaaaggattgcacttcaatatgtacagagtttatgttacacaacatgatcagccgggaggagacagcacaccgtactaaacctacggagcgaacgcacagagtcaatgttgctttctctctctagtgctgaggagagagatgcgaattttttttttgatatttttttcgagtctcggagcacactgcaaccaaccatagaaattcttagctcaaacggacaaaagatgaagcatgaggaattttttcaaagttctatccaaggggttccggagcttctcgcctagaaaacataattttgtaagcggaatttggtagttctaatttcactgaacccggcaaagcggggagaatcggatgtaactttttctgtagatgtctgtggatatattatatgtctaatttcgagtccgtatgaaaaagatatgattgttttaaagaaggtcagtcgaatcaggcactaaaagcactaaaaacaataggtcactcgcccaacgccaaacaaggcgatccccgatgtccggcgagagctgtatgtgaagcaccgcacatggtttatcatgtcatgtggtgctgtacatatcctaggtgagtggtgcatcacgattatatttttaaaaacatttttaggctcaactagtacccatcacaaagtgtctactattataaaaattgaagatgtttttgctggtactttggtatgtcatccgtatatgagtcgtttttaagtttgttcggttttgaaaatacaaatccgtatttgagtcggtttataagtttgtttgcttttggaaatacaaaaggaaccgtataggaaatctctataaaaaactcgcacactaagtaagttgagacgatcggattccttcacccgttgcaacgcacgggtattttttctagttaataaaaaaataaaggctcaactagtagagactaaatctgtagtttcattgacacaggcaagttgaaatgccatttaggccaacaaagaatcaaaacttgaaaaacggatatgaatagtttggcatcgaaccaattatacataaattccatagatgaacatgatctcaaatacaaattgaggctatctgaaataatagaacatatggtctcaaataagtagaacatggtctcaaatactaattgagccttacgacaaaatattaaaacataaaattcaaacagaactattcgtcgtcactatcgacctccataactgagtcgtcttcttcgttaaaatactccataagtgtgtcatcttcttcatcttcatcttcatcaccaatgacattcacttctttgctagattctttcatcaaccgagcaatttcagcagcttcaaaaacagggccacgctcatcatctctatttaaaggcgtatcatatataatgctagaaactggtcggcgtggatcctcctcatcatagcactcgtcttcttgatatgcagcagcactaacctccatctgacttacgttataaagatgcctatggtcaaatgtctgtacaacttgccaattttcacccagctttgtatctggcaaatagaaaaccttcgtagcatgagtggccaatatgaaacaatcattcttgtaccacaaacttccaacattgatgcttttaaaaaagccatcatctttaagtgcagtcctctttccatccagtttgaaccagtcacactcaaacaaaactacggacctctcctctaagttatagtccaactgaattatctcttttatgtttccaaaaaaatcaattaactgaccattatgtgtagcttgtgacattactccactattcagtgtcttcttgttcttgtcacggttaactgtgttaaaccgcacaccattcactatgcacgaggagtattttctaactctcaaatcaggaccgcatgccaaggagaagatatcaacatccacctcttctggatttgtactatgcttcttcaaaatctgccacatgcatacaacacacatatatta

SEQ ID NO: 16799 - DNA, 931 bp, Oryza sativa
  unsure (1)..(931): unsure at all n locations
agggtacattgctcggcttgcccataaccgaggggccgctatttgaataggttttactctgatcaagggtgtacatctttacccacaaaacacatcttcctcaggtgtaaccacgtgccacataccaccacgggtatacggacggaagacgttacatagttcccaacccatcctagccataaacaagagtgccgacccaaccccacctacggcggaaacccccgggacaggcaggcaggattgagccccctagcagcaggacaccagccctgtgccatgacatctcgactaccgggccgcagctcgtgtagccttcatttgccctggagaatgtccatcgacccccgacttcatccatctccaatccgtgtacttttgtttataaccagactgagccacaaactaagccttacccactagacatgtggaagtacggtagtgctttgcaacagaggcccgagcttaatccttatagtggccggggtgctacttcccacaactggcatgcacccaaaccccaccgaaaaacaggttttaggggctttgaaagaggaagagaggggtatgtccaattccaccataagccaaccattccatagtgtccaaatgatatgagaattcccaaagtctaaagttataaaaccacctaatgttgcctaattaatcagcgaagcatctacctaaattcatactagtggaaccataaatagagtacccactagttggggtttttgttatcctagggtgaacaaggtaataataacaatagcaataataatgtcataacaaaggtaaataggcatggctaaataaaacagtgataacgcgggaaattaaataaagcggntatgcattaatttaattaaaatattttataaactgggattcatatgctcaaggatgatgtgacttgccttgctcagagagacgg

SEQ ID NO: 16800 - DNA, 1521 bp, Oryza sativa
  unsure (1)..(1521): unsure at all n locations
tgcacagtgcacctatgtgtggatgaaaatggaaaactgggagaaataaaaattggatggtgactcatttttgtatgaccctcctccttttactttattttggaaaacatggctttttcctatatttatctttttttttcatgctcgagaatactttatctcattcccttttgagcgttgttttcatttttctcctttttagctcatttctcattggcatcaaccattggaggagataccataaatgtatggagtctttatagaaattcttcttgtggataatgtcttgccagaaacaacgtaccgagcgaaaaaatttatccatctcctgggccttgagatacagaaaatttacgctgacgaaataattggatcctttactggggtgattatgcggatttggaccaatgtccagtatgcgaggcttctcggtataagtgtggagacattggaagtaatggtacaatgaataagaaaagagtcctggtgatggttgtatggtattttctaatcattcttcatttggaacgtatgttagcaaacaagaagattgctaagttgatgcgatggctgttggtatttcttaacgacattactagaaatataattcccagcaatggcgcataaatacttctggtatattatggttacagagttcatccctaagcgcacggatataccattgtagcatttcaacccgagagtattctaagggtatcgtatttattttatcccatgggaaaatcatgtagagagagcttgactaataatttatatattacttgtgataatcatattctaaacaggggttaagataatccaagggtagagtgacacacaagcatgaactactcatcctcataataaatcatctaagctaagtggaacgaaaagagaaagaaaatatgttcctatacttctattatacatagtatacatacattctagttaactgatatactagctaataccctctatccgatgccctcctggtacttcgagaagccaccgctgactgctgagttccttacgacagcccgtcatgaccatacaaccggagctaaatatggaggaataccctccccaggaaattaacttaggattatatactggcgtgggggaatacccgtactgagctgtcaccatcaacggcccacctctcatctgcaatatataaccccaaataatggtatcccgtaatctagacaccatgtctacaataccagaagcgcgtctaatatcctcatccccccatagagtaattgcataagcaaacattatacccgcaccaaagcatctcccagataagctagcggtatattcagtatcacatggacataatgtatagtnggctgtcgggtgcgaagcgagtgtctatcaatgtgtcacacggggggggtgggngnngggggaacaaagagacanatgacggaaagagacagatgcagtaaacaaagaggaattatgagcggggtcgaggtagaagaacgcgaggtagacgcgatagtggggtgcgcgggg

SEQ ID NO: 16801 - DNA, 11864 bp, Oryza sativa
  unsure (1)..(11864): unsure at all n locations
cagaatattttaagaattttggagagacggcacgaaacatncggttttgtttgagtacggatggcataaatccttttggagagatgagcagcggccatagcccttggcccgttccgatgtgtatctacaccctccccccctgtctatgcgtgaagaggaagtacataatgatgccgattattattcaaggccccaagcaacctggtaacgacatcgacgtgtacctaagatcactggtcgaagatcttaaacagttgtggaagaaggaaggtgtccccgtgtgggacgaggacaaacaggaggagtttaacctacgagcgctgctgttcgtaaccatcaacgattggcctgcacttagcaacctattcggacagtccaacaaggggtacaaggcttgcactcactatatggatgaaacagaaagtacgtatcttaagcactataggaaggttgtatacatgggtcatcgtcgattccttgcagcaaaccacccggtacggaagaaaggcaagcacttcgaacataaggctgaccaccgtacgaagcctaaacatcgcacacggggcaaatatattatgcacacgaagcctaaatacatatatattatgcatgtatatacatataatataatataatatatatatatacatataatatatgtatgcatatatatgtattgaaacatacatatgcatggtttatatatatatatatatatatatatataaaccatgcagcaacaggggcatgcaaaaaaaaaaaggtcagctcgatctggactaaagatggctcagccacgtggccggctgagccatctttagtcccggttggtgttaccaaccgggactaaagatagatctttactcccggttatttcacccgggactaaagatagcgatctttagttccggattggtactcccggtttggaaaccgggactaaaggggggttacgaaccgggactacaatgggtttctccaccagtgatttccaaatatatcggttggcttattcaccgaataagcgaaacgatgggccgttagctagaaaaatgcggtcaatctttttgttggggtctggggagagatgatataatagaaaatcggtaattgtgatgggacactaatttagttatagaaaaatgatctcactaagatgaacttgtccattcaaaagttaattagtgatccctttctttgaaaagttgttagtcgccgatataccttatccttgtaatcacggtgatataccttgtaatcacgttaggcagatactctgaatcgctgatgtagtgttcagattgagggtgtgttccgaactttcaacttttccgtcacatcatttcaatttcaaccaaacttctaattttagcgtgaactaaacacacctaaactcggctttatactcctatctattactcccttcgtcctaaaactattgttcatgtccaacgtttgaccgttcgtcttatttgaaaattttttatgattagtatttttattgttattagatgataaaatatgaatagtattttatgtgtgactaaatttttaaaaaaaattgtaaattttttaagtaagacggacgattaaacgttggacatggatttctaaggctacacttatttagaaacggaggtagtaattagcagtatccgaagaatatactggcttgtcgctagctctttgatatacggccctgtttagttcgcgaaaagaaaatttttgggtatcacattggatgtttgaccggatatcggaaggggttttcggatacgaatgaaaaaactaatttcataactcgcttggaaaccgcgagacgaatcttttgagcctaattaatctgtcattagcacatctaggttattatagcacttatggctaatcattgactaattaggttcagaagatccgtctcgtgattttcatgcaaactgtgtaattagtttttgtttttatctgtatttaacgctccatatatatgttcaaagatttcatgtgatgtttttgggaaaaaaattttggaaacaaactgggccagtctcccggaataatgtatactgtgcaacagtgcaagtgtaatgtaattaagatgcatggatggaaatggcacaatagtcaacgtagacaggggttccaggagggagcagaggaacagatatacgacaaggactacctaccctgttagtagtaagcagccactgcaagatttatggtaagataatatgccaaaatgatcatctactggaccatacagtatgccaatgttggtgagagcggtcagaaacctgcgttaaatccttactggatacacgccctgcaataaatccttgtttgtcttgttcggcaacatgcatttgcaaaatgaagtacagtatatacattgatgcaggaccgtccagtgtgaaactacatcatcatgatcagttagcttcgggaaattaaatactgactacaatacatgtactcctccgtaaaaaaaaaagacaaactctatgttttcgtgtccaatgtttaactgtccgtcttatatgaaatttttttataattagtattttcattgttgttagatgataaaacatgattaatactttatgcgtgagttatctttttaattttttcataattttttcaaataagacggacggttaaatattggacatggaaacccacggtttatttttttagacgcagggagtaggacagtagaaaaaaaattataatctgttatatccaagttattttgggtgctgctctcagctagtgagaaagttggacgcagatactcagtagttagcgagaaatcagttcgaagcagataaaaacacacacaacgtgcgtgctaacctcgtccaagtagcttagcttaactccttaagcaagttaggctctgtttagttcatggaaagaaaatttttgggtgttacatcggatgtttgacttgatatcgcaagaagatttcggacacaaatgaaaaataatttcataactcgcttggaaaccgcgagacgaatcttttgagcctaattaagacatcattagcacatgtaggttactgtagcacttatggctaatcatggactaattaggttcaaaagattcgtctcgcgatttccgtgcaaactgtgcaattaatttttgcttttatctatatttaatgctctatgcatattgtcgacgtttgatatcgcgactacggtatttgtatagtatgtggatcgttggtactagggtatatgcgagattgaggtaaaagagatgaaaacaagggtttttatacaggttcgggcctttatttgacaggtaatagccctactcctattggccgaagccggtgttgctcctttattcatattaatcacacaaatacaatatttgggataacctatcttgccgtcgtcgacttggcggctagataaccaactcgtagtcgacgacagggtagtcttcctccttaagtacgaaattgtcgagattagagagggcgctagatcccttttgccggcttccgtaggcaccgaatggagtatgtctaggcttatatatgatgttgatatccgacggcgtgtgttggcttgtgtgtatgttgtgtcttatagctttgtggcgtgtcccctctcctcgtaggggattgtatttatacccatagatgcccccttgtccaagttgaactaaggagataaatatggaaacgatccgagtagtccttgtcattttcatatagaactctttttgtcattccttatccgaaactccttttatatttgaggtttgtttccgtataagatatgatatgtggtggaccctgccgagatttagccaactactattaggtatgtggtatccataaccctgacagtagcccccaacttcaatgcaaatgaacgagttgatgttcttgaccgaagagcttggaacaactattgtcgtgctcattggaccgttctcggtgagatcagagatagtgctagattccccttatcggcctttgtaggctccatattgagtttgtctaggtcccgatgtcgaccgagaaggtatggagcatgcgactaagtctcccgtcttgctgtatcaagaatttggattgaagtcaagaaatttcgtctcggtgggtacaccatcactttattccatattccttctcgagctccatcaaccattctcgagtaatctagaaggtgcaaagtctgcgacaaagccttgaaaatctgacttgactattctaatgtctgactttcctaaaatcaatactcaaaacataatattaaatagaaatagacctcgagcgaatgctcaaagggcaatatgtgtggaaaaattgaaaatctgtgtgcagtacgctcgctagagttgccctcagcaaacagagtttggtacccttcctagccccaagctgtttttatggaaaagccatttttcacaaagacagcttgaatcttataacaaaccatgctgaagctgacaaatcctagcccccagctataaagttggaaaacttaatttccgattacacggcttgattaatacgcatcgagtgagaacacttacatgaccaggttttacatggtccttcggctcttagaatctgacaagaccttacacatccgtttagcactcttaccttaggttttacatggtttctcggaggcttgtcagatcagcgtaaagggacaataggaccgccttcatgacaaggcgatataagaaaagaggatcaccggacaaatattgcacatataaacacttacagaagttgacgtatatgaagtgatgagacgatttctacaccgggtgaagacgaggtgtatagttgtactcaacaaatcgtagaggtagtgggagaattgctacaccgctggtcgaaggccagttatagtcataactcgaccactggagtttaaggtgcgagaggtcgctacatcctcttagttgataaccagaagtgagtatctctcgaccgtttgaaatagaggtgcgaggaccgctacgttgctggttgaaagactagtcgtagtcgtacctcgatcattagaagttgtggtacgaggaccgctatgtttgttgttatttcttaacgacattactagaaatataatttccagcaatggtgcataaatactccttgtataagggtgaaatgctataatggtttatccatgccttgcggatgaactctgtaaccataatataccaggagtatttttacgccattgccgggaattatatttctagtaatatcgttaaaaaataccaacaagcatttctggtgccgttgccggggattatatttctagtaatgttgttaagaaataccaacaagcatttctggcgccgttgccagggaagattcataaaagagattacctgaactaatattttatatttacctctttataatcactgccctttgcaggctaaccttggctgttttcacttttgttgtggaaacagggtagtgcatgactggtttcaacttgccagaaaatttcaaagaaaatccagaagctttcttccggagcgttaggctgcgagtcgctgctccgcagaaaactctaccgacagagaaaccagccgtaccaacactaccgactttcaagattatggctagcaagactctccgcgagttcgctgctccctctgctgacaatgtggccattgggccacagatcaacatgggagatgtggatttggacttgaagtccagcctcatcacgatggcgtaggctagcccattctgtggcaagcttaatgaggatgccaatgctcatctgcaacagttcctgaagatctgtagcacgcacaccatcaagggcgtcagtcctgacgccgtcaggctatggctgttttcgttctcccttctcgggagagcgaagtagtggttctatcccaaccgtgctgctatcaatacctgggacaaatgctttacggcattcctctcgaaattctttccgatggacaaaaccaatgcccttcgtggaaggatttcaagtttccagcagacaagggacgagtctattcctgaagtatgggaacgtctgcaggagtatgtggccgcctgtcctcgtcatgggatggacgactggctgatcctgcagaacttttacaatggactcacaccgatgtcccgcgatcacctggacgcggcagctggaggagctttcttctctaagacggttcaaggagccgttgatctaatagagaagatggtctccaatatgggttggagcaaggaacgactccagacccgtcagtgaggcatgcataccatcaaggagacggcgttgcttgctgccaagctagacctcctcatgaagcgattggacgaccacaacaaaaggccacaaggcatcgtcaaggccttggactcacacgttacgtgtgaggtctgcggcggcacgggtcactctgggaatgactgcccggaaacccatgaggaggcgatgtacatgggcaacaacaacaacgggtaccgtccacaaggaggttagcggtggaaccaaccacgcccatattatcaaggaggtaacaacaacggtaatttttctaaccagccttccttgaaggatctcgtttttgcgcaagctaaaaccactgatgcgctaagtaaaaaactcactgccaatgacaagatccttgaaaatataaatgttaagctagatagctttgcttccgcttttcaaaactagctaagcttcaataaaataatggaaacccagctagctcagttagcatccttagtccctggaaataaaactgggaggattccggggcaacccgactcctccgttgaaaatgttaaggcgatcacgacgaggggaggaaagtccactcatgatccgccataacctaaccctgcaggaactaatggaatatcaaaagaagcgccatctagtgactcggctgacaaggaagttccgccagaaaagaccatgccgtaggaatactgcgagacacggttgttgccgtttccccaacgaagtaggaaaccgtcagtggacgagcaattcgctcactttgttgaagtaatccagaagatccacatcaacgtgccgttgttggacgctatgcaagtgccaacatacgcctgttatctcaaggacatactcaacaacaagagaccactcccaacaacggagatggtcaaactgacggagcaatgcagcaacgtgatactccacaagctcccagagaagaagaaagatccagggtgtcctacgatcacctgctcgatcggggcacaacagttcgaccaggccttgtgcgaccttggagctagtgtcagcgtcatgccaaaaggcgtcttcgataagctcaacttcacggtgttggcaccaacaccaatgcgccttcaactggctgattcgtcagtccgttacccggcagggatagcggaggatgtgctagtcaatatacgggacttcttcatcccggttgacttcgtggtgctggacatagacacgggaaaagtgacgccgctcatcctgggacgtctattccttagcaccacgggggccaacattgacgtgggaacagggagtatccgcttccacatcaacgggaaggaagagaagtttgagtttcaaccaaggacggaacaatgctccatggtcaggataaagtacgggtcgtatccgcagaattatcaagtggtcaaagtggagcaacccaagatggacagcctggtcaagtttatgcaaaatttcctggagaaggaaacaacgtggcccaagaaccggtattataggccgtcggtaaaaccacccatactggccaagaagctagagcagtcggctcagaggaagccgctgtccgcaccaaagccaacgaaggtgtggagggagaagccaaagatgcccgctccatcacctccggagatgggtagaaaatccgcaaagtgaactgaaaggaggtacggtcttgcacgtcggactttaaatgacgcgaccttcgccaataggtaaattggtatgtatctgcatctttatttccaacaatttgaatttttgcatcatcgcatgtttgaatttcaaagttgcatttaggatttttgaggtttaaggaaatttttcaaatgaatttttcagagcaaaccaaaataacattttcatcgaaaattcactgtgccacgaccacactgaccgttggattccaacggttgaaagtgggaccggttgggcccaccaggggtttggccgaacaccctggttcggccgaaccggccaggccaacggtcggctgcctctctttttgaggcaatggctagtgggtcccacatgttattcatgaccgttgtgggtaccctataaaagccagccggccgggagagggaactccacaccatttcaacacattttcattccctctccaaagtttgctctcaagttcattcaagctttgatggattccctcaaattcaaacacttagttgcatatatgcaagttgctttggtgaaactaatcggcgggtgaaattcttgtcattcctaacccccgtcgagttagtccattcttgctccattgtgcagaatgtggaggcgattgtctcgtctgttaaaggggtccggctcttcatcaagtcatcatgacgagtctagtcctcgttcgtcagctgatgtctcgatggaagatgccgaagctccacgacgactcctgaaagacatcgacctcgaccttgtcagtgattgggagagagaagcttactacatgctgagcggctgggagtatgctcacacacgagaatactcaccggagctgctgaaaaagataggtatggatgttgaatttcgttctatttggaaagttattggttggcagagatttgctgtggtagatgagcctggttttcgttttcttactttgcaatttctgtgcactttgaaagaaatagaagatggaatttcctttcgctttttccataaggagtacacacttacatggaaaggcttaagtacacttcttggttttcacgattcctgtaaaatcgatctctagaaaggagtttctgggtttgagaaaaataggttttgggaaaatatttctagtgctccaatttgcaagaaacatagaacgactgatatccataatcctatgcttaggctcatgcacaaatggattgctatgactttgtttcctcgaggtgatttgagacccattaggggggatgaattgattatcatgtttgccatggttagaaaaatcaaaattgctcctgtgaagtgtatgataaggcaatggttagaaagtataaagttctctgctcctgttgagtgcacttctctgattactcggatagcaaaagggctaggggtcattagcgatcaaattgcttttatctcagctgctcatccgtgtattgatgagacttatctagtgcaagggcatattctgaaacatggagaagatggatctttgatttactttttccccggttgtacaaatgaaatcccattgccaaatgcggggtatcatttgtacaactgccatgaactaaccattcccctgcagaccatagaagaatctagtgcaggtggagcatatagtgagacgcgcaacatgacaacgaatgaacgagaatgttcatcatcctcaacacccgtaaagatgtatgtggcaggttgggaatcgactgtggatgcacccggatggacccaagctccacgccacagcatcagagtctcaacctgggcgagtgccagtgaggaccggtggcgtgcgcctcatgacatccaatggggggacaattaacctcccagatcaagtggtgtgcctccatctccaagtgaatggcgctcaagttcctctctttgggacttgggtgaaatctctaggagaatggacacccttaatatgcagacgggggagatccagtgcaacctcacggaacacatagctcaaacgcaagaatgacaacaatctgctgatgctcagttccccaacttcaacaacatgatgcagcaatagcacgatgaccttcaagcgtactttcgctttcagggattcaatccttatcaaggaccctgagtaaaagccaagcttggggggagacatctctccccccactgaggtaacttgtattacattgcatatttccctttccaattgcatatttgctttccaattgcatcttataaaaaataaaaacaacataaaaatttgcaaaaatagaaaataccaaaaagataggataggtttgaggcatgctgggtaagacaagctagttctctttgctgaaatgatgaatagttactctctcaaagattaaatataagtagccaacaattattcgggaacctgaggtaaatgagctgcacttgctgatctaagtctaagatgttgcgagatatgagatagtaaataagagttgctatgatcctgatactagtttaacttgaatttcggttgttttgtttttcaaaatgataaattgagagttcctcatttgatataaattcctaccagagccaaaaatgggctatcatgattaaaccttatacattttggttgcttgccattccattgaactttgtcaaactcttgtgacttgtgtagatacttctcatgctctatgatcaagatcatacacccacatatatgcacatgctaaactcctacattgggagctaagcaatattccattccattcccattttaccaccatcttgaattctccatgctttcacgtgctttcttctcctaaagagaatgtcctttcgaaaaaaaaagaggagggaaaggcatggttataaaaaataataataataaagttatgctccatcaggcatgaacatgatgttgaaaaaaaaatgtagccatgccctctcctaatcaataaaagaaggatttttgggagaagtaagcataaaggagaagcatttttctttattttttttcctcatgtagcattttcatcatataccacacacacattgcacaatcatgatcttgagtatgtttagttatctgctttagtatgagtttttgacttattaataaatgtgaatgcaagtatgccatgtttgatccctacctagctccacatatcaaaaccttagagtaggaatcaaaaaggcaaattggtaaggaattcatattgatacacttggcgagactgagtgaatcaattgaggaacttggctttcttttgcaaaatcatttgaaaacttctggaataagagttgaataaagattgggtgattggtgctctaattgctgttttgtctttcaaccgcgcaaggcaaggagaaacagagtctcgtggaaataaggggtaagggtaagccaccgtgccaaagattatttaatctgagagagagtacatataccttgcacctgtatctttgagatatgcagcatagtagcaactcctgatcaacaagcaagtctttgtttcctttcttccttcactcgggacgagcaaaggttcaagcttggggggggggggggttgactactggatctcctatgatcctacatcagtggacacttaagcaggtgagccattggttgtagtgttgtcgaccatgagtgaactcatatggtcactgttagtcaagagctgtattaatattacgtcggataacgtaaaattaccttataacggatgctattgtattaatccgcatcccaggaaaaggtcggggtacacctaactaacttgattcaatttgcacatctttattatatcgataattgttcattattacaaagggctatattgccgtgccatacaaaatttacttttattgaatttgggggctacggttacattttcaaaggcgctaacttgggtttattctaatacttccacctaaacttgtttttcaaaggctgatttaactaatgtggggtgacagatattgctc

SEQ ID NO: 16802 - DNA, 7720 bp, Oryza sativa
tgtgtcccagggtagacttctcgctactccgctaacactgtcaattgccccacctgtttcatctcttcttcctcaatatcaacctctactgcatcctcatcatcctctagaacctctccctctgggaactcctccggacccaggtagccgcttctcgaattgcatgttgggggaggactcatctccccaacctcctttgctttcaacttcagagtttcttcatctgtcgacgacgccctcaatgtggaatccttcgaactcggccccaacaatgctaattccttcccctgctgaccactcatgtcaccgtcctgcggcttcgggcgggtaatcatcgccttgatgatcccttgatcgcccctaccagcagacggctccatagattgatcgtgggaaaactgatgccaagacgagatccaatctgcactgcctgtcttcaacgaaagggtgaaacacagagatccccctacctgagtatcccttataaagggccagatatacaaaactgactcccatccgggcctaaaccagggtatccaaaaatgcctagaacaaattccagatccatcataaccaatttggatagtgtttgatctcgtccataagaccctaggcttacccagtcgtaccggttctgatttgatcttaaaatctgccgatcctgaaaggagtatgcccgagtccgatgatgatcaagatcatggtactgtttccttcctggatcccatagcacctgaagaaaactaaaggtgggcgatagccccacagacacaccaagcagatcgggaataatccccatccaaaacccactccacacgtggattacggccgccggtgacccctggttgcccgagcgccaccatagccctaacagcgccgccatttgtccggtaagcacgtctcttccattttgtattctctatagtatctagtaggaataaagcttaggagcttcggtgctatagtcctcttggagttttgggtatgtttctagtacttacagttttcgtaagactatagttgaattaatagaattatcttctttatttatttatgctcgtcgttcatatatttctttattgagtatatgttctatgagtagtatatactttgtatatccgtttcatcctagggtagtcaatccctacaacgataacggtccaaccagctttataggttgctctagctccaatttgttcatccgtatggtgagagtcccggtggagttactgatattatttacgagcataagcatggtaattaggctagataaatattgttggatgcaggtgtgccccacagaaagtgaggtaggcggcatgtggtaacaaccctctccgtcctttgtattcctccacgtttgagtatgatataagaatacgtaaatgtcataatcacgctagcaggcgagtaaagagtggtccctcggtagtaccaaggtgcctggaacgaagtcttatgttgtaaacatgtatatgttgagtgtatactagacatgattaatatagaagtatagatgaatcgtagtttcctaatgctaattttgtactagagattcttattaaagtgaatctcctgtgtgtcgcaacgtggatttaacattccaatttgggcaagagggccctggttgtgtcgcaaaagatgacattctaagttttcttcctcctctccggtctacatgtacctctggtcctaagcacccccgaatagcaaccatctataactaatgtcgacaaccgatacggattctctatcgattgaaggagctcgtgaactggaagtcatttttcacctttgaagtttaaaagatagatcagtcttacatcttctccggtgtcagaagtactatgtagcggaagtccgaatgcagcagagaggtaagacaagcctaaacttttcccatgggacataaacctttttagtagccggagtcatttcagtcctcgcctttctcatctttcgtaggggcctttagtcttttgattatagtagaggtcgcgagagagcagagcgtaccgcccttattcttgaaccctccaccgagctctaccctacccacatttatttggaagggggccaaagaaatgtctccacctgctgccacagtagttcttcagaattctacagaacgggtcgatcctccactaccttatcaattattatcctaacccctatttagaccacggtgaattaattataggttgattaaggatatataaaaaacatatttttatgctgccgccttttcctgccgaaatataaatacgataaccttgggaatactcatggctgaaatgctacagcggtatccgtgcgcttacggatttatatgtgaacgtaaaaattaccaacatattttcgtcaacaaaatagtccgacactagaagtactctcgtttgtatgcatcctatatccgtgcaccatccatccatagtatcacaagatcctctactagcggctcaaagtacacatcaatatcgttgctaggttatttgtgcacctgaaatagaagtgacatcatgatgtacttatgcttcaaatattcctattaatagagccgagaaggtggttgtagataataacagcgactggccatgtgctatgatgactgctcatgtcaccgaaatgattcatgccgtcggtgctgttcagttgggtgtcttatcgttccaactcatttacgttctttgtggtgccattggtgacggtcgttatcgatcagtttcgacctttaatattactaaaatagaggaaaactagtggtgcttgcaatgcatatatctgttagaacaataatattccactagtattaggtctactaacctttttgcagagaatgataataaagtggaggagaatcgacatcaacatagatgataaatcaatcggacaatgtcgagagttggacttatgcatgaattgacaagaactcagaattgacacgacacactgggccaaaattcacatgtctacagaggagaataacaaaggaggctacctgccgaatatgggccaggttgggctgacccctggttcggcagaaccaggaggttcggctgaacctcccctggcgccgttggatccaggttttggctggacggtatggatcactccccaatgacagttggagggcaattccgaccattctaactaccacaaccgtcattggcagcctatttaaggagctcctctcctcacttcactcacacacctcaagcaatagctctctcatttctctcaagtttagtttagtagtatctagctggtggaataggactagaatagaaatcaggagtccggaaagagttcgggtatggctctagtagctttcctttcctcttttataagctttgtactttcattagaatacttttctatattcatttatggtattgaaatactttccgagtatatgagtacctactttacattatgttcatgttatactgaatatacggctagcttatctgggagatgcattggtgtgggtataatgtttgcttatgcaattactctatgtcatgacgatgatattagagtactatctggtagtttagacatggtgtctagattacgggatatcattatttggggttatatgctgcggatgagaggtgggccgctgatggtaacaactcagtatgggtattcctccgcgcctgtttataatcctaagtttattcccttggaagggtattcctccatatttagcctcggttatatggtcatgacgggctgtcgtaaggaattcagccgttgggggtggcttctcgtagtaccaggagggcatcggatagagggtattagctagtatatcggttaactagaataaatgtatactatgtatattagaagtataggaatagattatctttctcttttctgtcaacttaccttagataatatattatgagaatgagtagctaatgcttgtgtgtcactctacccttggattatcttaacccctgcttagaatatgattatcacaagtaacatataaactattagtcaatttctctctacatgatcttcccacgggataaaataaatacgatacccttggaatactctcgggtgaaatgctacaatggtatatctgtgcgcttgtggatgaactctgtaaccataatataccagaagtatttctgcgccattgctgggaattatatttttagtaatgacgttaagaaataccaatagtatacttggaaagtatttcaataccataaatgtataaagaagattattctaatagtagtacaaagcttacaaaagagaagagaagagctaccagagccatacccgaacacttccgaaggcttccggactccgttttcaactctattcctattccactagcttaagaacactaaactaaacttaagagaatatgagaaagctttgattgaggtgtttgttgaagtgaaaagggtgaggggtttatatagcctcccaatgacggttgtgatggttagaatggtcggaaataccctccaatcatcattgggagctaatccaaatttggctggtggcctcctggacttctccactccgcagacttctaaactttggcccagttagtcgtgtcatttccgcgttcgtggcccgttcattgataagtctgattctccacatcgtccgattgatttatcgtttgatttgatgtcgattctccttcactttgtggttattctctgcaaaagggttagtgaaccaaatactagtggaatattattattctaatatgaatatgcattgcaagcataactagttctcctctattttggtaatattgacggtcgaaactgatcgctaacaaccgtcaacaatgttgcaggtcaaataccagtcgtagttgtacctcgaccattagaagtcgtggtgcgaggatcgctacgctgttgatagaagaccagtcgtagtcgtacctcgaccatttgaagggaatccagagtaatagatggacgacattctcgtgacgtgcgagaactgcctcctgatgacgacgaagacaatgagggattatcgtagtcggtggttcgactcctggacctactacctcgtcctcgggccctctagaagtctagggatctcgagtttcgttgtcgtcgtgtgatgttgtgctgttgttaaccttttctgttgtcgtcctgatgtaattaatcctagacgttgtcgtcctgttgacaacgacgatctagccagtcttggttgtcgctatcacgacaatgttgattgtcgcgttaggtgtcatgagattgctgtaaccgactggtcgaggaacaggagtaggcgtatctcgatcacctgaagatgaatttttaggtggtgagagatcgctatgatctattggtcgaggaccaggtttagacgtacctcgatcacctattggcaactgacaggcatacggaaacaaaccgtattcgcgaaagcatctcttgttatccgtgactccccttatcaatattttccgtactaacttggtcaatcccggtgtaagatcatagagacatggagttttcgacaacgacagatggagttcaacggtccacaagtgaatttaagttgataggggtactagagttggttattacatgtgcatctcatgtggccagcatgactcacatacccaacttatggcatatccggatgtctattcgcaatcatgtcgggtgatcaagccgacaatgcttgcgaggaattatccgttaacaatctttcctcaaatagaccagccgtagccggcgctatacatgagataagtcatcagtctttgttggtaggttgggtgcgacaactcagcattttccgagaacgttctcgataatggggtgtactcaaccacaacttactcgagtgctcgattgttcctgaaaacattttctagaagacaagatatatagcagagaatatcgagcatgtactgaaaagactgcatgtaacttctaatattatcaggatataacaagcagattaaatatcaggcaatatgtaaaccgtaaataagcatgatttatacataaggaaatagagcgagcccctagcattaaaccgtagtcagcctaacaccggaaacactcgtacaatagatatcatataaaaaacatgctctaggtaaacttaataaagtatggatctgacaatattgtattgatatgaagaataggtacgataaatcacatatagaatattgcgtacctttgtaggtacatgccggatgtatctacgaaattagtagattaatttaaaaaattaatctcctaattacctgatcggtcttatttgcaggcacgcgtcgacaaaccaatacatgcatccctgagtacgtactgattcggcacattcgcatgcatgtgtatatctcacgagcaagcagtgcgtggtgatcttggacagtgatatattcaacctgaaaaaggtgaactatcatgtgctttcttgccacgtgccgtcaggatggatgttctcactatgcatcagggtccaaaatttggatcctagtcggagtgtgcgatgttgatttcggttcctcgaaggccggcgtcctaaacagttagcggcaatcaccgaggttaccaaaatcaattgacgatgtcacttaccgggcagtcgacgtcttgaagttcgatcaatctcgatagattgaattgttgatggggatgatttcgatcttgtcggaagatatactccgatcgggttagatctccctatagtcgaagtcatcgagtagcttgttgttggaaaatctatctcttggacccatctcgtcgaaatcttaaagcaccaaattcccctacgtggcgcgccactgtcgacatttgatatcacgactacggtatttgtatggtatgaggatcgttggtaccagggtatatgcgagattatggtaaaagagatgaaaacaaggatttttatacaggttcgggccctttatttgacaggtaatagccctactcctgtttaccgaagccggtgttgctcatttatttatcttaatcacacaagtagaatatttgggataacctatcttgccgtcatcgacatggcgactggataaccaactcgtagtcgacgtcagggtagtctacctcctcaagtacgaactcgtcgagatcagaaatggcgctagatctctgttgccggcttccgtaggtaccggatgaggtatgtctagtcttatctctgatgttgatatccggtggcactactacataaaagattttcctatacgccaccctcttttagttgtaggcagcctgtgaatggaaccgcacgggataatcgagcgactggtgccgggtggacgccagcacgggaaaatcgattattccgtgcgggcatcctaatccaaccatatgggataatcctcattatcccgtgcggtcgacttaagtggaccgcacagaaaaattgattttcacgtgcgagctttttaagtggaccgctcacaaaaatataatatcccttcctattttccctctcacccacttcaaattttttacacactatctcttcattttccctatttactcctctcctccccttccctctctctatcctctctctctccctctttcctctccacccctcctctcctcaccgagcgcacacggggcgtccaccgccgccgatggcgcgggaggcgacgcggtgcttgcttgcggaggcacgccgccacggcggctcggcgatgacatgccaggcagtgcggcgagcgatg

SEQ ID NO: 16803 - DNA, 4234 bp, Oryza sativa
aaaacgaattgcaaatgcactggataatattttgtcgagaaaatttcgtagccaaactgaccaaaagtgtcgcgcttggaattcagtcgaacagaagcaccagtatgatcgataattgtgctctctgcactgctgcctcaatagatttcgtagtaaatcctttatttctatttatctatgaatgcatatatatatagtataaattgaacttcataacaattaacaagaacccagccctggtgtgccaggttctttatcctgcatccatactagttactgctgtctagtagtactattttttagcgaaattagactacagttgtttttacaaaattagatgcaacataactctatctactagcaacaaatgggtcagattctatcaaacagacaaatgtaggccctatttagatcccaccacaaaactttatacctgtcacatcgaacgattaaacacatgtatgaagtattaaatataggctacagaataactaatagtacagattacgactaatttgcgagacgaatcttttaagcctaattgctccatgatttgacaatatggtgctacagtaaacatttgctaatgacgaattaattaggcataataaattcatctcgaggtttactaactgattctgtaattagttattttattagtacccgaacaccacatacgacaacctatataatacacacgccaaaactttacccctaaatctaaacaacccggtagatgaaaggagaattttatttcagttggtacgtgccaattaagtggcagagtttgaataagctcactggtggagaaaccatttgtagtcccggttcgtaaccccctttagtcgcagttttcaaaccgggactaccaatccaggactaaagatcgctatctttagtcccgggtaaaataaccgggactaaagattgatctttagtcccagttggtaacaccaaccgggactaacgatggctcagccacgtggactaaagatcgagctgaccttttttttatttgcatggccctgttgctgcatgggttatatatatatatatatatatatatatatatatatatatatatatatatatatatatatatatatatatatatatatacactagctatatatatatatatatatatatatatatatatgtatgtatatatatatatatatatatatgtatgtatatatagatatattatatttatatatgtttcaatacatatacatgcataatatatttgtatttatacatatatatatgttatgcaaatgcatatgtatatatatattaaagcgcttaacattttatgtgcatatatatatgaccaaaatatatatttacactaaagtaaatgtgtacatgcatatagaaaaatagacatgtattaattacaattcattatgatgtccgagctagctacgacttcgacgtagtagtaggcgttatctcagaagctaacgacctatgaattgtatttctctcgggatcaaggatttgttcgttgatgaatcccatgagttgttcttgaaccgccgcgataaattacttgtgtgtgaggttatccctcatgcgaataacctatatgaattaattagtcaacaacaaatcgatacgtacccaatgaaattttgaatttatttgtatgtacatcgagctctcttgtggtgatgatttggtatgcaaggcagtagcaatactcgcacacgtagtagccgcacaagttagttccctgggcttgcttttgcgcactatatatatatgacaaacggcgagagatctaattaatatacacttgtatgtatttgaattggagattcaatataaatgtagagcaggtgtactcacaggaaatttaaactttcgcctaagtctttctctccaattgccgcggaccaaacgacggaaccgataccaagccctacatggagtttaaagctatgattcgtagtagcaattaattataacaagattcgtaattaacattgaacttatgacagtacctgtctataagttcaaaaaccttgtcaaacgtagactcttttttatccattgagtcatatacgttaactacgcaggcctccaagtcgaagagtaaaaggacccagtggaatgtgcaatgtgcgtcggatgcattacatatgaaacacttagcttgttcgtacgggaatgaaatttggtaggaagacagtaaaaactaactctgtgttgtatggcaatagtatgaacatcttgtaatgctgcgccttcaggagatggacgagattgtcctctgtggcttgcggatactggtcgagcattgtgatgtttactttccgagggtcgatgaatccagtatcgaaaaccccccaccgtcgggccctttgaatctccattctacaacgataaaaggaagtatatattatatatggtgtacttatatacaaggacctaattaattattaaagaaaacgtaataagaaatctaactgaacgatacttacaaagtccaacaactcataatagagacatcgagggcgtccagctggtatagttcgtagatacccttgaaattgatccagagaatatcttctccttgcaagaagtccgtgtccctgatcatcgctccgatcatctctctaccggtggcgcttatctccatgtacagttgatggaatttgtacatttgtgtcggtagggactgcagctgcttaggcttgacaagcggtttactgagttcgtacatgtatttcacttccaccttttcgattggcgcgcctcgtagcaattgatccgtagttaacctggtgtcattaataaaatcttgtattccaaattcttcaccggtcaccaacggctcgatctcctggtttggttgctctccaagctgagggactggtttggactttccagaagatgctttcttaagtgttcgctcatagtccgccgatagctttatggcctccttggcaggtgcagacatacccctgaagaagttcctgacactcgggtctataggaatcttcttttctgaacttcgaggcttcaattgtctccttacttctgatgccacataagcatcaggctcctcttgcgtgcaatcgtaccccgggtccttgtttttggcggcgtcaactttcgccttcttcgttgcccttgtgggggcaggcggtggagcttggggggcccttgacttggaaggtgccagacgaggagcttgcggaggagtcggtgcaggagcctgaggaggagtcggtgcaggagcctgaggtggagacggtgctggagcatgaggagaagacggtgcaaaagcctgaggaggagatagtgcacgagacgccggtagtcacccagggaggatgatgtaccgcttgcgccatagtataatggtgtggcttgtgtctcgtagatgcgtctcaccgtctcctacagggtagtccaactcgaggtcctcgtacgtggctttcaccaactcaacttcgaccttggagtattctgctggaatcggcctgcagtgttaagtccctgaagggtccgttgggatggccatgcctgacgccaccttcacgtggtgagaggttatttattcgtaatcaacatatatcagcagcaatttgcggaatggacaagtctaaaatctataaactacgaacttacctttattgataagttcttgaagggaatatgcagctcacatggtgtccgctgagtgatgtcatcaacggggcaggtggtttcgtcctgggtttgcatggtgtccatgctatgtgatcctacctgccccgttgaggcgcagctgcttcgattgcctgaagggctgaccattgcaggagaaatgtacggctggggatcctgggactgatgtgcggccatgcgttcatccaccttccttgccacctcctcttgcatgctgagctcgtagctcgataccctttactcaagatctgcaatcttcgcctcggtatctctcttgctcctcatccaactcctgtacgtctggatgccctccttgaatccaatcttctaaggaatcgcccctttccctcgtgttcgtcctggatgctcgggagtcttcagggcgagtgacagctcgtccttctctctgttgggtcggaacgtgccctgagaagaggcttccactgcgtccgttagtcgactcgcagcctcgcgtatctgatcgctgaagactagggagccatcaactaggttgagcgttccaccatgagcatagtaccagaacttcgat

SEQ ID NO: 16804 - DNA, 1602 bp, Oryza sativa
ccccttagctttgggaaatgtgtcaaagttcggtgtttggccccttcagaatgtatttctggaacagatctcccttgaagctctgaaactgttctgccattttctttagagtccaccttttcactatgttctctgtacccgcgggaagggtgaatgtctcgagcattgtggtccacagcatctctttctccgaatctgggacaaagctctcatgatctctgcgtgcccttgttctgcgccaggacaccgtactgacaggcacgttatcccggacaacccaaccgctgtgtcgtacgtagttcttggctgcttctgccggggcactaggtcggccgtcttcgtccactttcgttatgatgtgccgaccctctagcttcttcacggcacctcattgtccgcgtgccctcttctgtccaacggagggttgacttccactagcctcctcctcctcgttcccctccgcatccctctccacgtttccctcttggttcccctccgcatcgctctccacgttcccttcctcgttcaagtactggtttggatcctcgttcccctcttcttcgttccagtactagttgcttccatctgtgattatatcgtacaatatctgttcctcttcgcgatcagccatttgttcatacaagaaatatttgccaagtctataggtcatatttgctttaacaatcatatatgctaacaatcatatatgctaagtctaagtgtagtatattagaaccctagataatcattaaaactgtactaatcttgtattagaactctaacaatcatatatgctaagcctaagtgtcgtatagtagaaccctagataatcatatatgctaagtctaattacaaatataataatcttatattaaaactcaaataatcttgtattaaaactctaataatcttatattaaaaatctaatagtcatatatgctaagtctaagtgtcgtatattagaacactagataatcaataaaactgtactaatcttgtattaaaactaactctaacaattttatatgctaagcctaagtgtcgtatattagaaccctagataatcatatatgctaagtctaagtgttgtacattagaaccctagataatcatatatgctatgtctaagtgttgtatattaaatctaatagtcttaattacattaaaaatctaacaatcatatctttacatcacttgcctacgcgaattccttcgagggctagctaccactccggcttgagggacgacgacgatgacgtcttttccgtaacatacaaaaaaatgtattagtctaaacgcaaagtaacatatattgtatttcacgtagtgtcatataaagcgaccgttcacgtttcattcacattcgttcacgtttcattcacgttcgttcacgttcgcggtctcgttacattcacgtttcattcacgatcattcacgttcacgttctcattaagtgcacgtttcgttcacgtacgttcattcatgttaacgtacgttaagttcacgtttcgttcacgtacgttcattcgttcatgttcgttcacattcacgttaagttcacgttcgttcaccatcggcgttatataaaccccaggtttaaat

SEQ ID NO: 16805 - DNA, 5676 bp, Oryza sativa
cgggacgcagtgacacattgctccccttagctttgttcggaccggaaatgaaatttggttagaacgacagtaaaaaccaacatttgtgttggaaggcaataggatgaacttcttgtaatgcgcgcccttcagaaatggcaccatattgtcttctgtggcatcgggatactggtcgagccatgtgatgtttcctttcccagggtcgatgaatccagtatagtaaaccccccgctgtttctcatcaaccaggactaaagatattttcctgctattttgaaattctttttaaacccggttagggttaagaaccgggactacagataatagtactgaatattgaatttcattacatatgtgtttctaaaatagtaaataatgcattaaaattatttaaagtcaaaaaattaatgacaattacttcgaaaaattattgttgtctgtagtaaattaagtggataaaacgtaataagcaattatatgatttaaactagttaaaaattctaataatcatatataattagcatatgcatgatattaaattgttaaaaattctaattaacatatgtacataccacatgcatgatttaaaattaataaaaattctaataatcatatataattagcatatgcatgatttaaaattgttaaaaattctaattaacatatgtaaatgccacatgcatgatttaaaacttttaaaaattctaattatcgcatataactagcatatgcatgatttaaaattattaaaaattctaataatcatacataattaatatatgccatacaacaattgatttatatggatattcaatacatccaaaatagttcacatcgtgtacacaacaattacggcaatacatcggcgatgacggttgaccgcacgtactttctcctcactattgttccttccttgtgatcgctacgtgagtaaggggtatcttcatttgataggaggatgctagggtcaatcgtcaccgtgaaagggggttgcccatccaactgatcgtaatcctcgtcagtcttgtcctctactccgacgatttttcgtttgcctgggagaaccacgtggcgcttcggctcgtcaggccctttgcccttccttcctttgctagacatatccttcacgtaaatgacttgcattacatcattggcaacgacaaaaggttcatccaagtatccaaccttgttaaggtcaaccgttgtcatcccactttcatcaatcgttacgtctccactagtcaacctaacccattggcaccggaacagagggaccttgagaggaccatagtcaagttcccatatgtcctcgatggcaccgtaatacgtgccagttgttccatcgtgtcccatggcatcgatacgaacaacgctgttttggttcgtgctcttcatgtcttgggctctcgtgtagaatgtgtacccattgatatcatatccctggaatgtcgcgagccagatggtcccctcgctaggaaggccagttattggttgatcgtctcgttacccatgagatgttgtcgtagccacgcggggaaagtatcaatgtgatgccgtgtaatccttgcatcggacttaccgatgtttccggcgcgaactagagccaagtgctcctcgatgtaaggagccaccaatgaagattattgcagaacagtgaaatgggctttacggaataaattgttgtctaccgtcattattgctttccttccgagagtcccctttccccgtagtctcccttcatggcgtgattcaggtaccccgattaggcgaaggtcttaaataaattttacgcaaaatttgatgacctcctttgttccataccccttggcgatgcttgcctctggacgagcacgattacgaacatacttcttcagaacgcatatgtacctctcgaaaggaaacatgttgtgtaggtacacaggcccgagaataccgatctctttgacaaggtgacaaagcagatgcgtcattatattgaaaaataaaggtggaaatatcaactcaaaactgacaagacattgcaccacatcattctgaagggcttctaatctatccggatcgatgaccttctgcgaaattgcgttcatgaaagcacatagttttgttattgttgcccggacattatctggaaggataccccttattacaactggtagcagttgtgtcatcaacacgtgacagtcatgagactttaggtttgtgaacttcttatccttcgtgcttattattcgctttatattcgtggagtatccagacggtaccttgatgctctccaagcattcaaacatactttccttctctgccttgctaagagtgtagctggctggactgaagtaatggcttcctttctcctttggttccgggtgaaggtcgccgcgttgttccatacacttcagatcattacgtgcttccagtgtatctttcgactttccatatacacctaggaagccaagaaggtttacagaaaggttcttagtgaggtgcatcacgtcgattgcgtggcggacatccaagaatccccaacaaggtaactcccaaaatatagagttctttttccacatcgccgcgtgaccatctttgctctctataggctggtttccaggcccctttccaaatactactttaagatctttaaccatagcaaacactgttttcccgctgcaatgtttaggcttcgtacggtggtccgccttatgttcaaagtgcttgcctttcttttgtacctggtggtttgtggcaaggaatcgatgacgacccatgtacacaaccttcctacagtgcttaagattcgtactttctatttcatccatacagtgagtgcaagccttgtaccccttgttggactgcccggaaaggttgctaagtgcaggccaatcgttgatggttacgaacagcagcgctcgtaggtaaaactcctcctgtttgtcctcgtcccacacggggacatcttcctttttccacaacagtttaatatcttcgaccagtggtcttaggtacacatcgatgtcgttaccaggttgcttggggccttgaataataatcggcatcattatgtacttcctcttcatgcatagccaaggggggaggttgtagatacacatcgtaatgggccaactgctatagccgctgctcatctctccaaaaggattcatgccatccgtacttaaaccaaaccgtatgtttcgtgcgtccttttcaaagtctttaaattttctgtcgatgtttcaccactgcgaaccatcggcgaggtgtctcagcatcccgtcctgttgacgttcttcagcgtgtcatcgcaacattctagcattccccttgttcctgaacaaacgccttagccgtggtattatagggaaataccacatccccttagcaggaattctcttctttgttagctgcccgtcaacttctcctggatcgtcccgtctaatcttgtatggtagtgctttgcaaacagggcatgcttctaggttctcatactcctccccgcgatataggatacaatcatttggacatgggggaatcttatgaacttccagtcctaacgggcagactatttttttagcctcgtacgttgtctcgggcaatttgtttccccccggaagaatgttcttgacgagtttcaataaatcgccaaatgccttgtcactaaccccattttttgccttccattgcaacaactccagagtggtatccaactttttgtgcccctgctcgcaacctgggtacaacgaagttctgtggtcctccaacatcttgtccaatttatgggcctccttttcaccttcgcagtcttccctggcgtcctgcaacatctgaccaagatcatccacaacgtcgttaccatcagcagctatttcctcctcgcccgtttgatttccttcaaatccaacatactgagcaaagttcggaatattgtcgtcttccacttcatcttcttccatttcaacaccttgctctccgtgggatgtccaacaattatagcttgccatgaaccccgactcaaacaagtggaaatgaatagtcctggatgcagaatactccttctgattcttacacttattgcatggacaacaaataaaacccctttgcctgttagcttcagccactctcaaaaaatagtgcacgccgtcaataaactctttggaccgccggtcagcgtacatccattgccgatccatctacatgagtcaaaaaaaccgcacacaaataattattcttacaataatgacagtcatacaataattataattataagatatctttattcatacaaaaatcataaaatattacaccaaataattcttaaaaactatttgtaaagttttaaactaattttaatgtgttttacttcttttaattttcattttagtttgttttctattatttaagattaactttcactagagttttccttctcaactattttataaaaccttgtttagcaaatgaactaaatttctatatattctttcttccccacacacattttctctctcatcaacttacaactaaattttggagacaaaaaaagtgtgcaaaacataggtgcaaatgtagtatgacaaaaaaaaacattggaggatgaagttgcaaaccttttaggcacctccgatttgtatgtaatcaccaaaataaattcaatagaaattttggcatgacctcccctcttttttgaagtaattttgaagcttgctcgggcagctggaggaggaagaagacatatatataggggtgggactttagtcccggttggtagcaccaaccggggctaaagatcaccgggatctttagtcccggttttaagatcccgggggggcctgataggtcctgacagcattcgaaccgggactaaagatgatctttagtcccggttggtaacacaaactgggactaaagatcaaatatgcccgtttcccttttgaaccgggactaaaaatcatctttagccccggtttttattgcatccgggactattgtggaaatcggccgaccgacgaaagatggtttctccaccagtgaatgaaaaataatttataaataaaatttttatatacgtaaacttaacgatctaaaaacaaaggctgaaaaataaacatatatgaagaaaaacctaaatttaactctaaattcaagtttgaaaaatccgtttttggttgataagtataaagaaaaagatgaggccgtgagacttatctccgacggaatatcacataaccatgcacatatatataaccttcaaaaaacattccattgccatatggaaatattaattagacccaattgaactttttacagctgtgactgcttctacattttactagtttactaccgtgtacaaagtaaactactccagtatataatactacggaagtttctacgatgaaatctgcaggaatctaattaaaaatgtatccattcatgattcatcagtggttcagtgtttgcctcgaatattactgttcaaaaagtatattttgttgttatcgtgccgtacgtacatggaacgtgttaggtactgctgccaatgccatcgcagtataaaaaattaaattaattgctctagctacagatctacacacagacgaggtaaatccatttgacggtaagtgtttatgcccctggtgactgtcacggattatcaaataacgtgacatttaccaaatttatatgccgaac

SEQ ID NO: 16806 - DNA, 10292 bp, Oryza sativa
  unsure (1)..(10292): unsure at all n locations
aaaaacattggaggatgaagttactaaccttttagacacctccaatttgtatataatcactaaaaaaatttcacaaaaaattttggcatgacctcccctctttctttgagaaattttgaagcttgctctcgggctggaggaggaagaaggcacatataaagggggatctttagtcccggttggtgttaccgatctttagccccggttggtaacaccaaccgggactaaagttaggatctttagtcccggttggtaaccgggactaaagatcccgggggccatgacaacgtctgacatctctacaaccgggactaaagatgatctttagtcccggttggtgttaccaatcgggactaaagatcacatatgcccgttgtagccaccaaccgggactaacgatcatctttagtcccggttttaaaaggatccgtgactattgtggatttcggccgaccgaccaaagatggtttgtccaccagtggctgtatcgctgttgttggcggctctggaaacagatatgattattggagtatatacataaaaataaatttatttgatttattttgaaaaggttttttatagaattattttacataaacgtactgaacagtgtagtaaacatgataatcaagccttgtttacttggggaaattttttgagtttggttttcacatcgaatatacggacacatatttaaagtattaaatatagtctaataataaaacaaattacagattctgccaggaaactgcgagacgaatttattaagcctaattaattcgtcattagcaaatgtttaccttgtcaaattatggcgcaattaggtttaaaagatttgtctcataatttacacgtaatctatgtaattattttttttttatatttaatactctatatatgtgtctaaatatttgatatgacagcgtgaaaattttagttctgttaactaaatatagagttacccaaaccgatcgaacagcccaaacgaacgggcccagtctttcacatggaagttaacgttggaagtggtgccgagtcccctgaacgggcactgcagaccatttgactatcaaattctgtggcggctttcgtaatttcattatttcttaaatcgtaattctgacacattaaattacatatatttggatgcagattgtttcggacaatgacaatttcatattgttggacaaccaccaatcacggctggtcaccggacgacaaaaatgtacgtatacgtccggcgaaagcactaaagtactccatgtttctctttacaagcctaaatatgactaaatcttgccactagcgcatgtagtagttaacctaacacgttgcttcagatgcttcgatctatgcagaaatcccaggcaaattaagatagtttattccccagtaacgtcttgttcggttaatccctctcacaatggtattgaggggatatgaaggggatttattccatctctattgggaatggaattatttatcctcaatctcctccaatctctattttttgggattaaacgaaaaaaggtcaaactgtaacctcttctatatccataattattcttgtatatttttagtggtcttggtacaagtacgaaatttttttttgcacgcgattgttaacctatttatgcatgtgtttttcgagccactgcaactaagagccaatagctatcgaggttttgccatagaaggattccattactatccattaaaatcaattttttataggcggctctaacgaaccgaccataaaatgaaacttctagttttacttttttagaaaaaagggaaaattgatgccgtatttcacgaggcatctattcatgcaagttctaagtcacacgtgagggaattttatactcaaaatatgcgaatctagaacatctctctctatgcgtatccttcttaccatcccatatgatagcatgacattggcacatgttgcacttttattttctcattgacatgaatggatataaatcaattgccaaactttaaaataatgttgattataattaatagatttgtcatcaatcatcaaaaaatgagagattataagttcaagtgtttaagattgttggtttaggtatcttaatttgatgattaatgataaatctaactatatgaggctaatgtttttgtgaacttttcttttactagtcccatttgaatatgaaaatggcatgtaataaactttccatattctaaattggtctcactcgtggatccaaaacgtagggtggacacattcatttacttatttgattatgtgcatacatgttcctttatattcttatgtttgcacatcttgaggggagctcattctatatattgatctctaccatgatttgaaattatgtcacctcatttatatattgtttacatcgggttatcatccatcaccaagaagagaaaagattaaaagatcgtacattaaataatttgcgtaattatggctttggtgatttatagtaaactaacttctatcggaagaatgtattgacgatagaagcattctatatggaatgttattagttaagtctggtgttattagtgtttataatgagcagcactttagcaggccggtgtccaaaacttgtagcttgaagatgtcaaaaagataagagaaacccactatgatatagccgtgtagccctaggaagggctctctgccgtgctgccttattatgggcgttcatattcattatcatggagtttgattcctccatgtagtatgtcacgtcctgataaattcattccgaaataaaattcattttctaaaaggaataatagaattaattaaaatttgaaaagaaattggcaaacactaaaatacgtacaagaaaaattcgaatgtggtccggagaatttttgttaaattctccttggtctaaaaggagccctcaaattttacttgaattttcagagcaccggaaataattattaagcaacaaaaacaattatcaaagtttaataaaaagaaaatctaaaaataatcctccttttcctttgggccaagtctagcccaaagcctccctcactctccctcggcccgcggccgaagtccttccctcctccctctctttttccttccctctctctctcttgggccgccctccctccttccccggcccactccctcctctccttcccggcccaccttctcccgcctcctcccgcctgggccgccgcccggcccaagccgccccacccagcctaccgagccgctcccctcccgcgtgcgcacgcgcgctgacgcgcgctgcgcgcgcccgaccgcgtggggcccacgcgccaggccggtcgcctcctttctcccggccggcctccttcctctctctctctctcccgtgcaaacctagagccgttcctcctccaaatccgcgcaaatcaaaccatggattccaaaattaattggggggttttaaatcccattgattcctcttcaattccccccaatttcccccttggatcgtgcccccaatcgccgggaacgcccgcgtcttctccggccgctttccatggccgccggccgccattcccgtcgccgttccaccctctcccgtgctcggctcgcttccctccgctataaaatggaatcccctcgctccgttctatcgttttagccccctcccgcgatctctcgtggtccctagccacctccccgccgtcgtcccctctctcccgtgccgccggccgtcttcagccgcccctgccgccgcgttagcacgccggccggccgtgccgtcgcctcctccagcgtcgccgccacctcctcttcgccggcctgccctccgtttcgcgcggtgaccgccggaggcgcgttcccaccgtcgcccttctctttcctccgcgccggccgcctacagccggctttccctcctcgcccgagcgctgcccggccgtgccgtcgccttccccggcgtcgcagccgcctcctcttcgccggcctgccctctgttttccgcggggacctccggaagtgcctccccgccggcgacagtggtgttgccgccactgttccgccttcggccacctctgccgcgtcgccggtacgccgatcgacgtcgccatctcctccgtcgacgtcgcagcgttgtcctcacctccagctgctcctctgtttcgccggaacgccgtcgcccgtgccggcctccatcctcgtcgtcgccgacgtcccttcggccgccccgttcatcctcgccggctcgtcgtctcgcggcgccgcctccgtcgtcggcatcgcagcggcgtgttccacgccagcctcgcctccgtgcagccgctgccggctgccctcgtcgccttctcgccggccccggtcgtcgtcgtcgtcgtcgtcctctcgtcgtcctcatcgtcgtggcgttcgtccctccgtcaagccgttctcgttcgtcgtcctcgcttcgtcaagtgctgcagccccgtcgtcgtcttcgtcctcggctccgcgtcgtcaagcctcgtgccggccgcgtctcgccttcgtccaaggatcgccgccgaagccgtcccctcgccgttcgtctccgttgtgcccgtctgtctccaccgcgcccgttcgtcgttgtcgttcccacgcctcgtcgcgtggtggtaaggatccgtcctctcgctgccccgtcctcgtcctttcggtgtcgccccgtacccgttgtgcggttgtcgaccccggtacccgtgtaccggtgtcggtagtcgttcgcttgtgcgtgtggtgaccgtgttagtgtgcccgctcggtagccgcgtggtttccacgtgtgcagcccgtgtggtgtctagtggagtccgtttgttggccactcgcctcggttgacacacggggtccgcttccgtcgacccgtggaccgtctctgtgtacccgatctaccgcggtcctttaggttgacatgtggggtccgcatgtcaacggcgcagccttcctgtcttttccaggctagcgcttacacctgttttatagttgcaaaacctaattacaataatccgcaaatctccatataacagcattaaacttcggatgatcatatcttggtcatacgagctctgaatcgacccgttcaagtctcctaatgtttgtataacctaaagaaccctgtgctttcttcttatgtattgttattgcttctttttaggcttgtagctttgcttgtgtgcttcgcgtagctttcgtcgtttcggaggttcccgaagcgtggttcgtggtcgtcgccgaaggttcggaaggccgttctctctgagcaaggcaagtcacatcatccttgagcatattgaatcccagtttataaaattattttaatttaaattaatgcattaccgctttatttaaattcccgcgttatcactgttttatttagccatgcctatttacctttgttatgacattattattgctattgttattattaccttgttcaccctaggataaacaaaaccccaactagtgggtactctatttatggttccactagtatgaatttaggtagatgcttcgctgattaattaggcaacattaggtggttttataactttagactttgggaattctcatatcatttggacactatggaatggttggcttatggtggaattggacatacccctctcttcctctttcaaagcccctaaaacctgtttttcggtggggtttgggtgcatgccagttgtgggaagtagcaccccggccactataaggattaagctcgggcctctgttgcaaagcactaccgtacttccacatgtctagtgggtaaggcttagtttgtggctcagtctggttataaacaaaagtacacggattggagatggatgaagtcgggggtcgatggacattctccagggcaaatgaaggctacacgagctgcggcccggtagtcgagatgtcatggcacagggctggtgtcctgctgctagggggctcaatcctgcctgcctgtcccgggggttccggccgtaggtggggttgggtcggtactcttgtttatggctaggatgggttgggaactatgtcacgtcttccgtccgtataccgtggtggtatgtggcacgtggttacacgtgaggaagatgtgtcttgtgggtaaagatgtacacctctgatcagagtaaaacctattcgaatagccgcgccctcggttatgggcaagccgagcaatgtacccaagttagtgttttaattcttaaaatttgctcaacaactaaaatgtggaatggttggcctgggttggcttgggacgagctgggacccagggtcgggttgccagttcggtctgaatcatcgtaggccttgggttaaggcaggttcgtgtgggttcacgaccttgattaataatactgtgtagctttaggatcgtctttttaaaatggctttgggcaactaagtgacttttaaatgctgttttctgcaaaacttaacccctatatcattaccccttgtacccccttgcattaatcgtgcatccgccggtgtggcttgctgagtactgtggttgtactcattcttgctctatctttctccccccttcagtaagagaagctttggagaagaagtcttaggtggagtcttggcttataccccagttgagcgcctgtgaagatggagccgtaggcccgctagtccgctgctgtttatttttgatggtcaggccttaagtgcctttgtaataatgtaaatattatcgatataataaagatgtgccttttgtatcatgtttgttcggtgtaccccggcttttcctgggacggggattaatacactagcattcgggaaaaggtaattttctcggtcgcgacaagctggtatcagagccatctcgactgtaggataagcccagtggataaaaacctaaggacatattttataaataaaactatttgcgaaagttcctctttttctccttcccctaatgctatttgcaaaaggtttacccttttcttccgtcttcaattttcaactagtactagatggtcagctttgcgaagaagaagatgtcgtcagtcgtttgccgaagctccggaagactgcaggatccgctagcgaagcaaaggaagtagtgaagccagctgtgaagcaggagtgaagatcttggagaacccgtcgcagaacctaagccaccctatagggtagtgttgttagtcgtgtgttccttgcttgtgtgtgtagcgcgtggtttgcatcggtgggtggtgatgtaaccatgcttggttgtttgcttaatcaacttgcagaataagtgaaacaaacaacacatcaacaagaagagttagttcctttaaggtcctgtccctagttctggtctattctttcctggcttgtttcctctctcaccacaatccctgtaacagatgtttaacagagaaaaaggaaagaatgtcagcgggtatgcctccagtaactcaagttttcaactcaatccaccactagcctcaagagagttaacaagggcacacccttggtccattccaagcatgctgcttagttcacagcgaccattggttggaagtcgagaccaaaatcagtatgtgtttgatcgagcatttgccacccaggtcaatgagcttccaatgccagaagagcatgtccccttttgtcatgattgtagagaacaaggacactatgcccttaattgtccatgggtatatgccaaagaagccccttcctttggtttagcagggcagacatcgctaaaccagcctcctcgcaccaagtcaagcttgcagcctagtgtacaaagaagagagcccattagagagaatccattgaatcccggaaaatgctttcctcctagcctttcgtaccacgtggggtcacgtactaagcaagccaaaggcaagaagagtaagaatcagaagagaaaagcaccgatgcgaactgaagaagaagtacgtaagatgactattaccagcaccgaatggcctccagcagggataactattcctagacgtcaaagaggaaataccttccgaggtgcacgacagttgacccagcacctcctaagccatggcggcagagtatctgatagtgaagggtcagatcaagtctcctcggattatgaagatgagtctctccgacatctcggcgaggaagagatggaatcaaaagcatgcccccgttgtggagaaattggacacgttgctagcatgtgtctcacactttgccctcattgtgaggaagaccatccaccaggtggatgtcccacccgcaaggtcacatgttttctatgcgaaggtacaaaccatgtgcccaaggattgccaactcagtgtgttgttgaccaagactgcagaaatccaacgaacaaccctacgattgtctcatcagctagtcagctccaacatcaacatcgacgatatcatccccagcaccaatgctcctcctgctgcacctgactctgcagtaaatcatagcaataataccttcaacaccaaccattctctgcaccgacggcctcagcaaagaattgtcgtcgatggaagaagttgtgtctctccccgacctactccaggccgagcgaagggcaatcaatctcaggagtgcgataccaagcagaagaccgttatctgcttcaaatagcaatcagaaggaagcttctcctgtgaatgatagcaatatgcagtcctaacacatcatcacagaaccaatcaaggatgcagtcactaggacaatgccagctatatctctccagaatcaaaatgagtagccacgtttgtggtttttagttcgctacttatcattgtgtaatcgggagtttgcagcaatcatgtaataaataaatacattcatgattataaacaatgagtttgttatgtttatggaagattcatgttgaggatgcaatgtactgatgttaagcaccttccctttttgtttaaggcaaggccttgcattcatgtaataagggagacatgtgtaataaaaacaagttctatgaggattatttcggaagatgctgatatgggattatgtgtataattgtttactgtcaaaggagacctagggtctcatttcagaggaaccatgttctaacctcgagttaataaccaacctgatgatggaaaagaaaatcaagcgattaaccaaagagacatttgtttggactaagagtttcagacgtgtctttttcggatcaaaggcaatgacagtcagtatagcttttggcgaaaacacttcaaggtttcactgaaaggcagcagaccaaaggaccacatcgtcaccagaagcatccacaactctcggagtgaagagtacttggttgacaaagttccaaaggtgactaatagaagataccagcaaaggtgtttattgtcgggcaaagaagtaggtcgaaaggtgattgatacgagaaatctgaaaagaatacatcagggttgaatgtgtgaaggaatactttgaatgctaaataatgacaacatgaagagaatagcaggaagtaaactgaatgtaaagaaagtgaatccgagttgtctgttcatgggaactattcccagttatgaaccaagtgatatgttcgaagatagtctatagaggtcagattaaaatcgcatctaacagtgaagcttcagatttggcagggtaacgatcaaacaataacaagtccagcagtaaagtcatctggaaaggcgtcaaagcatgtcaagtgggataagttgactctgttgagaaacataattgaaaggcgaaaattatcgaccctcgcatcgcatagcagaagtagctagcacccggagaccaggaaaactaatatgaggcagtttgtggcaacttagaagtagatgacaagcatggtatcctagtaatgacgagctgatctcgacgcatgacatgaagtgggtaacttgtatgaggttgactccaaagatatgaactatgcgaagttctggaactgaagccccatcttcaagtgccgcaacccagtcgaagtcagctaaaggttcaaccagggacaagtcaggtgaagagaagattccatctgcaacaggagatcgagccaagcagtccagagtggagaagttgtgctaggcaagtttgttatagaagacggagcggaagaagtcaggcgagaagagaagaccgcccaacctatcttcttgctagcctcctcgaatctcggggacgagattcctgtaagggggggtggatttgtcacgtcctgataaattcattccgaaataaaattcattttctaaaaggaataatagaattaattaaaatttgaaaagaaattggcaaacaggggatcctctagagtcgacggcgtgcacaccaatgagatctcatnngcacgg

SEQ ID NO: 16807 - DNA, 774 bp, Oryza sativa
  unsure (1)..(774): unsure at all n locations
gtacaagacgacccgtgtagtgcgactgaagctcgcaataccataagccgtttttgctcacggatatcagaccagtcacnaagtacaatgggcatcgtattgcccgaacagataaagctagcatgccaccggtatacagcgagtcgctctttgtgaaggtgacgattacctaacaatcggtcgattcgtttgatgttatgttttgttctcgctttggttggcaggttacggccaagttcggtaagagtgagagttttacagtcaagtaaggcgtggcaagccaccgttaagctgttgagtcgttttaagtgtaattcggggcagaattggtaaagagagtcgtgtaaaatatcgagttcgcacattttgttgtctgattattgatttttggcgaaaccatttgatcatatgacaagatgtgtatctaccttaacttaatgattttgataaaaatcattaggggattcatcagtgttaagcaccttccctttttgtttaaggcaaggccttgcattcatgtaataagggagacatgtgtaataaaaacaagttctatgaggattatttcggaagatgctgatatgggattatgtgtataattgtttactgtcaaaggagacctagggtctcatttcagaggaaccatgttctaacctcgagttaataaccaacctgatgatggaaaagaaaatcaagcgattaacggggatcctctagagtcgacatgcnggcatgcgaccatgtgctaatacgaatgtcaaaggtgggcgcagg

SEQ ID NO: 16808 - DNA, 1269 bp, Oryza sativa
  unsure (1)..(1269): unsure at all n locations
ggagccnatttgaanatcgatatgcagctcganacccncacgccgttnccttgcaccgcccgtttncggcgagctccggccgcccgccactcgtggtacaaccaacgtctggccaatccgacaccaccatcggcttcgcggacccgtgccacagcccggcctatactccatttcccctctccgcctcgggaacaccgccgcctcgtgcaccactgcctaccacctccggccgcctctagccgccatcctcaaccacctcaagccacgccactgcctcggttagatccaccaccgcaagggcaagcccggccgcccatccttttttcccctccaccaccagaaccacctccccaccacgccaccctaccggccatttttttttccgtctccggtcgccgttcgccatcaccccagctgccgccgcgacgcgccggccgcatcgcctccttcgccgcgtcccgctcttccccgtccgccgcccggtcgccgccttccgcacgctcggtgagcccctcctcccactccccttccctttcgcgtgcatcgccactgcccgtgagcgccgccgtcttccgcctactcgccgccgtttggcgccgccggctgctgcctccggaggccgcacgctgccccgcaccatggctcggccgagccggtttcatgccgtgcccgtgccccagccgcgccgcctcgtggccatctgatcggctttgggccaatccgggccgtcggttcccgtggaccggcggtggaccgcctcggtggtcccggtccacggtggatcgacgcccttgtgtcgctgaccggtggggcctgcttgccggcgccgcccctcccccttgatgacgtcagcacagccttttcctttgagaaaataagtaataattgcgcaataattcgtgaataattctagaaattcatataaatggctcaaaacttctaaaattcatatctaattcattcgaactccgaattgagccattcaacttgcaaaattcatttaaaattgagctctacatgtttgtttagtttttatgtactgtttccttggtttttattagagttttcctcgttttgcgcgccagcgtgtagaatccgttgtttcggaagttcgcgttcgcaaggataagagttcagaagatccaagtgaagaagcaaggcaagtcacacattccccttgagcatgttgatcccaatttataaatgttttaccgtttacaaataaatatgcatgttttgctaattacatgggatccgggtattacctat

SEQ ID NO: 16809 - DNA, 646 bp, Oryza sativa
cccggacattatctggaaggataccccttattacaactggtagcagttgtgtcatcaacacgtgacagtcatgagactttaggtttgggaacttcttatccttcgggcttattattcgctttatattcgcggagtattcagacggtaccttgatgctctccaagcattcaaacatactttccttctctgccttgctaagagtgtaactggctggactgaagtaatggcttcctttctcctttggttccggatgaaggtcgccgcgttgttccatacacttgagatcattacgtgcttacagggtatctttccactttccatatacacctaggaagccaaaatggtttacagaacggttcttaggggggagcctcagctagatagcctggtggacatccaagtattcaccaaaaggatgttgacaaaatttacaccttcttttacacatctgcgaaggaccaactttggaaccaatgggcgaattccagggccttctcccactgcttgtccacaaagtttacgccctcccaacgcgttttcaccgttgtatgtttaacctcccaaacatatggccccctttcggccacaatgctatgctatctcctccaccctggacttttgcgttactgttagactacatagacct

SEQ ID NO: 16810 - DNA, 716 bp, Oryza sativa
  unsure (1)..(716): unsure at all n locations
ctggcgnccnnnnnaatatagattctaaatcctgcatgcctgcaggccgactctagaggatccccttccttcatatccaacgtactgagcccagttgggaatgttctcgtcctccacttcatcttcttccatttcaaccccttgctcaccgtgagatgtccaacaattatagcttagcatgaaccctgactcaaacaggtggaaatgaatagtcctggatgcagaatactccttttggttcttacacttattgcatggacaacaaataaaaccgtacacttgttagcttcggccactctcaaaaaataatgcacgccctcgataaactctttggaccgccagtcaatgtacatccattgcagatccatctacatgaaatgaaaaaacatcgtacataaataaattttcgtacaataatgacagtcaaacagtaatgataacataattaaaaactctttcgacaagcaattcttattaacaatttttgaagttctaaactaatatttatgttgtacttctcttaattttaaatttaggttggtttctattttttaagattaattttcatcatattttaaactatgagaataaaatttctatatattcttcttccccacacaaattttctctctcataacttacaacaaaatttggagacaaataaaaatgtgtgaaacatagctccaaaagttatataacaacaaaaaacatttgag

SEQ ID NO: 16811 - DNA, 872 bp, Oryza sativa
aatagaaacaattgcctttccaggtctctatccacgtggggcaatcatcttgaagcatatcaactcaaacccaatgttggatacgagtcatattgctggaatcggctgtatcacctaacccagtctgattcagatttagccgattctagtcgtagccgatctggactccagccgattcttactctgttcccgcaacaatccttatctctggttccgcttcgatcccatcttcacctccgatgctgatattaccaaatttggtcgttaacacagacctaaggagcaagctttgttaattattctctgcagcaactcagcaccaagaacaaaaaagcaatggtgagagtggatctcattgcccaaccccccttctgcatttaaaagagtttctaggtaccccattaagtagtactgaaaaatgtgccgtagaaaaaatcatctgtatccactgtagccacttttcaggaaaccccatacatttcataatggatatcaaggtggagtgctctatagaatcaaatactttagcaatataatttctctctttgactactggcattgatgaatatactctaaagaccatgctaaacagtcttgaattgtcctgcctttgataaaaccatattggttctcatgaaccagtttaggcattacactctgcaacctatctgccatcaatttggttatgaactttaaactgatgcccatcagtgaaattggcctgtaatcattgactgtttctggagaggacttttttggcactaaggttatgtaagacatgtttagcagctgcagatctgtatagcaagcatgaaagtgagctgctaacctgtaaaagtcctgtgatatgatttgccaacatttcttaacaa

SEQ ID NO: 16812 - DNA, 1034 bp, Oryza sativa
tttgtcatatatatatagtgcgcaaaagcaagcccagggaactaacttgtgcggctactacgtgtgcgagtattgctactgccttgcataccaaatcatcaccacaagagagctcgatgtacatacaaataaattcaaaatttcattgggtacgtatcgatttgttgttgactaattaattcatataggttattcgcatgagggataacctcacacacaagtaatttatcgcggcggttcaagaacaactcatgggattcatcaacgaacaaatccttgatcccgagagaaatacaattcataggtcgttagcttctgagataacgcctactactacgtcgaagtcgtagctagctcggacatcataatgaattgtaattaatacatgtctatttttctatatgcatgtacacatttactttagtgtaaatatatattttggtcatatatatatgcacataaaatgttaagcgctttaatatatatatacatatgcatttgcataacatatatatatgtataaatacaaatatattatgcatgtatatgtattgaaacatatataaatataatatatctatatatacatacatatatatatatatctatatatacatacatatatatatatatatatattatgcatatatatgcatggtttatatatatatatatatatatatatatatatatatatatatatatatatatatatatatatatatatatatatatatatatatatatatatatatatatatatatatatatatatatatatatatatatatatatatatatatatatatatatatatatatatatatatatatatatatatatatatatatatatatatatatatatatatatatatatatatatatatatatatctatctatatatagatctctctatatagaaaaatatatatatatgtgtatatatatagagatacatatatatatatatacagatatatatatatatctttttttatttatatacacgcgcccaggtaagagggtttttc

SEQ ID NO: 16813 - DNA, 673 bp, Oryza sativa
tcttgacgaaaaggatgttgagtgcactgccaccatcgatgagggatctgcgaagcttgacgttgcgaaccactgggtctagtaccagggggtaccgccctgggtggaccacacggtaaggatgatccaagcggtcaaacataattgttgtctctgaccaccgaagatattggggcgtgtcgggctgaatagcgttgatctcccgttcggttagcttttgctttctcttggattcataggacaggggtccgccaaagatgtggttgagttccttgcgatggtcttgaaaaccagtcggggcgtcaacttcatcatccttctttaacgtgctttgatctccgtcagaggccttgcgtgcattcttggcgtattgttctgcaaactgtttatagacgaagcaatctttggccgcgtgattggagtttggatgatgcggacattgggagttcatgatcttgtcaaaagtgttgacccgtgaacgttgtcgggaggatggtgtagtagttgccacaagttccttgggtttacgcttgcgatccttgtgattggtacttccactcccccctgtagttggcgtatctttcttcggcttccaagtggtgcccgactgcttggacgcggtaatgacatcttctgcttgaccgtcctgggaggcttgcgcccgaacttgccg

SEQ ID NO: 16814 - DNA, 10079 bp, Oryza sativa
ttagctctgttatgggatgagtcagtttttgtggatattaaaggaatgaatgaaaggtatattgatgcgtatgtgcgtttgtccccggatgctcctatatggcatgttacttttgtatatggtgaacctaaagttgagaacaaacatcacatgtggtctctgttgaacttgctgcgacaatcatctactttgccttggttggtgatgggcgattttaatgaaacactttggcagtttgaacacttctccaagaccccacggaatgaaagacagatgcaggcttttagggatgcccttcatatctgtgagctacatgatttgggtttcagggggctaccatatacgtatgacaataagagatagggagttaataatgtcagagtgcggctggatagggcggtggcagatgacaattggagtgatcggtttaaagagtcacaggttgaacatctggtgtccccatgttcggaccatgcccccattctgctgaaatttgcggttgaagagagccgacgggttaaacgcaaatgtctgcattatgaaatattctgggaaagagagaatgagctcccaaatattattgacgaggcctgggcagtagcaggtgataaaatgaacttatctgaggtccctgagcaaagtcatgatgtccttacacggctggagtaagaggaaatgcaagaatgtgggcagagaaattgagaaatgtcgaaaggagctagctgccctactggaatcaaactcggatagtttagcgattcggggagccacggataggctaaatgaacttctatacagggaagagatgttatggctccagcggtcgaggataaattggcttaaagaaggtgaccgtaatacacggttttttcatagtagggctgtatggcgtgcaaagaaaaacaaaatcaccaagcttcgggatgccaatggagttgttcatagttcgacaaaagtaatggagaatatggccacacaatattttgaatgtataagagagatgaaatgcttgatcactctcctataacccagcttatccaagggaaagtcacggcagcaatgaatgaggagttatgtaaggatttttcggacgatgaaattgcaacagcagtttttcagattggtccgctcaaagcgcctggtcctgatgggtttcctgcacgggtttatcagtggaattggggtcttttgaaggatgatatcagtaaggcagtgaaggttttctttgatacttgggtcatgccaaatggagttaatgagatggctataatactcatccctaaaatagaagccaatggaactaaaagactttagaccaatcagcctttgcaacattatctataaagttgtctccaaatgtctggtgaacaggttgagacctttgctggatgagttggtttctcaaagccagagcgcttttgtcccggggcgtatgataacggataatgcccttcttgcctttgaatgttttcacagtatccaaaagaatagtaatctgaataaaggagcttgcgcgtacaaactagacctctctaaggcttatgatcgagtggactagaaattcctggagcaggcgatatacaagttgggtttttcttgccggtgggttaactggatattggagtgtataaccacggtgaggtattcggttaaattcaatggaaccctgctatctacacttgctccttcgcatggacttcgtcagggagaccctttgtcaccctttctattcctgttcgtagccgatggtctatccttgctcctggatgataaagtggccaaaggagaattaacgcctgtgcatatctgtcaccgggcgccggggatatcgcacctcctgtttgcggatgatactttgctcttcttcaaagcaaacgtccaacaagcaaggatcatcaaaagagatatgcagcagcaacaagccaattgattaatcctgcaaaatgctcgattatgtttggagagtcatccccggtggaggtgagagaagctattaagcagaaactgcagatcgctaacaactcctttgaggataagtacctgggtttccccatcctagaaggaagaagaaacaaaggtaaattttagagtttacagaaaaagatctggaagagggtgctccaatggggagaaaacttgctgtcaagtggtgggacggaaattttcataaaatcggtattgcaggcaatccttgtttatgtcatggtgatttttcggctgccagattcggtctgtgaggacttaaacagattaactaggaacttttggtggggggctaccaatggggaaaggaagatacattgggggtcatgggacaacctgatcaaaccgaaaaaccaaggtggacttggttttagggatgttaagcttttcaatcaagcacttcttgcaagacaggcttggcatctcattgataaccctgaaagtctctgttctagggtcctcatggcaaagtacttccccaatgtttcccttgttgatacttggtttggaggcaatgcctctccggggtggaaggacatcgagtatggcccgtccttgctaaaagaaggaatcatctggcgcattggtaatgggagatgtgtgaggatctggagggatccatggctgccaaggaacttctcaaggagaccgatctcgcaaaagaacaactgcaggttaaaatgggtgtcagaccttactgcggatggtgtttggaatgaagagaaaatcaatgaacttttcctatcgatagatgctgaaataatttcaaaaattcgtatttcatctcgggaggaagatgttttccttgcgtggcatccagatgtacacggcaggttttcagtgaggagtgcatactatttggctctgaatctcgcgaaccagaatgtggctgggccgtcttcgggaggtggtaacaagtcttggcatctgatatggggatgtaatatcccccagaaggtgaaaatttttgcatggaagatagctaccaactcccttgctactttggttaacaaagcttaaaggaagctcgagcgtgttgccacttgtgtgatctgtgggttagaagaggaggatgcctagcatgctctttgccgctgcactcaatcaaaattcctgttactagcgatgcagagagccggttactttccaagattttcagatgattatagcgacaacccttcttggttttttatgcatctggaacggctttcggactcagagcgtgctgcttatatgatggtgatgtggcataattggttcatccgaaacgagattgtcgatgacaaaattcctccgtcgattgatgcctccaaaagattccttgagagctacattcaaacactgtttgaaatccgacaaaagtcgagggatgtgtcaggcaagggaagagttctgagattgattggaataggaagctccttgcttcctccgggcctggtttggcagcgaagaagagatgggtgaaaccatagcgagggtggatgaaagttaatgtggatggttcctttgatgccctgaatggaaatggggggattggtactgtcatgagggattgggaagggaaggtggtcttagcttcttggaaattcctcaagactggcagtagcgcacttaaagcagagctcttggcatgcaaggagggaattgcaatggcacgcacctggacaaactatccagtttaggtagaaacagattgtgatgtagctgtcaaaatgatgcagtccaaggacaaagagctctcagagctagcctatgtgatacgcgagattagagatctcctcgctggaaatcgggaatacacacccaggaagacttacagaagccaaaacttagtttttttttactggaaatactgtcaggactttgcctcgcagtgtaattttataaattgaaaaagttatttacaaattataagagaataaacaaaagagatcaaaggatcacattgtttgtaaccaatcaaaaacaatctgttttagcggatccttcattctgcacaaatgcagaagaacttcggctttgaattaagccctccaagaactgaacgagggaagctcattgtgaaatttttttccatttcatcgcttccaaatgtgccaagcagcaatgaagaaaatttccaagaaacctctctgattgaactgaatgcgagccaaaaccaccatctaaaaaaattctaggccaggattccatgtaattcccaaatgttgccagcaaagttgactgaaagggcagaagaaaaaaagatgttatcttgtctccttgatattattccggcataattcacaagtgagatcatctttttcctttgcacaatgtcgcctatccagcatatctcttgtgttaagtctgtctctgaataaaagccaagcaaaaactttaatcttcattgcacatttggtcttccagatccagacaaaaggcctcgacacatgcacatttgagtatgtcagcttatgaaacctcttagctgtgtatttgtcagagttccggatgaaagaccattcatcaccattaccgttcagcagagagagaagaccattcctcctctagaacagtgaattctccataagcctgggtgctcaggggcagtaaaaaacaatcctcaagaggagtagaacctatttgcttaatagagagagttttatctaaggcaaccatatataaagatggaaaagcattgcttcttatcttatcattccaaatgtcatcctagaaaagagctgaagatccagtcctgatatggcagtttgagattcccctgaaaacatcagtcagagccactatatccctccaccaaaaagatcctttattccaaactaaatgtggcactttagagctataataagagttccatatcagttgaacccacggcagatcatgtcctttgtaaaatttgactagatgtttaagcagaagcgctatattctgaactcttagattgatgactcctagtccaccttcatcctttggtctgcacactagatcccaagaggctagagatcttctggttgaagttggattgtttcccctccaaaggcaatttttccttgcagtgtcaatagcttttaccactgaaacaggcagctgcaaagaacacatgtagtatgttgggattgaggaaagcacagagtttatcaatgtgagtcttccaccttgtggcagaaattgtgagcttgctattaatcttctttctaccctgtctaccaagggtgcaaaatccactacccttggcctagttgttcccatgggcaaacccaaataagtaaaaggcattgtgcctatggtgcacccaagcacaccagcaaaaagccctgcattctcatgagataaatcgattgggtagagacaggacttatgataattcactttgaggccagtagagtgtgcaaatgaattcaacaatgccttgaaacaaaacacctctctctccgaagctttgagaagaattagagtgtcatcagcatactgtattactgggaaacccttctcatcaagttcattaattggcttggtcaatagactgttgacgtaaaacacgaggcctgggagatccgcttaactccagtgcaggtccaaagctcgcctttgggtttgttagcgtgccagttgatttgatcctgcaatcaacaagaaatagaaacaaagagatcgcggttaaatctataaatgatagccaatcagctaagtgccgatgacatatcatttatctttgagccgatgtcatatgtaaatcgatcggtgactataaatagataataaagaactaaacctactcgatcggctgtagatattaccaatatatagttcttatatcgatatatatttaaatcaagtgattgggatagatcggtcaccatgccgagacagtataaatcacttggatcgaaatatatattaataacaggactatatatgtttatagcatagccgatcatatagatctagcatgtatcggctaatactccgatactactctatatcaggatattaaaacaagtataatatatcaaacaaaagcttaatatacttaaatgaaataagatcttggcataaagggcggatttaacatgtcactgaagcatatagagcgaatatggttaaatcagataagaccgactgaagctccgatactaccctaatcggcaatcagaaggcaggctagagattgatattctaagcacgacttgatagatcaaactcaactaatgcagcattaagtataaaaaaatgaataatatctagacaatcaagccgctggaagtttcatagagtggtagatatcttatataatctaaatcaacatcaaaatctaacctaatcggctgccctctactaacagatgttagccgattataggttagatagcgatcttgccagagattatgtacgatatatgataacttgatgaattacgtaaacacgattagagtatcataaagatggaagcactaatcccgagaacacaagccgtcataacaagttttacctcttattgaagatcgaaaccgatgcagctcaacccgaaagcaagaacccgtcgaaataaaactaaagcaaaaaggtggcgatgcgccgaaattgtattgaacgtgtgtgttttttattacatagggctcggggtctatttatacccgagaattacaagatatgtccataccggacatgactattatctctaacaaactctaagataccataagtctttgcggcagacttttgccctaagcatatctctatggaaattacataaaacatcctaattaatagatacaattgccttttcaggtctctatccacgtgcggcaatcatcttgaagcatatcaactcaaacccaatgttggatacgagtcatattgctggaatcggctgtatcacctaacccagtctgattcagatttagccgattctagtcgtagccgatctggactccagccgattcttactctgttcccgcaacaatccttatctctggttccgcttcgatcccatcttcacctccgatgctgatattaccaaatttggtcgttaacacagacctaaggagcaagctttgttaattattctctgcagcaactcagcaccaagaacaaaaaagcaatggtgagagtggatctcattgcccaaccccccttctgcatttaaaagagtttctaggtaccccattaagtagtactgaaaaatgtgccgtagaaaaaatcatctgtatccactgtagccacttttcaggaaaccccatacatttcataatggatatcaaggtggagtgctctatagaatcaaatactttagcaatataatttctctctttgactactggcattgatgaatatactctaaagaccatgctaaacagtcttgaattgtcctgcctttgataaaaccatattggttctcatgaaccagtttaggcattacactctgcaacctatctgccatcaatttggttatgaactttaaactgatgcccatcagtgaaattggcctgtaatcattgactgtttctggagaggacttttttggcactaaggttatgtaagacatgtttagcagctgcagatctgtatagcaagcatgaaagtgagctgctaacctgtaaaagtcctgtgatatgatttgccaacatttcttaagaaagaacccattaaacccatcaggtccaggtgctttgtctgatggaatgaccttaataagactgtccacctcctaagtgtagaactgattaaccaaacaatccaagttttccggattggggaagagatccctcaaatcaaagtccattggaggcaagagcgaaattcccattctgtttttgaaactatgaaaaaacagatctgctttgtgattgtgtccagtggctatctgcccatgctgatcctgaacctgagaaatggagttcgatctatatctttccgtagcaatggcttggaagaatttagtattttcctcacccaataatatccatctattcgtgctcctttttttttccaataaagccttttaaactcaagaagcataaggatctgtattttgataatttctctgaagttccattcaaggatggacaagggccgatgctcttctattaggtctaggaaattgattacagcattacaattaaccaaaagggcagttaacttagacaagtttttactccaatgtagcaaacttttcctcaaacactttagcttgaagctaatgcattttgccggatcttcataaccagggtctattgcccatattctgctaacaagctcaaagaatccttccatttcaacccaataattctcaaatttgaaaattggagactttggaatcttggtatcaatttgatctacacagggcacatgatctgatatattcctggtcaatgggtggacagtagtgtttgggaaaaccaaagtccaagctggacttgtaaagatgtcacgcctagaaatttaacctaaatttccagactattttgcgtagtaaatccctgtccaggaccagccagggtacgcaaaacgacaagtaatatacagttccaaacgtaaataaagcgtaaaatacttacggaagagacacttagtcctcacaccgaaacagaacgacagcagcggaaaaaggcgatcctagcggggcttcagctccactccacaggcaaaactcaactggggtctgagccttggtcctctaacttcgtcttcagctcagaagaactacacttctgaaaaggggaaataatagcaaggctgagtacaaccaccgtactcagcaagccacaccaacgatgcagatgtgcaaggggatacaaggatggtttgtggctatttgcataaaggcagttgtaaaacattttattgagcaaaacagtaaaacggttgagtaattaaagtaatattgaatctccactgatcaacgctacaccacgttgaacaggcccaaccaacccacctggactacagtgcattgagtcgatttattaaggtgggactaatcacggtgaatctggtcgaccgcccataaccgcgggcacggctattcgaatagttttactctgatcagaggtgtacaactgtacccacaagacagccccacgacacgtttccgtgcaccgacatgccaccacgacatatcggaaagaggccgtgacaggacccttcgtataaccccctctaaccaagcacaccacacctcaggtttcacccccactcctcgcaaggcagcgggcagtcccctctcgtgcctaggtgaatccggaagccgcataggccgtcgcagggcccatccaaactccatcacgcccacccttgcctggatgcgtcggctagaggaaagctacactacaagcccagccgttgcccacgctggcttgtggtaagtacgataagttcttccagggcatcccgcgaaccggtccttaattgccatgggtgcgactagcaaaaccatgcacccacagcccaccattcagtcgcattttagttggataattacgaccatgaagcatggccagatgtctcgagcacgcagctcattccgatactaaaaggtctaatactgtaattatcccatcaactgagctagtggtaattaagcatggctaagcatatagttctagctagttcacataagtaacatgagctagtcgattcattacccaaggttgacaaagaacaaatatcaagtaaacatggcacaagcgagcagataggtaatacccggatcccatgtaattagcaaaacatgcatatttatttgtaaacggtaaaacatttataaattgggatcaacatgctcaaggggaatgtgtgacttgccttgcttcttcacttggatcttctgaactcttatccttgcgaacgcgaacttccgaaacaacggattctacacgctggcgcgcaaaacgaggaaaactctaataaaaaccaaggaaacagtacataaaaactaaacaaacatgtagagctcaattttaaatgaattttgcaagttgaatggctcaattcggagttcgaatgaattagatatgaattttagaagttttgagccatttatatgaatttctagaattattcacgaattattgcgcaattattacttattttctcaa

SEQ ID NO: 16815 - DNA, 4474 bp, Oryza sativa
  unsure (1)..(4474): unsure at all n locations
ttgtgcacgggtcccccaaaccaattggtgttgncggattggcccgccgttgggtgaacaancggtgcggccggccggagctcnccggaaaccgccggtgcgtgggaccggcgtggggaggggaaagagagcncggctggctcgggtaaggaggggaaaagagagaggatgctccggggttcgttttgatagggtcggagcggcggaaacggggccgagaggggcggcaaccggcgcggaagtggggcgccgacggggggtggtggtggctcggccggcgccggtttttgtgggacgagcggggaaaatggtggaggacgtggaggggatcgtgcccacgtcgttggatgcgagctcgggtgcgggagggcgccggattttgcggcgacgtgggcggcaatggcggttggggttggccggcgagaggtaggaggaggagctgataggtggggcccacggtcccacctgtcggccggatggagagagaggagggaaaccgggggacgtaaagtagactttcgcaaggcgcgggccggccgagagagggaggtggcgcacggcccacgggagtggaggggaaggcttgggccaagcccaaaagggaagggaggggattttatttgttttctttttttttaattgattaaatgaactttgtgctattaaaattatttcttgagctccgaaaattcacagaaaatttcagagagtattttagggcaaaagaatattgcaaaatattcctggccaatgatttttaagggaaaattttaattctcccattaattcactcgaataaattgctttaacttttaatataatttcttgaaatgcattattaaatgattttaaaacccgaacgaaaatcggggcgttacaaaagacccaatcaagccgctccaggagaggactgttctgcatattgctccaggtaaaacttctcccttttaaaggaatttctagcagaccaagagaactaattacatcattaaaaatgaatatatcattcatgtcggcttccggcttatttctgtcctcaactgatcggtagaaattaaagtctcctagaaaaatcctattatccattgtcccaaaagacatatttttcagccaactaacaaactctgtacattctgggccactacatgggccatatatgcaggttaaggcccaagcttctgaagattgccttgaaacaaagtttactgtaacagaaaaactatttatttcccctggggttcccgaaaacactttagaggcccaaaccactaatattccacgtgaagcacctcttgagggtgagaaagcaaacacatcaaaacgcttagaagcaaaagtcctaatatcagccaaagagaaattttgttttttggtctctcggacatagaaaacctggcagccactttcctctatcttttgcctcaaagaaaatagtttggtatcagcattcatgcctcttatgttctagcacagcacattctaggatttaaacacattattcatgaggaaaacatttaggagtgcatatagatacagagctaactaaattagcctgcatagagccatataaaataagttcccagcaaacacaaaaggaactgacactgatcacagtccgacagtactgaaaaacaaaagatcctgctctgagcaaagaaacattattcattcctaatcatccatgtttggtcggggaagcttcttccttttttctccccctaagcttgattcagccacatcctcaggattcaggccacatagatccacccccatcttttgcaacaaagataaagaacaatcagaaggggaagaatctgagtttatatcatcttccagaacattgaaatcagattcagtaatcttgctgccagggataaggatttttgatatacctgccaactccttcagctttttagctgactttccccttggcttgcctattcccagtcgatgatcaaatttgagctattggttggcattaagaagcctagagctatgccttctagtaggattgtacataatagtcttcccatccctttttttcacaggagcaataggaatctgaagcactgctgggatgacttctggacttgatggctaggcttgcaaaggtgcaacatctaaaatctcctgatcagaatgcccatcatcagagggggaagacaataaagcccagctagaatgtgctctttttactacaggaggagcatgatcaaacattgccttccgctttaggagtaccagggtcatgaaaggggaactgaatggcagagatgtggggctaggaatttgagctgcctgcatgatttctttagctttgcatagatggtcaattttctccagcaatcctgccataggataaaaagatgggtgctttggtccttccctgtcagctatatccttgagcctggccagaaacagctgcacttgttgctcttgatcaatcagattaagctcctgctcctcttgattaggcaagataatcaattgccccgagttttcttcgacctggcccattgggtgatcctgaccccaagcatcctctatttctgcttccgcagcctgttgctgttgcacgagatcatcccaaacaccacctcccccctgattaccaggatgtcctagttgccaaatatttccatcatctgggtcatcggcattatcatcattaggcccaggctgtggtccagcaggaggtaaatcatcttcaggtgggatgtttgcaaaatctccatctagtacaaaaacagaaatagtccatgattcacctccaccaccattacccaaaggttcctgtaacactatctttcgggggacagagtcaagatccctatactttgctctcacaaacactcttcccaacatctgatctctatcaagctagaaagaaagttgtccaaaagaagctaccgctagatttatatggtgacgatcaacaaaatctagcgggaaatccaagagaagaaaccagccttctcgattaaagtggcaagcacgccagttctgcccttggtcatgcttcacaagctcaacagtatgcatcccatcatatgcagcagggggagagtttactaaggcatctctatgcatgactgaacgaagctggaacataccaactgtcgaagggtgacggtaagcagtacgaacctcatacatgtgtacttcaaagatataatccgagataagcgcccggtgatgatcccattcatgctcagggatggccggctctacaatggtgatgcaaacatcctcatgtcttcgaggcggatgctgtgggatggtgagatcaacacgcggcacacgcaagttaccaccttgatgaaccacttgcgcttgacgaagaaaacattgcggggtagggttgagatcagccattgcaagcgaggggaaattttgcggattagattgaacagtgttcctgggagaggaaggtatatggggagaaaccgccgtctttttggccggagaagatttagatctccaaactaagttatcctcagaactcagtttcggaaacttccccacaggttgatgggccttagtgggcctagtggcacagaagcaggacatatgaccagcctccaggcaggaatgacaccgaacaggcccagagcaattagaagcaatatggcccttatccaaacaacgcacacaggaaggcaagaaatttgaattcaagtaacgcagagaaataggatcatccttcgtgattggctccaccgtcttggtnnnnnnnnnnnnnnnnnnnnnnnnnnccttcaacccttgaagtctcgtgaaaaccgatcttctctcctggagaagggccttcaaacattgaaacacgaatttaaccgagacgtctctttgttgaacagcttgggcataagatttgtctttctgaaccttagaacttttgtgcactgacctcttcttagaaggcaccaatgcccactcctcagcacaatcacggctccaagactcaaattcccactgccaattaggacccccatttctccagagataaaagcgaagggaaaaatcatcacaggaaaaagatctaagacgataaatccatagaccaacttgcttagagaaaacatcaaaagaaaaactccggtctaacaaatgctggacattgagatccgcaggagaaccaccaatggcggctcttaaagccaaagccacagaagaattggttaaccggaaattagctctcaggagatcaacagctaaccggtagtgcatagggctgaacttcaaagagaaatgcaccggagaacgaaatcgaagacgaactttctctcgaactgcatcaccaggggagaagtcccaacccctcggcggtgccggcattaccattacggtgatcactagaaatcgcccatctcatcgcctccgtgaaatccggaagatcccccactgttctcaacacaactaaatcttgagagccaaaagggtaccgagctgtaatatcatttcaaatgggcccagg

SEQ ID NO: 16816 - DNA, 2602 bp, Oryza sativa
  unsure (1)..(2602): unsure at all n locations
ccgcgccattgatgatcgnattcctgctcggtacccaatacaaaatggaagagggaattgctccttgaggggtgtttgtgaagtgaagtgagctcctctatttataccatccaaatgatggttgtatggtggttactggtccgctaaccgtgcataaccgccattggggtgcagcaggaagcaacacgtggaggatcaggccgagtggtgccaaccagggttcagcaaccaggccaaccgtcatactccaccgacttttgtcggtcgatgacgggtgggcccctatgatggttcctgggtggttggttccgccctgagtcggtttgagctgacttgtggggcgttcaatctgtgtgctcacacgtgattctccaggtgtttccttgaaggccagcttcatttctccttcactttgatgtataattcctgcatccaagttaattctccaatcctaatgcaactattatttattattggtacgcatgtaagaaatgctaatttttcctttattcattgtgctagttagcggtcaaaaatgatatttaagaaccgtcaacacaatataggactacacaacacttggtaacacatcgggccaaacagtgaagggcatgaaagcatgtgtgaggtgcctgattcaaataggaggcatgtggctgaatcactggcggaagaccgtgtacatgcaccatccgaggttccttaggctgaatcatccgtaccgccaaaatacaagtgatttcgacgggatggtggaagagggagcacgtccaaagttcataatcggtagtgatatatgggatgaggtgaatgatctcgaagttttatgtggtaaagggagtggaagcacacctgcatccacatcaagcggtgagagccctctttggaaaaagaagtctatctatcgtactggaaagactcccgtcacgcagttgatgtgatgcacgtggaaagattgtgtgcaaaaacatgctctgagtattgttgaacacatcggtcaagacgaaggacagtttgcaagcacgaagagaccttgaagacatgaatatcaggaaagagctgcatcctcaggacaaaggaaatgaccgctactacctccctccagcatgctatactcttagtgctgcagaaaaaatgagtacgtcagaatgtctgtagggtgtcaaagtcacatccggttagctgctaccactcacaatcaaaggtattcttccagataaggcctgagatccaatcagcaagttgtgttagttcttcaaagtgatgaatcacaaggttatcgattcagcttcgttggacaagcttcaggaggacgagattcgaactctttgccagctcgagatgttgttctctctctcatttttcaatatcattgtgaatcttgttgctcatcttgtggaacaagttaagatgctaggtccaatgcatctgcatagcatgtgtgtttttaagacgtttctgggcatcgtaaagaaatatgtccggaatagatcgaggcctggagacagtaaagtcaagggttgaattatagattacgtggatttgtaacttatcggtgtatctgtgccatgtcatgagggcaaaatgtttggaaaaggaacattagggcataagagaaccactgccgacaaaccacgagcatgtcgtgtaatattggagtacgtaaaatggctcatatgtccttatgttttcacacaaagctcatttgtccttattgtttcacataaaaggaacggttagagtataaatgcatattatctcatgaacgaaacttttgagttgcactgatttgtataccatattagcgtatcaggcacagatgtcccgagtcgaattttagctgagacatgagtgtggcctgaggaaggtcgatgaattgtttctttactcgttaaatcaaacttataaaatgttgaacgtactggtgagtggatcaagtctataggattacctgcactactgcacaggaaaagcaatcaaggcagggatttaggtatctcaacgaatcattcgtacggatcagcgctgcaaacctggagtcccgtcaggttttcactcctattaaactaatagtttcgcatatatatttggtgaatgtcacgtaatttgataatccgtgacagtcaccaggggcataaacacttaccgtcaaatggattttactcgtctgtgtgtagatctgtagctagagcaattaatttaattttttatactgcgatggcattggcagcagtacctaacacgttccatgtacgtacggcacgataacaacaaaatatactttttgaacagtaatattcgaggcaaacactgaaccactgatgaatcatgaatggatacatttttaattagattcctgcagatttcatcgtagaaacttccgtagtattatatactggagtagtttactttgtacacggtagtaaactagtaaaatgtagaagcagtcacagctgtaaaaagttcaattgggtctaattaatatttccatatggcaatggaatgttttttgaaggttatatatatgtgcatggttatgtgatattccgtcggagataagtctcacggcctcatctttttctttatacttatcaaccaaaaa

SEQ ID NO: 16817 - DNA, 658 bp, Oryza sativa
tcttccagatccagacaaaaggcctcgacacatgcacatttgagtatgtcagcttatgaaacctcttagctgtgtatttgtcagagttccggatgaaagaccattcatcaccattaccgttcagcagagagagaagaccattcctcctctagaacagtgaattctccataagcctgggtgctcaggggcagtaaaaaacaatcctcaagaggagtagaacctatttgcttaatagagagagttttatctaaggcaaccatatataaagatggaaaagcattgcttcttatcttatcattccaaatgtcatcctagaaaagagctgaagatccagtcctgatatggcagtttgagattcccctgaaaacatcagtcagagccactatatccctccaccaaaaagatcctttattccaaactaaatgtggcactttagagctataataagagttccatatcagttgaacccacggcagatcatgtcctttgtaaaatttgactagatgtttaagcagaagcgctatattctgaactcttagattgatgactcctagtccaccttcatcctttggtctgcacactagatcccaagaggctagagatcttctggttgaagttggattgtttcccctccaaaggcaatttttccttgcagtgt

SEQ ID NO: 16818 - DNA, 1648 bp, Oryza sativa
ccagacgctcgatggttaggtatgagagggttccatatttctgtttcatatgtgggttcataggccactctgacagagactgtgttaagaaggtagctaataatgatgcgcccttccaatattctgctgagctacgctgctcgcctttgaagccatttgagaagaaggtgagcactgttaaggggacagaggcttcgactgcttctcacaggttgtcgttccgcaaggctggtagtgcaagctcatcttcttcacggagatatcagggggaacaatgggatgaagcagtccctccaagggtggacacacattacggctttgatgctcaagagaaagtgggagatgaaacacttgatgaacagttagctagtcagacagacaagttacatgtttcagatgaaaagggatagctacaggacatgatggctacaggatcgacaaaactgaagatgggatccatgtccgggttgtcgtcggcgaagcagcagatggttgacatgatcccggctattgcgaatttacatcaggcagcttcttttggggatgtttcttcagaagacactctcagtgtccataagagacgatccacagaacaactcgggaacaagaagtcagggaaagtccaacaagccttgctgcagcatgtgttggaagcagaggaagacatgaagaagaaggaaggtgcagggctgcaaggaagagaactgaagcgtttcaagaagacagctgcggacggtatgaatgtgggagaattggaagtgaccagcgccggggctgctggtacactggcaggtcctatgttgggatcccgccaggaacaatgagttgcctaagctgtaactgccgtggaattgggaacgccacgacagttcgcgacctatgtgccttggttcgcgaggcaggtcccaagttagtttttctttgtgagactagacaaaagatcgaaacggttcggcgtcttcgtaatagattaggtttaaaaagttgtgttggtctcagttctgatggtttgagtggaggtttagctctgttatgggatgagtcagtttttgtggatattaaaggaatgaatgaaaggtatattgatgcgtatgtgcgtttgtccccggatgctcctatatggcatgttacttttgtatatggtgaacctaaagttgagaacaaacatcacatgtggtctctgttgaacttgctgcgacaatcatctactttgccttggttggtgatgggcgattttaatgaaacactttggcagtttgaacacttcttcaagaccccacggaatgaaagacagatgcaggcttttagggatgcccttcatatctgtgagctacatgatttgggtttcagggggctaccatatacgtatgacaataagagatagggagttaataatgtcagagtgcggctggatagggcgggggcagatgacaattggagtgatcggtttaaagagtcacaggttgaacatctggtgtccccatgttcggaccatgcccccattctgctgaaatttgcggttgaagagagccgacgggttaaacgcaaatgtctgcattatgaaatatttctggaaagagagaatgagctcccaaaattattgacgaggcctgggcagtagcaggtgataaaatgaacttatctgatg

SEQ ID NO: 16819 - DNA, 691 bp, Oryza sativa
  unsure (1)..(691): unsure at all n locations
tgatgaagggataaaagaattaataaaaagaatacaggagaagaaggacaccgatttctcaaatagacgatcaaggcacagtttggtgcggtccacacatctgtgtaccggccaagaaggagttaagagatcccatcctaaaggaagctcatgagtccgcctactccattcatccaggaagtacgaagatgtaccaggatatcaaggcatatttctggtgggctggaatgaagcgagatgtcgcagaatacgtggcgttgtgtaacatttgccaaagagtcaaggcagagaatcagaggccagcgggtctgttgcaacccctaccgattcccgagtggaaatgggaagagatcggaatggatttcatcaccggtttgccaagaacccctagcgggtacgactccatctgggtaatcgtggaccgactcacgaaatcagcttatttcgcgccagtgaaaaccacctttgatggaaagaaactagcagaactctacatgacccatgtcgtgtgtagatttggcttgtccaagaagattgtgtcagaccgaggcactcagttcacctcagggtctggaagcaggtgcatgaagctctcggaacccgatctaaattntagtacaggttaccattcgcagaccgatggtcaaacagaaaaggtgaaccanattctagaagacatgctacgtgcgtg

SEQ ID NO: 16820 - DNA, 690 bp, Oryza sativa
tattgctattgttattattaccttgttcaccctaggataaacaaaaccccaactagggggtactctatttatggttccactagtatgaatttaggtagatgcttcgctgattaattaggcaacattaggtggttttataactttagactttgggaattctcatatcatttggacactatggaatggttggcttatggtggaattggacatacccctctcttcctctttcaaagcccctaaaacctgtttttcgggggggtttgggtgcatgccagttgtgggaagtagcaccccggccactataaggattaagctcgggcctctgttgcaaagcactaccgtactttcacatgtctagtgggtaaggcttagtttgtggctcagtctggttataaacaaaagtacacggattggagatggatgaagtcgggggtcgatggacattctccagggcaaatgaaggctacacgagctgcggcccggtagtcgagatgtcatggcacagggctggtgtcctgctgctagggggctcaatcctgcctggctgtcccgggggttccggccgtaggtggggttgggtcggtactcttgtttatggctaggatgggttgggaactatgtcaacgttttccgtcccgataccgtggtggtatgtggcacgtggttacacctgaggcaagatgtgtcttg

SEQ ID NO: 16821 - DNA, 7586 bp, Oryza sativa
actgcgcccctttgaaaatcgagttgcagctcggtaccccttgcattaatcgtgcatccgccggtgtggcttgctgagtactgtggttgtactcattcttgctctatctttctccccccttcagtaagagaagctttggagaagaagtcttaggtggagtcttggcttataccccagttgagcgcctgtgaagatggagccgtaggcccgctagtccgctgctgtttatttttgatggtcaggccttaagtgcctttgtaataatgtaaatattatcgatataataaagatgtgccttttgtatcatgtttgttcggtgtaccccggctttttcctgggatggggattaatacactagcattcgggaaaaggtaattttctcggtcgcgacatagtactgatgcagctcttgactatcagtacccattctaggtaactcatggtcgacaaaactacaaccaatggcatccctagctggagcgctccctgatctaggatcttatgtagatctagttgttttggaggtaagaatgactattacgcctttccttttcttttaaattttcctctttcacgatgcagcctgctagacaccatcagtggagatgaattggcctaagtacttttttgaaggagggcgatctacggacatttcatcgaagtctgtagcgtgggactgaaaatgagcttcattggccagaggaggtcaaggaactttagctgtcgaaccagagcaaattcggaatgctgctaatttgaccttggagtaatctttatgatgatgagtgttggtatttgatacgatcaaacaaacatccgcaagtgcacgaatactgatgtagcagttccccttagagtattctaagggtatcgaacacgagaaacgtgtgtgtactacctacgaacaaaattcaatccatgggcaacaactgatgttcgtttggctagaggtgatccctatctcttttagttagctacataagttaaaagtaaaactctatcgaatgctttgctggtacaagccctccttggtctactaggctgagtccggccttaacctctatgatgtacccgaatgtagagggatacaacggacgaataaagttgtcaccacccatcggctacctcactttccgtggagcatacaacaaacaaaggtaatttctaacctaaacacaacgcctaagttattaattactactctagtcttgcgcatgaacttcgttctttatctagagtcttagtactagagcactcagttgcacactaagcgatgagcccgcaccaatgagaatttatcccacttaaataaaataactaaagaacataagaaaacttgaatacctactttataaaaggaagcatctgctgaggtacaagcgagagaagaaggccaacaatcccggttttctccggaactccgttggatgaatgccgatagtccggcacaactccgtaaaattattaacgaggattatcttgtgcaagggcatactttgaaacattgtccaaatgtctctattgtattttctttcctagatatacaatggaaatttcgttacctaacctggaattttacttgtataattgctgggaactaaccattcctcttgtttgcacaagagggagctcgaaggataagtgtttctgccggacaacttcgagcatggcacgaaatgccgccatggagtagatgccactcattctcatcccgaagttttcgtgacttcgggcgagaatttgcggttgcccctcaacagctgggaaagcaggatttctagacaaatgagatgcatgacatgttaaaccagcatgtctgggagacccattcgtggcggcagcataccaccgactagatggtggacatcaacaccgccatacagcagaattaggccgacatgatggcttacttctgatcacagggattcaaaccccatcacgcaccccaagaagaagctagcttgagggagtgccacccccaccaagataacttatatctttacatttttgcatttgcatcataaaaagaaaaaaaagtaaaaatttgcaaaacataaaaataccaaaaatatttacttttgtatacgtgataagaatgttttaagttttcccagttgaaatgacgaatagttgcgatgtttttatttctatctagtacttagtttggagcttaaccttcactatagtttttgagtttgttagttaaaaacaaaatctttgccatgaacttgaaacttgtgggttgcaaaaagcatgatccaagtctagattgttgttggatatgagttggtgaaatagagttgctatgatattactctaagtgatattggaatttcagagcatttttttaaaaaagtaaatttaaaagttcctcaacgatcataaattcccaccaaagccatatgatgatcttaactgaataaacatatgctcatatgccagagtcaaatggttgtgaccctggtgagattcttttcatgcttcattgatcaagatacccactcacaagtacccaccatatatgcttgatctctacattggagattagcaaaaacatacctttcacctacgatagttgtttaacctctacactaggggtgagcaacatttccatccaccacaataaatactccacgatgtcatgaaaatatctctcatagtaatttgcaataaaagatggctgaagaaaaaaaaagtcgagacaaaaggtaaaatattgtcaaccatcatgagaagaaaaaaatgaaaaaaatagttggagaaaaaaacagccacatctcaatgttagaataaaagagattttatgacaaaggagtaccatatacaccaccatatagccacacattttgcacatcttgatcaaggttgtatgatttgttttctccttggatcctctatgtgattttgcaatatatgttgctggccctcaatcctttgctgagatattctctaatttttatgacgaggaacaagaggaagttcctgacattgcgtacgaggaaaaagaagaagaggaggatgagatccaggatgagcccatgcccgaggcggctcctgctcctgagcatactgctagtggtcctgttgctggcgaccaaatggatgacgatgctcaaagtggtgacacatagattctttactatagtgacgtctccggttgtgagtgattccctcctcctgcttctctctttttggtgccttgatgccaaagggggcgaagattgcagaatggaggggattcgcacttctcttttttatccttttgcaacatcccgtcagcgggctggaagttttgggctattggtcaggaagtttggaccgggctgttgttggtattttttaacgtcacagataaaatccgcaagcgcatggaagataccgatgtagcacttcacccgggagtattccaaggtatcgatttcctcagcaaacatgtgtgttcagctcctcttcaggctcatctatggacacgaagaaaatgtagacaaatggtagagatgatttcctagtgagaaatagtgtctacggaaaactcagtttaatcctaacgcggtacttctagcactggctagctcgctgctcccagatgtcactgtactgcgtacccggacagggataactttagtgtaattacctagacaccgtgtctatgcaattaataacgactctagtgtttataactcaataaagcaatcattgtattttagtggactatagtgaacaatgatcctgcacgctaattaggaactaaccaagaataattctcacgtaggaattcttacttactcagaaagatatttctattaaagtagagtaattagcaaggtacaaaaggtaagaggagaattaccgacaactccggaattcctccgatttcttctatcttactctctccctcatgctttggtgtgttggaatgaagtgaggggtatttataggcctagaggtacctcgggaatgtggagatgctaagcatccaaaggagcatcttcactcttgagctatcatctgtcctctaagatggtttctaccagtagaaacggtcttggaaagtcggtaactaccaacctatgaaaattggggccgattgggttgttttagagttcggccgaacccttgccagttcattttgccccgaattttcttgtaggctctagtaaagattccctcaacccatgtgtatggtggatttgcccatttgaatgtgtttcgtttggtttgtgggctcaaaactccataagcttgaatatggaagtttaattcacctccttctttatgtatctcttgtctcaactttgataatttgtcacctacatctaaatatacaccaacactcgtgggaattattagaaataaaccataccactatattgcatgttttattctttcagatttatgcacgtattgacggcataaatttcgcatttagcagccatcgacagctgtgttatcccccttttaagcctatttaccttattttatctaatggattgtgtgatattcatggaaatttggtgtattgttgttttattgtttttgtgtgcttgctatgtcatatgcatctctactcatttcattatcaaacattgctgcaccacacggatgagaactgctgggaaaagctgtccacatttatcactcgtattttgcatgcctacattaagggggagctttccacatctcttttcgttcagaaataatatatattcatgattttgtaagctttaaccgagttttcatcaatcaccaaaaagttgaagattgaaagtgcatctagccccttaagattgaaaggggcaaatgattttactgagataagcacggataaatagttccaagtttgttaggtgtgagatagtgtgtagaggatgccctccccccaacaacaaatgcaaagtggcgagaggactcgaagagttatttaaaattctttttaaatttcgcatgagtctaggaaaaccgtactatcaagagaggtatcaaacaattgcctcaggtgatacaagtgcttaaaagtcatatcccacaaaacagagacacatttgcacaacacttgcacagactcaatgtcaaataacaagtgtgggctagaagttcctagcaccctggcccggaacctcttgccaccacttttcagccaaaaatcgtaagtgttgcccataagttcctagcactctagtccagaacctcctggcacctttctaatttaaaaatgtgagacggctacatgacgtcaacacaagcctatatattccccacaccccccacagctcacttttggtaattaaactttcgtttttctgtcccctaacttctcccatggtattcttgcaccctccaccttgttcttcagctccccaagtgacattgagtaagatttgagtgtggcattgtggtttgctgaagttgttgagagctaggatgacttgagcacttggagatcttcatgggctactggttggtgcttgttactcttggagagcaacctcctagatggctaggtgtcgcccgtgagcatccaagagtgtgtggattgcctagaaaagattgcgaaggttttcctcacctccacaagggaacaaggtaatgcgagtaaaattcctagctgagccttcggatgtagtcttggtagagcaatccacatccgtggtactcactagggattcaagttagttatctttgtggtcacttgaatcctagtgagtgatatagggaagtgggattgaaaaccagggacttcctcctagggttttgcttggacatctaggtaaggggttaatcgtgaccaagctattatgagttcctcaacggagagtaggattcttgtaatccaaactcttgtctcacttgtgtatgatctgtgcaattacttgagcttttttgtttcctgttgttttacttcatctccaacactttggtaagtcttggggttctatgagaattgagacttaagcctcaaagtatttgaatattggaagttcctagatagaacaccggaagttctggacaaaattagcttccagaaagttttaaggctcttgccaagaagttatgggccctgttgaatttaaccgcaatgattgatgaaattttcaggaacgcttgaacccccatataggcgacatctacgagctttcaaggaagtggctttcgcggcaaacagattcgcacatcgctggcccgacaggtcagtttcgtgctggctccactgctatcggaccacattggggccctttccattgtctctacccagcgccaccatcatcatcaacacctccgcccggggcggcaagtggaggcggtgggagggtgggagagggaaagatgtggtgggagaggaagaagtatagagattgatatgtaggacccaccgtcagattggagagtgtaaatggagaggttgttagagtggaaagtaaatttgactctttaaatttttggcaagctggccaaatgaacatttggaaaatcggatttagagaggttggagatgctcttaactatacacctttgaaagaagttatggtggtggctggtgaatctgtcactcaccaactttgttatatttctttcatctatagaattgaagtttattatgcaaagacatttacagagaatcaatgaaattgttccaaaaactttacaattagtttatttcaaataatgttagcccatgtattatttatttttatcggttgtaaaaacataactatttaagttactataatacccaaacgcaatgcatatgtatggcaagtgaccatgctttaaaaccgatctgcggcggccagcaatggctcgttaataaaaagatatagcgagagcacgtacgtaggtggtgccagtgcaggggagcgtggtcgtggaaatggactttctgaacttcacggaggataagcaataaaggactggtaggaataaagcaccagtacgtccggaaaatccacataaaaaaagtgagggggaagaggtgaattaattggtgatttggtggttacatcgacttcatcatcccgacatcccgcgcatatgtattctttgtgtgtgggtgggggtaggtgaaaccccgcgcattgtcgcgggaatttagtatgataaaaaaaataacgtactcactccgttttttaatagatgacctttatgccaagatcttatttcatttaagtatattaagcttttgtttgatatattatacttgttttaatatcctgatatagagtagtattcgggtattagcccgatacatgctagatctatatgatcggctatgctataaacatatataggcctgttattaatatatatttcgatccaagtgatttatactggctcggcatggggaccgatctatcccaatcacttgatttaaatatatatcgatataagaactatatattgggaatatttacagtcgatcgagtagggttagtccttattatctattataggcacccatcgatttcatatgacattgggtcaagataaatgaaatggcatcgggacttaaccggttggtttgattatagaataaccgcgttctttttttctttttttgttgattgatgatcaatacttggaccttcaat

SEQ ID NO: 16822 - DNA, 4735 bp, Oryza sativa
atcttatacatttgcataaaatttttgaataagacgaatgatcaaacatgtgagaaaaagtcaacggcgtcatctattaaaaaacggaggtagtataagatagctagataacatcagactaagtaaattaatgtggtttatgataatttacacttaaattgtagaatgatgattcaaacgtaaaaagtaaggtggtatgactttatggaataacaaaagtaaggagatagtttagaccgtagattaatcatctaaaggctaaaaataattgatgtaatatgacttaattagaggaaaaaaggagaaagataatttgaaccatagattaatcatttaagcactaagtatataagatatcataaaacataataaagatatacattgaaacattatgtgaattatattggatgataatttaacatgtttgtatttgaaaagctcttaaattataaaaactataaagatatagcatgtttgcatgatgtttaaatgtgatgattgttagtagataatgatgtggcatctttatatgttaagctcaaggagtgagtggggaataattgtatagtaagataggattacatatgaatagtgtataatgccacatacttcttccgttttgtgtcatgagtcctctgacttatttcatatcgtctaacttaacaagatcaagaaaaaattaagcaatatctaaaatattaaattagtttcaatatatctatcattgaatatatttgttttgcgttaaaaattgtactatatttctctataaactttatcaattttttttttacgtttggttaggaaaattgacaaacgacttataatatggaacttatggaatattatatagtacattaattggcaatttggttcaacttaattaatcagaagaatggagacacagtacgagctgaaaatcaaagtactcaaacaaagtaatatattttgtggactctatatatatatccatcctcggcttgaacaactaaggccttgtttagttcccaattttgttttcccaaaaacatcacatcgagtctttggcatgcatgaagcagtaaatatagattaaaagaaaaactaattgcacagtttacatgaaaatcgtgagacgaatcttttaagactaattagtccataattagccatatgtgctacagtaacccacatatggtaatgacagaataattaggcataataaattcgtctcgcggtttctaggcgagttatgaaattagttttttaattcgtgtccaaaaaacctttccgacatccggttaaacgtccgcagtaacatcccaaaatttttttttcacgaactaaacacaccctaaacgtggaaagaaagaagaaaaaaggttgcatggggagcatatacaggtacgtatagcattgaagagctaggacagaagagctaggacaggggaatagcaggattgcagtaataagctggaactgtatcaccgaacaacatagatcatcatatcagcaggtagctagcgtagagagatgacctgtacgtggagtactcgacgactacatgcgcgcgcatgtttcgcataaaagctgtgggaaggtgagagcaccttaatgcacatgtacattaaatccttaaacgtcgacatgcagagacatgcaccttaaatccttaattataccccccagctactacactactactcctacatgcattcacgtaccccagtatcgtgcagaaaacactatttgctcgatcaataacttgcccaaagcagtatacctacgtactagccatacacactactacagctactgctactatacaaacgctttaattttactctccagcagtccctccgacttagaaaacaaattttatgaaactggaatatatcacatctaattttaatttttttttgagagagtagttattaacactgcaagctcggtgaggaaggagcgacgacgacagtagcatatctttgtcactgtgtgcacgtgctcctgcgtagagatatataaccattaacaattttagggggtctttagatctagggatctaaagttttagtacgtcacatcgatattatataggatgttattggtaacgttttgtgacaagtcgataagcacgattgtagcacctaaagctttgcggtaatatggagtctccaactgtcacaaccggaaataacccaacgggcgttccttacgtgcgtgcattattccttgtcccaggaggcaaggtacaccaaaagttgatacagttcagagtttaacaagcggaagcgtaaatagttaatttattacatgggcggcgaaggcccagcacacacaaagacaaacgggaaacagcggaagactagggcgatgaccacaggcgcttgacggcaggcacgagctagacaccaaagccttcatcttccaggggctcctcttctgggtttgggaaaaaattgagcaagactgagtacaaccaccgtactcaacaagacacacccacaaatgcaggataaatgcaagggagtacaatggggttataatataaagggttagggtttgcagcaaacagcattaaaagacacttagttgctcaaagctattttgtaaatacgatcctagagctatacaagattattaaacaaggccgtgaacccacacgaacctgccttaacccaaggcctacgatgattcagaccgaactggcaacccgaccctgggtcccagctcgtcccaagccaactcaggccaaccattccacattttagttgttaagcagattttaagaattaaaacactaacttgggtacattgctcggcttgcccataaccgagggcgcggctattcgaatagattatactcagatcagaggtgtacatctttacccacaagacacatcttcctcacgtgtaaccacgtgccacataccaccacggtatacggacggaagacgtgacatagtttctaacccatcctagccatagacaagagtaccgacccaaccccacctacggccggaacctccgggacaggtaggcaggactgagcccctagcagcaggacaccggccatgtgccatgacatcttgactaccgggccgcagctcgtgtagccttcatttgccctagagatgtccatcgacccccgacttcgtccatctccatccgtgtacttttgtttataaccagactgagccacaaactaagccttacccactagacatgtggaagtacggtagtgctttgcaacagaggcccgaagaccggtccttatatggccgaggtgctactatcaaaaccatgcaccccgagcccagcctaaaacctttttgaggattttgaatagagggggaggtgtgaatccaattccacaataatccaacaattccatagtgtccaggtgataagagtattcccaaagtctagagttgtaaaccacctaatgttacctaattaaccagcgaagcatctaactaaaatcatactagtggtaccatgagtagagtgtccactagttggggttttgtttattctagggtgaacaaggaaataataacaataacaataataaggtcataacaaaggtacataggcatggctagataaaacaatgataacgcgggaatttaaataaagcgataatgcaataatttaaatcaaaataattttataaactgggattcaatatgttcaaggatgatgtgacttgccttgctcgctttcccaaacgtcggcttcaacttccacgaagagcggatctttcgaagctacaacgtctacacgaccaacggaaaagaaaaggcttttactctaataaactccatattacaagctggaacaaagcacaaaaatgggttcttgacttcttaagaaaaaattagagacttgaacggtccaattctgagttcaaatggccaagttatggtcatttgaagtttatatgctctttaaatgaatatttgcgaatttcttcatttaaattttaattttaaaagggtttattgcgtcagccgagcggagggggcgcgcggaccgggtccacgggagtggggcccacgcggcagcctcacggtccacggtggaccgggtgcacccgggctcacaccggccggcgccgtgggtcccatgcgtcagccgcacctaagggcgcgggcggctgacggccgggccccacgcggcagccactcggcgcgcccgagggcggccaagccggcgcagccggcgggaggcggcgcccgcgcccctatggtcgccggcggtggccataggcacggcggagcggcggccgagagaggggaagggaagggggaaaaaaagcggcggtccacggctcaccctaggtcgacggcgacgacgaaaaagccggccggagcggagaaaggcggcggcgcggctcgggtcgacggggtcgacggcgttccggcggtcggtgagcgaaacggaggggtggacgaggtcggcgaggatgcggcgaagccgaaggaggcggcgccgaggtggaaggtggaccggagctcgacggcgacggcagagagagagcgacggcgcgagctcgattccggcgaggaggaagggcggcgagaggcggaaacagatggaggaggtgcggggagggtttaaatagagccgggtcgagagagggtggccggggaaggggggaaaccggcgcgggaggtccggctgccatcagtggcgccggcgagatttgcgggggcaaatccgcccgtttaaacgcgagagagagagggaaaaa

SEQ ID NO: 16823 - DNA, 23129 bp, Oryza sativa
aaggttgcccgggaaaggggggaaaaccggcgcggaaggtccgcctccaacaagtggcgccggcgagatttgcgggggcaaatccgccgttttaaacgcgaaaaagagaggaaaaattggggggaaaggaagaggggatcacggggagtgatttcccctctttattgcacgcggagacggcgggaggcagcgggattctcggcgccgcggcgctagggcgcgggcaagtcggcggagcggcggaagaaaggggatgacgggtgggccccacccgtcagcgagggtggcgggcgggcccgcccgtatgaggcgcgcgcgcggaaataggccgaatgggctgcggggagaaaagagggagggggagggagatgggccgagccggcccaatagggagagggagggaaaggggactttttagagtttttctttttataaaatcattttatctttgtttatttcttaataattattatttgtgctctgaaaattccactaaaatttatttacgcattttagtcttttaggaaatatacaaaaatctctcaagccttatttgacttttaactttgcaccttttaattgttggaggctttcacacggattttaattattctaggcataatttagaggatgtagtttagagtcgttttgggacgtgacaccaaccacctcgatctagccaaaaggccaaatcaagatggattttgtaaaaagaaaaggtaaaccggctagcggaaccgatttagatatcaaaatcagcctctaggccgatttagatatcaaaatcagcctctaggccgatttagatcgatatgaggataactacccgtctcgtggacaaaacggaaggttttcaggataaacctacaaagaggtgtcgcactctctattaacagtgaaaaaaaaaacaacaatattggctcggggggcaagcgcataagtttcagcatgatggagcacatcagtatctgctcatgaaagccgattgcaagaagcaaaggaagattggttttggagttatcaagacaagaaattatgaagcatgaattctcatactccaaaactggggggcatgtgttaacagtgaaatttggtaagcccggagtagtcattggcttagagtcagcatcggcttcgaagtcctgagattagccgatgagagttgtcaagtcgtcagttgtcggattcttgctatattcggttaaggaaattgatctactaaaggaagcttatccagaagagaccgagttcaaagagaatgtggcatggcaagttatctattaattaggaatagtttgttagtttccttttatctttaggaaagtgtgtttagtgtcctataaggactttatcttttccttttatctttaggaaagtttctttcttgtccgataaggacttgaatcaacccatgggtataaatatgtacacccggggtctatgtaatctatcgtcacgatcaatataattcggcgcatcgccaccttttaccttttctactttattttatcgtccggcgggacttggcatctgacgcagggctgcattggtgttcgatctccggtgaaggggtacgtccaatgttccgccgacccaggcaattgtatcgtttacgtcggtgtcgttcaaggctacatcagtacatttgacctcttagattgcttcggtttggatgatatatttgtctacctatttattatatgtctctgttaatctagtcttagcatatcaatttagctctatcggctgcttctcgttttagggtttctgccggtatcggctaaatcgcgttgctagatttgattagcttagacatctaccaccctgataattcaatcaacggcttgattgtctagattttatgtttcttttcatacttagtgttgcatcagttaagtttgatctactaagtcgtgtttagaaccataatctctagcctgcttcttgattgccaataagggttttttcagggtttcagccggtgagttatttgtacgttgcatcggctcatacggattgcatatacatataagttggatttagccgatgacaacaaaggtttcgctgtttaatctgatcttggggatttcatgacattggacttccagccgatgtgtgctttaacctttacatcagtgcttatttatcatatcattgctagccgattggtttatactggattataatgttattgtattacatcatcatcagccgattgcctttatatcatcatctacattggacatacagccgattgcttaaaccatatcgctatcggctggtatcggcatcggctaatatcgactatcggctggaactactccattggcttgtcagccgatcggctgttttatcggttatttacatatcttgtcagttgggggtcaaactaactggcacgcccgcatctcaccaatctttggacctgcacaggaactaagcagatctcccaggctggtgtgttcgattttttcatcaacacaaattggcacgcctggtgggatgatgatgtaataaaataacaatataatccagtataaaccaatcggctagcaatgatatgataaataagcactgatcttaaggttaaagcacatatcagctggaagtccaatgtcccgaaatccacaagattagattaaacagcgaaacctttgttgtcatcggctaaatccaacttatatgtatatgcaatccgtatgagccgatgcaacgtacaaataactcaccggctgaaaccctgaaaaaacccttattggcaatcaagaagcaggctagagattatggttctaaacacgacttagtagatcaaacttaactgatgcaacactaagtatgaaaagaaacataaaatctagacaatcaagccgttgattgaattatcagggtggtagatgtctaagctaatcaaatctagcaacgcgatttagccgataccggcagaaaccctaaaacgagaagcagccgatagagctaaattgatatgctaagactagattaacagagacatataataaataggtagacaaatatataatccaaaccgaagcaatctaagaggtcaaatgtactgatgtagccttgaacgacaccgacgtaaacgatacaattgcctgggtcggcgaaacattggacttaccccttcaccggagatcgaacaccgatgcagccctgcgtcagatgccaagtcctgccggacgataaaataaagtagaaaaggtaaaaggtggcgatgcgccgaattatattgatcgtgaagatagattacatagaccccgggtgtacatatttatacccatgggttgattcaagtccttatcggacaagaaagaaactttcctaaagataaaaggaaaagataaagtccttataggacactaaacacactttcctaaagataaaaggaaactaacaaactattcctaattaatagataacttgccatgccacattctctttgaactcggtctcttctggataagcttcctttagtagatcaatttccttaaccgaatatagcaagaatccgacaactgacgacttgacaactctcatcggctaatctcacgactttgaagccgatgctgactctaagccgatgactactccgggcttaccaaatttcactgttaacactctcgcagcggcggcggacggtttacggcacaaactgacaaagatggactaaaactagggtaaaatagaaaacatagtaaaagaacgattcaagtagattgtattggggggttttacaatgaaccggccttgtctcttaaataagggttggtcttgccctttacagaccctcctccacgtccaactcaggatagaaactaatggaaacacgaaacatggcttcccgagcaaggaaacccgagacccgacgaaaacagactcggactcgaaccctgacggtctgaccgcccacatacctgcggtgagaccggccctactagccggtcagaccgcccacatgcctgcagtctggccggccccatgaaggaaaccgggcactttccaaactttggcaattttccccctatttcgtccataggtgccaaatttgggtgtttggacactaataaaaaatgtaatccgtcatggggtgtttggacactaataaaaaatgtaattacagaatccatcagtaaaccacgtgacgaatttactaagcctaattaatccgtcactagtaaatgtttactgtagcaacacattatcaaatcatggaacaattaggcttaaaaggtttgtctcgcaaattaatcgcaatctgtataattagttatttttttagcctatgattaatacttcatgcaggtgttcaaagattcgatgtgacagcgtgtataattttcgggcgggatctaaacacacccttaattaatgggcgtgcgtacatatatgtcactgtcagtaatagtaatatagtatgtgtacctccaagttagtatagattcttaggatgtgctatatatgctactacctctggttgcataattcattcttatattctaaacattgatatggcctgtaaaatatatctttagctatatttttttattataatatatgacataaataaatatatttttacttttgttatagtaaattataagacaaatatatatatatatatatatatatatatatatatatattatattatatattatgtgtttaaactaaatgttttaaagttactgatagtcatagttataatagttatagaagtttaataatcttaatataaacgtcaagaattataaaatcggagggagtacgaataaacgattgctcttaactagttgatgaacaaattgcagaggaacatgttgggtttaagtcaggtacagctagtctacttctcgttacctttccttttgggggctaccaaattaatcacgttaattaattcccatccctcttcttaccttcttttttttttggggccaattatcatgccaatccagtccttgttagggtaaatggtggtaaagttaatagtactattaaaatagctttattattcaattctgacaacaacctactaacttggatgtaatttactacactctctccatccttttctaattgtaatgtactagtgtggtctttttgcaacgtactactgctggtctgcacgcctacagaggactgaaatacatgttctacctactcggagtaattattagtgcaatgactgctcctttaacctgtaccatacttatcatattactcctacatgcaccttcagggtaattatttttttaaaaaaaaacattacgtaccattactaatctttataaatacaaattatgaaggttctgatattaaccctacattaatcaagaaataaaaaggttagaaatgcccacattaataaaaaatctagtaattctacgttaattaggaagaaaaaagataaaactgtgtgttcatttgtcactatcttttaagagctccatctatcagttgtatggacgacatcttgcgcaccataaaatatatggatttattatatcagttgtattccgtttggagttttaattatttttcttcatcatgatttgataattctagaattagaaattcttatacttggtttggagtctaaattatagttttcgatgatttatatttttctaaaaatcaaaattcgtaaaatacgtaccaagttatactacgcatgcatgcatgcatgtactacgtctggagtctcgtttatacgtttatgacaatttattaattctgaatttcagaattcgtaaataccaagttacaataagtttgaagttttaattaattgtactttcgagagatttaataataactttttaattaataaatataatttgattgcactttttgaggaatttattagaaaattcaagcttttactcttattcgagaaatgaattgaggagtagcattatatcgttcctaagtacttctttacgtgctcttgaggatagattactatattgatttagtaataattaagaattatggagaggaccagggaacacttggagagagaggctaggagatggatcaagtcaagatggagatctaactcatcaagttcgagtccacttcgggcttcatagcagtccacattaaattcgtcgcctaggttgcattcggattccaattttgacgttctatatatgcatggaaagctaacgagatcatctttcgaatggatatagtcccacatcaaaattccttctgagtcaacaggaattttcaaaacaagaaggcgttcagaatctgcccggtgttgcgtcaccgtctttgggcccgttgggccatgtatcgagtcgaagtctaatagtgtcgcgtccacgggtctaatgtcgaccctaaatcctatatattcagtagctatcattatgttaggattgggttttgcttagattatttatgccttcgcagtttcgccgctagatcggtttgtgaaaccccaacttcgaatccttgataatcattcatctacaattgagttgctctttttcttgttcttgcttgtgttcttcgattcacacgcagggattagccttctcggcgaggtcgatcgagcttcaacacggttgataatcagaggagacgtgctgctacgattgcagggttcgggtcgtgttgatcggaagccggatcgtgtgtgtcaagtttccaccaaatcgatagttatcttcacctgacggaagatcgggcatcccgttgccatcatgaatcaaagttcaagcttttcaaattaaattcattagatcacataggtgatacgacatgtgtgagcaagcctagggtgatccagacgcaaatccatcacacgagcaccttcaattttgaagttttcaaaattttgttcttcacctagtattttccaagcactttgaacttgatgaaatcttgcatctttggggtctcttttcttgttttatttaattcccttgttgttgtatactgtcattcagatttttttaaaaaaaaaattcaacgtttgtttgggtggtttgaagcaaaatctacaaatttggcgtgtgctgatttttgcagactgtaagttccagtgcaagcggaagtttgatctaaatctttgagagaatcaattctatgccacttaccctacttcaacgatttgtcattgactttgtctccctctataatatgcgactgactttgtcactttctttttacaatatgtcacagctgggtggataattgtcaataaatgcctaaaatgcccttcaagtcatacaagagttgataattgtttgatcactagaagtttgaaaaaaatataaaagttttttgtgtacttaaccttcttacaaaataaataattttgtatctaagattttctttcatgtttttcttaaaaactatttttacatagtgtatgaaagagtattcacgtacaggtagccgtatcaggaaaaaaattgtatagcatgtgaatcatgatgtaaataaaagaacttaaacacaagactattttattagcataaaaaacataaattatatttttataaatttaatagatgtaaaatgaaattcttgaaatatacatacacctatatattatttacataaggaggttatgtaaaaattttcatattttttcggaaaatctagtaggtcaatcaattgtaacctcttgtaagtcctgaagggcattttgggatttttttaaaaaaagtatccaccctaatggcacactgtagaaaacaattaacatggtagataaagtcgatgctaaatcattgaactatagtaaactcagtggcatagagtggattctctcttaaacttttaagccaaagacatggtaagagtgttacgtcattgtgttgaaactgacggctctaagaggaagtgttttgaagcactttcatgtatctcatgcttccaaaaattttaaaattccaaaaggttaaatttacaacatttcataagagcctatttggtgaaaactcaaaaatccaaagtccaaaggttagcaaaatactttaaagtgtaaaagagctcttgtagtaaaaaagtatttaattaaaaatgaaaatgcatatttctaagatgttgccttcaccatgtttggcccaaagttgcatatgatgggtttagctaaatgagctgaacttcattatgaatattggcttaaattggtatttaactcatgtaagctctagatcaagtttagttttctatgtgatttgagtctctgagtgaaacttcttgtcttaaaaagcatgtaaaccacatttcttgctttcagtttgatagaaaaaattttttttttccaaataatattttgtgaaatgttcctcacaactcacaaatccaaaatcttggaattttgaaaggaaattttattgagaaaatcatggaattttgaaaggaaattttattgtttctcaatgctcttttggaagctcattttgtgtttccaaaatctgaaagctaggaatgctcgattgactacaactttgtgattttttgtgtatcatatttggttgagatatatgaggaattctccctaatgaaatttgtgcatctatttatgatcaatctccaagatttaccacaaagttttaaatcctatggactggacagtccagaatgaagctggattgttgtcataggctctccggacctcccattatatttgagagatgaagtgaataattcaagtcatcaaagaaacataatgaaacattcgacgcctcgagagaagaatattggagacattgctgggcttttagcctgccagtcaacttcagcctgagatgtgcccgtcaaaccactcgaaggcggcgaccagatgtgttacacattcaggagacttgacaaaaatggctaaagatctacaacatctcaaatattcttaacacatactcatgtgaatctacttcccaagatgtgcactagattcacactttcatcttaagcatggaaatacatagcaaaatacacttaagacgaaaataatctaaatcacaactacttcatagttacataggccgaccggcgaaataaagatatagaatagcgggaagcttgactacccaatcctcaagcacaccgactaggggtttaccccattaagttcaagtcctagaagaagcaatcgatcacccgcatcactcaaagactaaatctaaaacatgcaagcaaaagttaattcaacagcaagagtcagtacattattaaaaataatgtactggcaagtgccaagacaagcctaacaccctacttgcaaggcatataatcaaggaaggcatagtatggttctttttagcataaagcaagttttatttgcataaaacatttctaaatcagatttgctttcaaataaatttcagcaagctagtacttagcatatgggcatcaaataggcattaatcatgtataaatatacacctcattgccttccatggcagcaaggagatcattctcaaatctcatcacaatttgaaggtaaattttagcatttagaagaataaatacaagtctatactcaatacatatccacacgccgctcataaccacgagcacggctaatcgattagttttaactctgtagagtttgtacactttacccacatgatgcgaaataataatcatgcaagagcatggcacgcgatacataagtaccagatttattacccgcaacaaagcttttccaaaattcatgatttagccttacaccagcacgatacgtgttactccatcctaagccatacacgttatatgacctagaaccgttaagtggcgggcctaagccttaaacttaacgccgtggtggcggacacaacgggaactcacccacttggcacaataccgttgtattggacagacttagtcatctaaactaccacgtcggggtaaataggaagttcctctgagttatccgaactcatacacaccggcctaacagaatgtaaggctaaaccataaataatttactaagcttgggctatcccatactagcacatgtggttgtactgtatacgaaatgaactgacattgagtgaagtccgtacgtcggtttgggcgcactctccccctatcggtacacaactaatcaccatatgtgcaccacttgaggcccaaacctaaattccatgttttccaccattttatttatcaaaaacacaagtattaaagttctgtccagattatttcaaaatcaattttcatatttgtaatgagcccataatgacaaggaagaccattctaagcatggctaagcattatagtaacctagtgactccaaaattcatatataaagtggtatagtcatattgttcctaaggttaggaatgatggatatggatatatgtggggttaaggtgataatgcaaataataggagtttgtctaacaagtttaacacaattttaatttgttagtgtacaatcgacatgcaagatttggaaacattttcaataacctccaaaacataggttcaaagtgatcaaagagagggaggtggaacttgccttgaatcaggaaaatgtcagcacctaaatcacttattcactgtttaagcaatcatctatacaaagtacacgttatgcaattaaacaccgaaatatgcgaaaaatccaaaatgctctaaaatgcatgatttgtgcacagtggataagtgctggtataaaatgaatttaggtgaaataatttatattttatctcatttcatttgagagttatgaattttagaagtttcgtcggtatagtgtaggatttacttaggtactattgcgaaatgcttgtgaaatgctgttgtaagatgattcttattaagtttatgtttgctgaggtgaagatatgtgttttctaagactaacacatttggtttcataatttttagagttaatatgaattctttatgtattttacaagttataacgtgttataggtgtatagtgttctataggttcatggctttagaggtttaggtccagaacttgcctcatctagctagttatgtataatataagtcttttatttaactaatctaatcttagtttataaattttagagttcaaattactttacttcacattttataagctaggggatattctatgctagaaacttaatatatcaatctagagattattatatgagtaaagggtactaagttttggaggaaggggatggatcttatgccttcactggttcaacaagttttagttgggtttcattatagttagagtgtattcctatatacatttatatatacgtattgcttaatccttactatgtgattagcacctatcctatagatttaaagtttagagctataacctatacagaaggtgccatattttattttactatgttgaagctcaccatttgctggttctataaaaacttggttcactccatttggactaaagatgaattttctacaaattttacaaattaaaggctgctctatgttggttattacttacataaatatttagaggcttttattgtacagtaagcatatatttttattttataacttggaagtatatgttttggtgattctacagaacttgggtatactaaaaaggatctaagatgaattttatataaacttctaaagttcagcttatgtaaaactagttattttaaagataatagttttagaggcattatatttgatgtaaagtgtgtatatgttctattttactttgtttttaaagaacatgttggtggatctgtagaaactaagtttgctctaaaatgagttgttttcaatttgttatagattttacaagtttacatgtttttctgttgaaaatataaagctttaggcatttcatttagatttttccagaatttaaatagattgggtccacaggtcagtctcaggccaatatgcaaaaaggaccctagggtttcaggaaatcaacccgcagtcctgtgactgttctgtgtgtgaggtaggttttacaaactagtacctagagttttgattcttctcaacagaggtccttggtttgagcagacagagctagccatggccgagctcgttctcaagctcgccggtggcaaacggcggcagatctcggtgtgcaacataaggagaaaatgtaaaggggttcaaggcgaggctataggtggtattcttgcaagcattggtcatcggaattaatggcgacggcggcgcgagcggcggtggttctcgggtgacggtgcatgtggagctagagcattgatctagatgtttagctacatgcatgtgcctctatgggatcctaggatgcttaccgagcgtccaatgaaacttggcgaggtccagatagcgatgaccacgagcagaacgactcagcgacggcggggagcctcgggcaatgacgacgccggcttgatatggctgatgatcttccatgcatgcatacacacggtgttgaataggtctcaggaaagcttcatgcccgaggaattgaactgtgactcaccggagagggagaaatcgaaggtggagcttgacggccggaattggggaagacgatgccgatctccaagctcgctgcaccactgccaggggttcatgagggatttaagagaggacactgaggagatgttgatggtgcggtggctcggctcggcttcctccggttcgacggcaacgaagacgatgtcccgatggcggcgcccagtgcgcgctccagagcatcgtcggcgaggcttgcgttcccaccaaaccactgcatgaaatgggatgaaacttagagggatggaatcggcgtggagaggcgataatggaacgcaaaagaagaggaaacgaccgctgcacaatggcgatggtgacggccgtcgtcttcacggcaggcggcaaggtcgagatggaaaagaaaagccggagctctccccctcggtttgctcggctcaggagtggtaatggggaggaggcgatgcagctgggtggaggtgaagccttggttcggcgctgccacgtcgaggccacgcatcgacgccgtccagtgtaggtcggcgccctcggtctctctctcggctgtcactgtgttggatggaggatgcacagggtgtggttcaagccaaagaggctgccatgtgggcccaggtctatgtaagctaggtgggagtctgagggatgggtaagaaactgggtattgattgaattttggacgattttcatattaattctctccctccaactttacatctcaatattttaatgtgtgaagcatataaattagtgtgggtttttctgaaggtagatgaatgtagctagtttccattttctttgttgcacttaaaaatttagattgctcatagaaaattggggaagatgggctcaatagaactttgtttgaatttttagaagacctaaactaagaggataaattctagaaaaaatatatttattcatgataattgacctagtattttaataaattatttcccctatacactttcatgcagttaaatgcacattttagttatgtatggttttagctgattaagaactatatttaatctattatttgacaagtttgacttgtttatttaaggtatcaaatttagttattaaattgtaccaaaattatagtgagttgtatatgttaagtagagcctacataaattttcccatgattttatcttgcacgaattattttagaaaattagcaagacttatctcttatatgtgtttcccttttcctaaatgtatgtaaatgcttataaaagttttatttggactctttttaacctgaggtgatgttgatgttgatatgttagaattacagtttaccttacacaggtcataagctctttacctatttatgcataagtttactttaatattaaattaagaggatgcttatagagatgattaagatagaatataccctatatgggttaatttatttgttcactttcatgttcatgacatgtcttcaaatggatgaccaaattagttttgtgaggcttgacattagccatgttgatatattttaaggtgtatggttcctattttaacttcgtctagctagcactaggccctaatggtttagttgtttatcgttaatattcatgagacctattatgaaatgcaaataaaaaatccaaatgcatatgaaggactcaagtcaaacatggctatgagaatatgcatatgagagtatgcatgcttacacagacgtttacattttgtcctaggttataaatgaaaaggttttaatttgttctcaaattttattcatgcaagagttagatcaacttcacctaggtttaaaatggaaatttttggctctcaaaaatgtaaaggttagcttccaactattttgacatgaaaattttaaggtctagaattttgggtatgttacaattgttttactggcatcacggaagttccaatactgattggtatttgttacgattatagataaatcctaaagtggatggatatccctgtagcattcaacccatgagtattcaagagtattgttatttgttttttatagggaaagcggcggtgtaaaaaaatggaccgttataatcgtaatcctatgattaatataccatagtctaacagagataaatgataacacacaaaagaatcatttctataaagataaattagattaagataaactagattaagaggacagaagagagccatggtttcttatgtacttctatacttacgatggttagtctacacatacattcatatacatatagaagcttaggacttggtactatgcacctaggcactaccgagaccgctccctactggtctacagcatggttacggcatttcacaaactcttacatcataccaaacgcgaaggattacaaatgatgaatagggctgtcaccacctgctgcctacctctacaacccatggggcaccccacatcctgatgaggacataactagctcggatataaccatgactaccttatgtatttattaaataaaggtgcatatgttctacattaggtttacttgttatatatttgaataaacgttgctacacaatgagttttgtgtgttttcgtttgcagaagtacttgcttgggcgaaggaaagagaccgagcgtaactaatgcatggatgattaaataagttgattggggaccaaaccaagaccttcttcaagtctacttctacctcaccacgtcactattggtccatagaagacaagagatcaagttgtacacgttttggattcggattcgggcctcctgacagcatcaacttcaaacggacctagccactgatctagaaggaatttcgaggcccatgagtacttgttggaaagattatggagtctactttcaaatggttttggtcccatgtcaaaattcctaccgagctgccgggaatctgcaaaacaagccacgtatctcatccagtccgaatctgattttgagttttgagccttgtaattgtgtcatgggcttagctcaagggggtgtgcgccctagggcaaccctatgacgtccctaagcacatttattcagtagccgtcatcgtttagagtcgggttttgcttagattattctgtcaagaacagtttcgccgctagatcggtttgtagaaccccaaattcgagtgcttaatcattcatatgcaatttggttgcaatctatcctgttcttgcttgtgttcttcgattcgcatccagggattagccttctcggcgaggtcaaccgggttttggcacggttgataaccagaggagacgtggtgctgcgattgccgggctcagtagcgtgttcgttcggaagccggatcgagttgtgtcacgactccatcgaaatcgttgtttatcaatacctatcggaagatcgggacctaacccccccatcacatccaacggcatttaatcaacccaaatactatgcctactgttgacggtcgttatcgatcagtttcgaccgtcaatatcactaacaggagagaactagtgatgcttgcaatgcataaatatgttagaataataatattctactagtattaggtttactaaccttttgcagagaatgatcacaaagtagaggagaatcgacatcagcaccaatgataaatcaattggacgatgtcgagaatcagacttatgcatgaatgggccaagaactcagaattgacacgataaactgggccaaaattcataagtctgcggagaagagaagtctagtaggccaccagccaaattgtgggctggttgggccagcccaggttcggccgaacccatttctccatcgttggatgtggggtttggcagggactgtggagattatggataccccatacctacatgatatgtatatccgactgggtatggggtgccatgtataggtagaatatctttaaaaggactcgggttaaattctaaacttgaatgtcaaggaaatacccgcgatcctaatcggtaacgattgtattttatctataactacctattccgttagggatatggactgtattttgtaatacggaccccttcccctatataaggagcggtccgggtgcctcttggggcacgtttttcacccagatcatatgatcaataatacactcggcggatctatccccggacaggagtagggtattacttcttgattaaaaaggcctgaacctgtataaaattccttgtctctaaacccatccacttttccagcttgatagccaccccttttagtcttgccgaaatcttgtttcgacagttggcgtgccaggtaggggtagcatcaagttcttcgccgactagtgcaatgggttttgtttcgggcatcgacaacttcgtcttccctcccgggcaggcgttccggttcggcagcctcgacttcatcaccaacgacctcggcaagatttctctcatcgactcggattcgaaccagtcgggaagaggccagatcttcgccccgttcggtatcccgaactcggccgagatctaccccaagatcatctccaccgagtcggcttcaaaccacttggacgagatccaatctactccaacacagcccgatcaagacgatggggcctatccgccaatcctgatgaagctccccgatgatttggctgctgtcttcaccacaagggcgccttctccctgtagatctatatcacatcctgattttcgtttcaggatttataaattacttaataaattattattggaatttatattaaatgatctttaatttacaagtgaagttaaatgtgggaaataaaatttcctaaatataaagcatggatggatttaatttttattaaattctccatgattaagtcaactctctgaaatcctctcggatttttcggagctcaattcctaatttttaatcatacaaagagcatttcagtaattacccacatattaaattaatcattaaatggtctaattataattttgttaagtactttgagtgtccaagtattttcaggatttttcttgaaattatttgagcattggaagtatttttaacaattcaaagatcatttaagtgattattttaattggaaaagtaataaaatcctcctcctcagcttgggccattttcggcccattccttcctttccttcctctctcttccgccggcccagtccgagcctgcatcctctcttcttctatcagccaaagtctggtttatctccctcttctaatcaggctgagaaaagaaaagcccggcaagaagtctacattccctccctgcgctactgttcatcttccagctcaggcagagcccgtggtctcccgtgccgtgcacagtgccgccgattcccttccaaaatccgacctccccgttgctcctatttccaaattggttgcgggaatggaatcgtctcaatctcctcttacttttccccaagaaatacccaaaattttctatggaaatcctttccaatttcgcggatcaaatccttccttttccggcgagaaccctaaactttcccgagtttttcccgtcgttttgggcccggacccgagctcccatggctatataaaggaccccctagtcctcctctttcgtttgccccctctcccgtggtctcccgtgcctcgtagcgccgccgccacgtgctccaccccgccgtcgtcgccggccgagctccatccgcgccgcgccgccggcttcgttgttgccgccggtcgccgtcaccaccgttgtgttcgcaggagcaaggtgaagctcggccgctctctccccgctgtcgccggtcaccggagccccgtcgccgccgtcgaccgaagccgccgccgccacccacttcgtcgccggccgtcgtcgttcgtcgtttggttcgagggtgagtaccgttgggttcgtctcgtcgtcctctacgtgagcatgccttccaaatccgcagccggccgctctagctcccgcaagcttgccttccgagccggccaccattgatgaggtcatcgctgacgtcatcatcgttttttttttctttttcctgtttttctaatagattaaatcttcggaaattcataactaaatcatcgtaactcggttttgagtcgttcaagttgctaaattcatctaaaatcatgatctacatgtttgtttactttatatgtactgtttatttggtttttattagtctttttcttctttttgcgtgttagcttgtcgtttctgtcgttgcgaaggttcgtgagtgcgtcgggagtgttcagaagattaattgaagaccgattattgcaagacaagtcacatagatcctaaacacaatcctttgagcatgttgatcctatacttaaattctctatttatttcaactgtgcatttattttcgaatgtcattgggtggtgtgaatctattcctttgttatggccaatttgcattgattattctattccttgataccttgggttattataacttgactagttgggctatatatatattggttcagctagatattagatatgattgcttagctatgcttagaaacattagcacacttttgagataacttatgactcattgtttaatgatggcttaatgatagttcacgatggtcaatcgtgattggttaattaattacttgccaactaaaacttgataatggtgggttgtgagcacatggttttgagagtcgtgctcatgacaattaaggaccggttcgcgagctactattgtgaaacattaaccgtgccaaccacaagccagcgtgggcaacggctttaccttttgtataacatgattcattgcggagcaccagactgagaagtggcggagataagcccacgggggtcgctggggagtccatgcctctggtttttgagggggtgattatgatccaggaatggtgcactgtggtgagttgtgttgtgcaaagggtattgtcacagcctctattcgggtactttccagtatcgcgacgcatggtagacatgatgatgaggctgtgtcttgtgggtacagtggtacacctctggccagagtaaaactattcgaatagccgtgcccgtggttatgggcgggttgagcaatgtttttcgtgattagtcccacacctctcacaataattatggatgttataactggtaacaatttgcttagctcctggtttggagttagatctgtacagccgggtatggttgttcaggatggttgggcctgtacagcatgggtgtgctgttcagtgttgattaaaatttctgattaattactctactgttttactactcttaactctttgctaaatgctgctttcgcaaatgagcctatattatgccatcctttggtatccttgtgcacttgcatatttgctgtgtggcttgctgagtatgtcatatgctcactttgcaataatcaatcaacctcagttgaagaaaaaggatccagaaggagaagacgtttggcttatatcccagttgagctgcctgtgggagtggagccggagcttcgctagattttattttccgctgcagttttcttcttagtgaggactaagtgcctcttaagtaagtatttatcgttttagttaatttgatgaatctgtatattaaattgtcagtttgtgtacctcggctgattcctggacgaggattttatgcacaaataagttcggaaattactagtgaatttccgggcgtgacaatctaggcgggatccggcctctacctcgatccagcctagctccagggaagtcggcgtcatactctagcctctcggcacggtttcgacggaacaactggatggctacctcagctcccccggcgtcgactcacggccaacggagatcattgagtacgacgacttcggctaccgtagaccgcaacctcgacgacttcgactaagactttgaagataactacacgcctctctacttcggcatcttcatggctgaaaacgagacggaagaacagcgtaaagcccgagaagcagaagaacaacgcgtgcaacaggaagccgaacgaccctgactggaagaggagcgccaagcacaagagcgagaacggctgcagcgtgagcaacaggagtgcgaacgggctgcaaaagaggctgaggaccggcgacagcacgccttggatgtcgggcgacgagcacgagaacttatcgggcagcaagacgttgagggaacggctgtttttcgcacccctcaacagaacgcggttgcagcgatcaccctcctcgacaccctcctcaaggaagacgtactcaatcaagccaatcacgtcgtcaacatcttgaaccagaccaagatcatgatctctgccttggtcccggttaactctgcaagcgtccgcacgctgactggtagccgagttccccctcttcgatctcaagactatcaccaaccaagcctcagcgtcgtcggtgcgggatccagtcgcaggagtaagggtcacgacgagcgatctgtccactcgcctcctgaatgacacagggagcatcgagttgaacgacctcgctcctcatatcgcaggcgccccgtcgatcttcgcgatactatcaaccagcgctgcgcggcaagagaatacgcttcccaccattcactagatcgctacgacaacgacgtggatggagttgctgccttcacaagcaaattgcgtcgagtggattggccagccggcttcaagccgactggaatcgagaagtatgacggcaccactaacccggagtcttggctcaccatctacggtctcgctattcgcgcagcaggacgagatagcaaagtcatggcaaactatttgcctgtggccctagcggactctgcccggtcctggcttcacggcttaccccgtggcacaatcggatcttgggcagaacttcgcgaccacttcatcgccaacttccagggtacctttgaatgccctggtacacagtttgatctctataacgttgtttagaagtctggagaatcccttcgagattacatccgacgtttttccgagcaacgcaacaagatctccgacatcaccgacgacgtcatcatcgccgccttcaccaagggcatttgccatgatgacctagtcggcaagttcgggcgcaagcctcccaggacggtcaagcagaagatgtcattaccgcgtccaagcagtcgggcaccacttggaagccgaagaaagatacgccaactacaggggggagtggaagtaccaatcacaaggatcgcaagcgtaaacccaaggaacttgtggcaactactacaccatcctcccgacaacgttcacgggtcaacacttctgacaagatcatgaactcccaatgtccgcatcatccaaactccaatcacgcggccaaagattgcttcgtctataaacagtttgcagaacaatacgccaagaatgcacgcaaggcctctgacggagatcaaagcacgttaaagaaggatgatgaagttgacgccccgactggttttcaagaccatcgcaaggaactcaaccacatctttggcggacccctgtcctatgaatccaagagaaagcaaaagctaaccgaacgggagatcaacgctattcagcccgacacgccccaatatcttcggtggtcagagacaacaattatgtttgaccgcttggatcatccttaccgtgtggtccacccagggcggtaccccctggtactagacccagtggttcgcaacgtcaagcttcgcagatccctcatcgatggtggcagtgcactcaacatccttttcgtcaagactctggacgacatgcagatccctcgcatggaattaaagccgagtaatgcgccctttcacggagtcatctcagggctatctgctacaccactcagccagatcactcttcccattactttcggcacttgggagaacttccacacagagaacatttgttttgaggacagcgtatcacgccatactcggacgcccgatgttagccaagttcatggctgtcccgcactatacctacatgatgatgaagatgcctggtcctcaaggagtcatatccctgcggagtgacatcaagcaagccgtcacgtgtgacaaggaaagctgcgagatggcccagttccgcgagatcacgctcgaccgagaagaaatccgactggctgcgtccacagcaagcgaaggagaagtgcctgcgaccaagatgccaaagagcggggcaagcgacaccaagaccaagaagattcctctagatccttctgatcctactaagactgctgtaataggcgctgagttagattgtaaataggaaagcgcgctcatcacctttcttcaaaataataaagatatctttgcgtggaaaccatttgatatgcctggtattcctagagaggtgattgagcactctttacatgtcaaggaagacgctaaaccaatcaagcaacgactccgccgtttcgcataggataggaaggatgcgatcaaggtagaattgaccaagctgttagcagcgggcttcatcaaggaagtccttcatcccgactggctggccaacccagtcctggttcagaagaagacggggcaatggcgcatgtgtgttgattacaccgacctcaacaagtcttgtcccaaagatccttttgggttacctcgcattgaccaggtagttgactcaacggccggctgtgagctactcagttttttggattgctactcgggatatcatccgatccgactaaaggaatccggggtaccgagagagatgtcatcaatggggcagt

SEQ ID NO: 16824 - DNA, 504 bp, Oryza sativa
cacaccggtcattgtcagtgatgctggctttaaagtgccatggtataaatccgttgagaagctgggttggtactggttaagtcgagtaagaggaaaagtacaatatgcagacctaggagcgggaaactggaaacctatcagcaacttacatgatatgtcatctagtcactcaaagactttaggctataagaggctgactaaaagcaatccaatctcatgccaaattctattgtataaatctcgctctaaaggccgaaaaaatcagcgctcgacacggactcattgtcaccacccgtcacctaaaatctactcagcgtcggcaaaggagccatggattctagcaactaacttacctgttgaaattcgaacacccaaacaacttgttaatatctattcgaagcgaatgcagattgaagaaaccttccgagacttgaaaagtcctgcctacggactaggcctacgccatagccgaacgagcagctcagagcgttttgatatcatgct

SEQ ID NO: 16825 - DNA, 19335 bp, Oryza sativa
caccgattccatcgctcacccgagcaccgccgccgtttcgccgccttctgcagcctcttgccgccgttcccgtccacctcaagccgcgccgccaccaccactagcttcgctgctccgccggcaagcccggccaccacgccgctcctccattccacccccgagccgcccgctccacggtgaacccgagccacagccacttttgtgcctccagtcgcacctctgccgtcgccctggccaccgccaagccgtaccgtttccttcaccggctcggccgcttcaagccacagatcggtcgccgctccaaaccaccggaaacccaccagtgctccattcctttcgatccccggtgagcccgccgccgcctaatccgtgccgccggccaccttctcgtcttcgtctcgccgccccattcgctcggtgagaaccgcctccctctccactctctcgccgcctctcgcgccgtcgccgctcgccgccggcgtcgtcgccggtggtctaggctcggcggtcgccgccgcctgtgggcgtgcctgcctggtcgtgccgctcggccgcccccggccgtccgatcggccccggccgatccggagcgtcgggtgcgcgcccacgtggccggctggcgccgtggactcggtccacggtgggctttgccgctgacgtgtggggcccacccctttgtgacgcggtctgcgcctcaccccttgctgacgtcagcatagcctttttcctttgaaaaattaaataataattgcgcaataaatcggtaataattgtaaaaatccattaaaatggctcaaaacttctaaaattcatatctaattcattcgaacttcgaattgagccattcaacttgcaaaattcatctaaaattgagctctacatgtttgtttagtttttatgtactgtttccttggtttttattagagtttttcctcgttttgcgtgccagcgtgttgtttccgtcgtttcggaagtccgcggtcgcgaggaaaagagttcggaagatcaaagtgaagaagcaaggcaagtcacacattccccttgagcattttgatcctaatttacaaatgttttactgtttgcaaataaatatgcatgttttgctaattacacgggatcagggtttacctatctgctcgcttgtgccatgtttacttgatatctatcctttgtcaaccttgagtaataaatcgactagctcatgttacttatgtgacttagctagaactatatgcttagccatgcttaattaccactagctcagttgatgggataattacaatattagacctttttagtatcagagtgagctgcgtgctcgagacatctggccatgcttcatggtcgtaattatccaactaaaatgcgactgaatggtgggttgtgggtgcatggttttgctggtcgcacccatggcagttaaggaccggttcgcgggatgccctggaagaacttatcgtacttaccacaagccagcgtgggcaacggctgggcttgtagtgtagctttcctctagccgacgcatccaggcaagggtgggcgtgatggagcggggcgggccctgcgatggcctctgtcgcttccggattcacctaggcacgagaggggactgcccgctgccttgcgaggagtgggggtgaaacctgaggtgtggtgtgcttggttagagggggttatgcgaagggtcctgtcacggcctctttccggtatgtcgtggtggcatgtcggcgcacggaaacgtgtcgtggggctgtgtcttgtgggtacagttgtacacctctgatcagagtaaaactattcgaatagccgtgcccgcggttatgggcggtcgaccaaattcaccgtgattagtcccaccttaataaatcgactcaatgcactgtagttcaggtgggttggttgggcctgttcaacgtggtgtagcgttgatcagtggagatttaatgttactctaaatactcaacagttttactgttttgctcaataaaatgttttacaaccgcctttatgcaaatagccacaaaccatccttgtatccccttgcacgtctgcatcgttggagtggcttgctgagtacggtggttgtactctgtcttgctattattcccccttttcagaagtgtagtgcttctgagctgaagatggagttagaggaccaaagctcagaccccagttgagttttgcctgtggagtggagctgaagccccgctaggatcgcctttttccgctgctgctgcttttgtttcggtgtgaggattaagtgcctcttctgtaagtattttacgctttatttacgtttggaactgtatattacttgtcgttttgtgtaccctggctggtcctggacagggatttaatacgcaaaatagtctggaaatttgggttaaatttctgggcgtgacaagtatggacttcatcgaaggtttgcccaaatctgaagggtatgacacaatattggttgtggttgataaattctccaaatttgcgaagtttattcccctttcacatcccttcacagctttgcaagtggccactgcttttattaagaatgtctatgatatctttggcatgccccaagtgattatttcggatcgcgataaaattttcactagtgctctttggcaagaactgttcaagttggccgatgtgaagctcaatatgagctcttcataccatccccaaactgatggacagacagagcgcttgaatcagtgtctggaggcttatttgcgttgtgctgttcattcttgcccaaagcattggtctaagtggttgtcgcaggttcagcattggtataacacagcttatcatagtgccttggataagtctccttacgaagtgttgtttgctaggaaaccaactccatttggccttattgatgttggcgacagcatggtacctgatgtacatgtttggcttcaagagagggctcatatgaatgaagtgcttcatcagcaacttaccagggctcaacagaggatgaaataccaggctgataagcatcgttcaaaaagagttttcaatgttggggatatggtttatttgaaattacaaccatatgttcagatgtcagttgctaaacgtagttgtcagaaactgtgtttcaggtactttggtccatacaagattttggagcgcattggagaggtggcatacaaattggacctgcccccacaaagtcaagttcatccggtagtccatgtgtctcttctcaagaaggcaattcgtcctgatgtccaagttcaagccgatcttccagcaagttgcatggcagaagatgcagcaattttccctgaagaaattttgcaccgtcaactcatcaagcgaggtaatgcagctgtgccctatggattagtccgttggacaggtttgcctgccgctcttgctacatgggagaatctatgacagctgcaatttcgtttcccatcttctccggcttggggacaagcctcttcttaagcgggggaaattgttatgtgttgtgtgtgctgtagcttgtcagctgttgtgttccctgtattgagtataactgggtgtttgggcctggcttgttgtgggccgtggaccgtgtgtgtgtgtgtttacgacgtgccgtgctggactggcggtcgcgtcgagtgcgtgtgtcttgtacccgttaaaaggggaactccctgccgatgagcaggtatcgatgagaagaaatcaaatacaatcaaactacctctctctctctctctcagttcatccccttcctctctaattcaacccaaatcccctagcgaattccggattagcttggcgtgacgccggcggagtcttggagttcgtcacacgatctcttcctttttatgtatctggtcatctggatatgctgatcttctgaatggaaaaaaaattcattattgattccctcaagtcacaaatacttgcatcggacacatgaaagtggctacatttcagtgtgtcttttcaaaaaaaaaaaaaaacttgcatagtcctctcgtgatttttaatagttgaggttattaataaaaaaacacgaatattagagaaagacctaatatcaaataattggaaggggtgaagcttcgaacataggtcgtctagcccaccaccctgtggagctagccgggagacccctaggcgtttctccgaggttattaacttatggacacatatttgattatttgtcttatgcaaatacataagatataaattatatttaaaacgcacaaacaaaatcaatgataattacttatttcatccagttccataattcttgacattttttacaaggttgatatcaaacttttttaactttgactaacaataactatgtactactagagatttgtcttacaaaatactataataaaagtatgaaaaaaatatttattatacatattataataaaagatatagttaaaatttttttgaagactgttattttctaaatcataaaagttaacaaaccggagataataagtttttgaataagacaaatagtcaaatctgttgaaaattcaactgcagtgcttactgaaagacggaggcagtatggcggacttaaaagatgagtgctaggttggcccaccaatttcttgggccaagctgtgacccactctaaattaatggacgaagctaaaattgtgattatgtagcgttagtcaatttaatttagtcgtccaaatttagtgcttgttgctgatcgccaaaagaaaagattgcacgcagctacgacggtgttgagcagcgtgcttgtggaccaatatttaacatactatctttttttaaactcaatatattaaacattaatagcaaagtacatggataagttcatgatgcaaaaacagaaattgtgatatttaacatgctaaatgcaaaaaccagcatgttaaatgctatgattatgatctaaggattatcattaatctatcatgatgcaaaaatggaaatttcatgctatccaatcatactagctatgacgagtctaacgaagcaaaaaaaagtttcagatgctgctctggtgttaattgaggagttcaatcctggcaacggtttatagattcttctatatatagatctctgaatctgaatccttgaggcacgagctgttgtttggtgttgtgcagtgatagaatgaaagattttctagcattatttatatttatatagatgttaatgaatctagacacacatatatatcgagattcattaacatctatatgagtgtggacaataatagaaagatttatattataaaacggaggaagtagttcgtatcacatattgtgtttctttattattgtaggactcttgcacatttatttgcttgttttattcagtcatcacccgttttcacaaatatccaagatactgcatatattcgccatttctgtgtgaaaacatgaaggatttgactatgatgccaacaagtaaattatcactactcattttgctagttgagatatatcattttttaagataatagttgagatatatcataggttcaatcgttcaagttcctttccttttgttttcacgaaatagatccaatttctgagttttccttcaaatctaggaaatgttgtaacctactcccagttatttttttcggcgttcctagcacttgttcttacagataatggtgtgaacaccatggaaaaatgctgtgaaacaaacggattaacagagggcctgagtacgccaccaacaaatcacccaaaaacaaaattttcagaccgagagccttcggtaaactgattttgacggcaatccactcacaattgatcataattgagtgtttcaaaatccaatagaggtttggcccaagaaattgatgggccggcccaatgcacgtcaacttcaagtccaacatagtattatgcaagtgaaaaagtatgcaaagtatattttaaaatttttatgcgcattgaagtttatatgttttcatttcaatgtatccgatgcaagtatttgtggcaagagggaattaacaatcaattattttttccattcaccagatcatcactgacccagcctagattacatatttaaatttaagaagatgggtttggtttcgatggacggtgatacgaaatgggatgccatgccggcggccggcggctagccgagctcaacgctggcaccgcggcgaggcgttgtcgaaggcgaggctgatcggcgcgctggcggcgtacgtgaacaccaccggcgaccccttcacgatctgcaggccgtcgttgacgaggcagaggccgtcgctgccggcggtgtggatcttgctccggtcgacgccggcgggcacgccgtcgaggcaggacaccacgacgtcgccctccgggcacgagcactcgttgccgatcgtcacctggaactccggcaggccgcccacgacccgcccggtcttcaccgtcgcgatggtgatgtccgacgggtcgcacggctccgggtcctcgccggcgacggcgacgtggacgtggcagaggagcgccgcggcggcggcggcggcgaggaggaggagaagggtggtggccttggtcgtcatggtggtgagctagtgattggatgcgtttgcttcactctcttttgtgtgaagaattagtgtagagaatgtcactatatatagaaaattttggaggagcatatatgtatatctgggcaatatatatcagattatcccaaaattagcgatttgattgtatcttcgtgattacggcgatggatttaattcaatcccctgatgagtgaagatatattgttctacgtggctgtgtatatccattttgagagactggatttctatccactgtctttaaattctacacatttgttttctttctaaaagtacagtgcaagtggctggtatgttatatcatcattctaccggaaatcgtgttttagaaactgtgtacattgagaaaaaaaagacaaatttatgtgtcgatagtattatatgctgaatttgatgatatttacttcacgatgtgtgagttaattttacacttgaagttttgtggtacatgagtaccggagtcaatgttagtactccctcaatcacagtacaatatcgttatagaattcctacagtaaatggaagaagctaactttgatcatggtaagtgcttaggcaaaatctaaattatgcatgcatactatttagttaattttatcgggtacagataacatggtccgcttgatcagtagtcagaagtggcactaataaactactccctccatattttaatgtataacgccgttgactttttaatcaacgtttgaccactcgtcttattcaaaatttttatgcaaatataaaaatacttatatcatgcttaaagaatatttgatgataaatcaagtcacaataaaataaattataattacataattttttgaataagacgaaagatcaaatgtttgtcaaaaagtcaacggcgtcatatattaaaatacggagagagcacaagtgcagcgtgccggctggcgtcgaccggagcaagatccacgccgccggcaacgacgggctctgcctcgtcaacgacggcctgcatatcgtgaaggggtcgccggtggtgttcacgtacgccgccagcgcgcccatcagcctcatcttcgacaatgcctcgccgcgcgcggtgcatgccagcgttgagattggccggccggcatcccatttcgtatctagtactatcatcatccatcgaaacgaaaaatattgtactgtgcttatatgtatctaggctgggtcagtgtgctgatctggtgactggaaaaataattgattattaatcccatctggtcacaaattttgcatcggatacattgaaatgaaaacatatataaatttcaatgtgtctaaaatataataaaaaaatacttgcatactttttctaataagtactccacttgcataaggccgtgtttctttcagcttgggattattataatctagattattgggagtaaactgaaagaaacagacaacttattaaaatagtttattataatctagagcccagcttatataatctaataagctcatttaggtgagctttttctagattattgcgtaaaaaattacccaccatgccactccactccctctttagacctgcaaacccaataatctaggctctaataatctaggaaagaaacaactaaccgcttattttaatacagattataacaatctagcttatagtaatctgactcaataatctagattataataatcccaagctaaaagaaacagggcctaatactgtgttggacttgaagatgatgtggattgggctggcaccaatttattgggccaaacctctaagatcttgttcggtttataggaggttgaagggaattggaggggttttaggggaaataattccacaccacaacaggtgtggaataaatcctctccaatccttctctcttgggaattaaccgaacatagcctatattatgcaactctcaattgtgatcaattgtgagtggattgccgtcaaaatcagtttacccaaggcgctcggtctgtaaattttgtttttcggtgatttgttggttgcgtagtcagtccagaaatgctaatgggcgggtgatcgctcccccgcttgtccagcgatcacccgtccgccccctccctatactactagatacacttctccctccttccttactacagtacaccacacaaaaatttaaaaaaaaacaaaaagttagaaaaaattatgtatagaaatactatatataaaaaatttaaattcaaattcaaatttgaatcgggtatgtaaactttttgacttataaactatgggtctataaattttaggtgtataaactttagatgtatagaaatactatatatagaaaatatttaaattaaaattcaaatttgaatcggatataattcaaattcaaatttgaatcgggtatgtaaactttttgacttataaactttgggtctataaactttgggtctataaactttaggtgtataaactttagatgcatagaaatactatatatagaaaatatttaaattcaaattcaaatttgaatcggatataattcaaattcaaatttgaaacaggtaaatttgaatcggatataattcaaatataaatttgtaacatgtatctaaactttagatgtgtaaacttgaggtgtataaactttaggtctataaactaactttaggtgtataaactttagatgtatagaaatactatatataaaaaatatttgaattcaaattcaaatttgaatcggatatataaacttttgacttataaactttgggtctctaaactttagatgtgtgaacttgaggtgtataaactttatgtgtataaatttactaaaataggaaagtaatacggtgccaaaaaaggaaattaggtggagggagggaggggggagagggtagcgaatctgatcgctaccccccattggcgggcgatcgatcgcccattagggctgccctagtcagtccctctgtaatccttttgtttcacagcattttccatgatgttcacaccatctatctatctatctatctattatatactaaaagtccattaaactttctacaaacgttctcctcatcgttcgatcggggtgtctttcatcctatccgtacgcgaaaaaaaactcccgtgccacgcgtggggcgatttgttgcatcgtcatgtgggatttgttggcccagggctagcagctcttaagtcgccatgtggcattctagaaacgctcttaacttgccacatgttactctagcaaattagagaaaaaagcaaaacatctaaccgttgattttcactaatattcgataatattcgatgatccatattttctaccatcagattgatctaaagaggaaaaagaaaaggcccacaccccacctccagccatcaaaagaaaaggctcattatgtatacgtatgtagttacgtaccatataccacaccctggcctcacgtgatgcacgagggagacctcccctcctattttcaagcaattagtatatagaaaacatattttgtgataaaaattttaaaacaactgtattgtctaaatcatagagctgattttttttattcgtgcatgtcatgggattatttacaataaaaagtttataattcaatttccaaattaactatatttaacaagtacaataaatgtattactttggatcctatatggcaagagactagctattggtcacttgatacatttttagcaaaactcacctagatttttaaaccatatgattagcatcatttagcttatattagaaaatacaacacctgatatattttctcagagatctaaaattatatctatcactaaaaaaaaaaaatctccggccctattcccgctgaacatatacctatggtcctctcccttcttactcccctcctctcctcttctatttttttttaactaacaacctaatataaaacaacgtagctaaacgatttatagtatctaaaattatatttgatttttaatttgtttgaactattttttatttacaattaattaaataattaaagatccattatagctgtattttactatacaaaaattaaaatactctgcatggaaactaaatgacaatggaacattacaatttaaaacatcaaaatatgtattatgtcatattaaatcattctacataataaaaccaattaaacagcctttagatcacacttaagtcaccattaagtcaccatatgtcacgtcttaaaattacaaaatatttcaattaaatcgatgaccaattatttttaactattagatctaatttaaaaaaaatcttacgctgccacgtattatgtcttaaaaatcataaataatcttagaaattatgaggaaaataatgaaacctatcattattggttttaagttacattatttagaaaaggttagaaaataaatcgcatccacctcctcacccccatcacatgcgcacaccattgcatgtcccctccctatatttagctattaaaatataagagaaataatcaataattttagatattaaaacaaccataacttttaagttacacatcttatttcatatatacaaaatatcgcattcagccacattcgacccatgcgctttgcataccatccaaatataatcgaaatagctcaaacaaattgactgcatatattacgtcattttacatcattccgtaaacatgcatagctaaattaaaccaatagtatccaaataaaaattacaagtgaactgtcgtacattttattattgaggtggaatacccctgcccttttacatgtcatttgaattgccataaaagaattttgaaatgatctaacaacacaggttgcatcatcatatgttgtttttgcaaacacgtgtagctaaattagatatacactatctaagaaaatagaactaactataaaatatgaatagtccaaagaaaatccaattccttaaagaaaaccgtaaacaacgagtttacctaggtaagcgagtttagctaggtcttaggttttcaccaatggacccaaaacattcaactaaaaaaagaaaaaaatgactttctttgaatctatacttaatttatttaacatgttttataaacaaactaagtcttaaatgatgatgaagattatttataattgcttatacagttaaattaaatatatatataatatagattagagaaattatcaaagcgatacggacgatgaatatttgtcaaggaaacatactctcaaaacattgcagaggctattcgattaatatgatccattctcaaacgctgctcacgatgcatgaccgcatgaatacgcgggctatctccctagttgttataacaacaagtgcaaaattgaacaaatgtgctaggaacaccgaaacaataactgggaataggttacagcatttccttgatttgaaggaaaactcagaaattggatctatttcctaaaaacaaaaggaaaggaacttcaacctatgatatctctcaactagcaaaatgagtagtgatattttacttgtttccgtcatagtcaaatccttcatcgtttcacacagaaatggtgaatatataggctgtgtttagttaccttcaaacttcaatttttttttgaaaaggactaaaacacggcttgtatcttggatatttgtgaaaacgggggtatctgaataaaacaagcaaataaatgtcctagaataataaagaaacgcagcatatgataggaactactctctccgtaaaaaaaaatgcaaaccctgggtttccgtgtccaactttgacggtccgtcttacagggaatttttttaaattcgtattttcattgttgttagatgataaaacatgattaatattttatgcgtgacttgtctttttaaattttttcataattttttcaaataagacggacggtcaaacgttggacacggaaattagagtttgtctttttttttttttgggacggagggagtactctataccactgcacaacaccaaacaaccagctcgtgcctcaaggattgaaattcagatatctatagaagtacctataaaaccgttgccaggattgaactcctcaattaacaccagagcagcatctgaaacttttgtttgcttcgatagactcgctatggtatgattggatggcatgaaatttccgttttcggatcatgattggggatcctatctcaggtgttggtctctctattgcagcatatttcacgatggaccagcagtctatcactgctagaaaaaatatttttcaaggcggacaaaatcagtcttcctaggcggatggccggtccatctgtacaaagaggtttgcgaaaatgaagttttttcgcaggcgtgccgcctggtcacatagccacttgcgaaaatgggacaaatctgcctggaaaaatatacgcgccaaaatataacttttttctgccaattttttaatattaacttttaattaataatgttgcaattagttaagtaatacataaatacatttaaccattaacaaacatttaattcggatataatgcatatattgcttaagttaaaagtgccgtcaatacatacagtaatatttacaactaatattgtcatttcgaaatgcacgaatataatttttattatttcatcgtgttggtataatcccgaggagacttgtattaattattcactcattgctatgctgacttcacttgcggtgtatgaagtgacagagatcccgctgtatatttttaatgcttgtgtcatcaaagctagttcgacgtttgtgtcatataatattctaggtgaaaccccacgcattgctacaggaatttattatgataataataaaaaaaataacatgtaaaatagctagataacatcagattaagtaagttaatgtggtttatgataatttaaatttaaatagtatgtagaatggtgattcaaacgtaaaaagtaaggtggtatgactttataaaagaagaaaaatagggagatagtttggaccgtagattaatcgatcatctaaaggctaaaaacaattgagatgatatggcttaattagagaaaaaaagagaaagataattttgaccatatagattaatcatttaagcactaattaactgaggatgaactatttaagtatttaggatatcataaaacataataaagatatacattgaaatattatgtgaattatgtgggatgataatttaacatgcttgtattttaaaagctcttaaattataaaaaacgataaaattattgataatatagcatgtttgcatgatgtttaaatgtgatgattgttagtggatgatgatgtagcatcttgttaattagtggatgatgatgtgacatctttagatgttaagcttaaagagttagtatgttataactttatagtaagataggattagtatattaattagatgtgcagttcaccattggaattatatctaagagatttacatcttacatcctttgcgttgctgttgtacctgtcattaaccctaaggaactcatatgtgtaatatccacaaaggacactgcttttaggttttcttgtgacatttcatgacatacacatagaaggaattagttatacattgcaggtaaaatttttaaataaataagtgtgtagagtattactagccagtatatatgcactagcaacttctctatcatttgcagttgttccctgccctttactttgtagtagttgtacgcactgtacacataataggatttatgattcgtattaatgaacaaaatttaataattatgaatacttcatgaatagtacttgcatggatcagaatcacttactattgtaagattattatgaattatctatacgacctgtgattataatcgacgaggtccagaactgtaatgttctcgtacttcgggtagagcaagaaacatacttacttacagttatatagagagaaatctatcatacttacttaaagttgtatacggacattatgactcttttattttgaaatttgaggaatgctcgtcccacatactcatcccacacatttatcccagccttccataaattctacatatgttccgtcagtggctcaagaaatacgtcaatatcaatccaagccgtcaggaccttatattaggacacagagtagaacggactttttcttttgacaaagccagatagaaagattgtacatggtcagaagcattggccaagtgctatgtgagttgcttatgtctccagatgagttcactccatctgtactcaaagcaaacataatattttgtgggtctttagcaaattctagttactttgcatcaaagtttttccactgatgagcatccgttgggtgccggagtatctcatctttcttgctcccttcttgatgccagcgcattaattccgcatctctggggttttagtacaaacgcaatatgcggtctttaacagaaatataccacattaccagctgggggattttttttcttattttcctcgaatgagttagcctcttctttctcaaaacttacacatggagaagtgtttttagttgatttgtacctgttagcactgcatgttgggaatttatccaactaagcgtactccttcctgtataggatgcagtggttcatgcacgcatggatctttttaacaccaagaaaaaggtgataaattagttttttcgcttgatatgtgttgcaaggtaatgagttaggcttcggtagcatgtttttcaaaatttgtagtaagccattaaaaatactagcaaaccaaccatacctggccttcaagcgcattagttcaagcactaatcgtagtgttgagaaccccctgtcacaatcctttgactcatcatacaaaagatccttctctgccttctctaaagattcaaaattatctgttgtctaatggacaactgcgtcacgtcgaaaggcgtggttctctcaacagtagttggaagtaaaaacaattgtattgcttagtgaaaaatttttggatccccctattacatggctttagggggctatttatagtcccattacaggttcccctttagggtttaagttttacaggggaatttacatggttacccttatgatagggaaattattgggggcacatagtgtcctttacatgtatgggcccctattgggtttaaatggctcggcccatttatttgccgaaatccctcggaggcgcaacagcccgcagggcctcctcccggtgaggttcggtactttgcgaaacccgtgccttcgtgccaaggctttcgcctcaccgtcttcgcctgtgcggccctctaacgaggtctttgcctggcgaagtccgcgtattccgagccatggctttcgccatgtggctttcgcccatatggtagccttctcaaccttcgccgcttgcctccggtctgagtctgttgcctaagctcttggtttcggtaggttcggccgagggccctcgtggtgtacctccaacattatctaaacccctaaccgaccccattagcacatcaggttctgtatggcgtaacatttcctctaaatcaatgatattatcaccacaactatcaccatcagcagcctcaatgtgatcatctttgtcatgataagtccatattgtgtaacccttcataaatccacacgtcaccaactgatcccttattctcgaaccgtctatccatactttttcattcttacaatcagtaaatggacaatgtatctccgttacattgttgttgtaagcgtgtgttgtggcaatatcaataaatttagatacttcatccgtatatgacgacaaatacctcggcatatgatagattcattgtctgtccataactctgcaaacaattcatttacaattatattataaattaaattgacataatagtacatatttacaaccaaactaaactgtgcttgttatgagaaagagaaatataaataagtaggggatggggatctacaacacataaatttttcctattatgtggggagtgtggacaatacatattttctctctctttgaaggaagatgtttttctctctctacactagatctaggtgactgggaaagagcaatatacatatagtttggtaatttaggcacaatggaagagagaataacatgacaccatggtgtatacatagatcaaccacaatcatagcataacaaatcataaaaatgaaaaaaaattgcatgcaaaacatggtgctttcactatttttgcatgcatagatccatcactaataaggccaaaaaataaaaaaattgtaagaattaatggaatgcacggatctaaccacggcagaaaaatccaccgaatttcgagttcaaacctccccaccccccaaaaaaatttcttgttttcagagagagaaactccatatgaactgttgggaaactcggggggaggaagcacaatatatataggaccttctttccgtgcgggccacttaagtgctccacctgggaagatggatcttctaaggtggtctgccatctagcccctccttcctatcttacagacggatcgatggggcacatttttagttcacctagaaatacggtagtacctcgtttaggaaaatggtttttctggtactatgttgtatccaccctcttgaggaacgtaaccttgggtctatttgggaagcgaggagaagcagtagaacacgaggaagggaaggggatgagagagaaggaggaaggataaaggatgagagaaggaggcgccgcagttgccggcgaacctacgctccacactatggccctgtttggaagattagcccaggactaattttgagaactaatatttagtcatgaattggtaggctaaacattagcctaaggtggtatgtttggatccataggctaattcaaggctaaaaggtggagagagagtagaaagtgaggagagagaaggagagagagagctgcttttttatggtccccacacaaaattagccccattagcatcccttggaggggctaattcacttgagccaaaaattagcccacctgtttggatcctcgagggctaattcagagctaaaaggtaggggctaatgtttagcccatggaaccaaacaggacctaagtcgcctcgcgtgtcaccccgagagaaaatggtggattatccccttcacatatttgtatctgttattagacaataccaatcgaccaacatattttgcacccacaatgacaagaaaaacaaaactgttcttctttttagaaggtaaagtcggcgttagttttatattcgtcacattcaaaaaaaattatataattatttacttcatgttagaacattttcttttatgtcaagaaaaagacaacaaacaaatgttggtcacgtttagtgatttaaaaagttgggtaacatatcgatatgccctctgattaaatagatggcgatgcatcgttaccattgagctaagataaattttattatccttgagaaagtatctggaggtatcaagattttactctagaaattttggtacccatcaaattttagagcatattttccatacttgaagaagtactatgaggtacgaggtatcatgaggtaccaatctaatctaactattggtttaaagaggcaggatcggctaatgaaaatgaggtgcctctgctaatcaccgcccactcggccaatagcgagttcgtccgtgccgccctcttctcctctcttccatctgccgcatcgccgttgcatcgccgcagcatcgagtctgccgctgccgccgtcgcatccagcccgccgccccgcggccgccgtctcatcgagcacccaggcactttgccagacggagctccaaatccatcacctgtcaatttgtcatctcgtcctccaccctcgtctcagcttccctggcggacgacagagcaagcgccccaaatcggtggctttcatatcaaaattttattcggcaaaattgctattcaaaaaaagttgaaatttatccaagaatagcctgatgacgaacatttatcaagtaaaattgctcttactaaaactccaaaaggtctgaacataaggggaagatgaataaaagtcatacatctgtctacgtactgaatactgaaagcaatatactaatatccatccatcagctgatgccggtgctgttcgatctgcttgctttcttcttcgtgcatgaagcatcactcggcaccacaaaggttgttgagcgtcctcgctatctgccgcttgagctgtggcgggggccaccgcctacatcaacgggattatcgcgatgagatttggcgactgctgtgcttggggcagccagatccaccccgctctcgcagcgcgtaggccttgcggtcggcggcaagtcggcgacagtcctagcgaagtcgagctgtgagaatggaagaggaatgtggccatggctgggccgccgggggatatcggtggaggcgtcgtccctggcttcgctcctctgctcgggatgcatatgcgaaatcatagttttacccctaaaacttacgaacggagtggaggcacctggtggaaagaggtgcggtactgggaggtaccaaatcttcccagccgtttgatcatgcgaaatcaatggctctgattcggtacctccatccctcaaggatggtaaaatctctctaaattttacgctagaaaatgtggtaccttcctataccttttcaagaatgataaaattacccttgagctaatataaaacctaacagttgtaaactagcacaaaagcattaggaagaagtcaaagcgggcggaattacgtgagagaaaacctcagaccttgtatgtgtgtactattaattttgttttctgaaatgtgcactcagagttcctatttttattgttgcgata

SEQ ID NO: 16826 - DNA, 946 bp, Oryza sativa
actgtctcggcatggcgaccgatctatcccaatcacttgatttaagtatatatcgatataaggactatatgccgttaatatctacggccgatcgagtagatttagttcaaagataatgactatcgatcggtgcatatatgacatcggctcaaatgatatgtcctagctgatcagctatcgtttatggatttaaccgcggtttctttgtctttgttttttgttgattgcaggatcaaatcaactggcacgctagcatacccgaaggcgagttttggacctgcactggagttaagcagatctcccaggcctcgtgttttcacatcaacacgcttttggcacacccgatgggactattagaagtcagaatcacaacagcattttcccatggctgagaaaccaccagcatcgccgtcttcagctggtaaagatggctcttctaaatttaagatctagaagcctggtctatctgaagttaatgagagcaatatcgtgcctatcactctggacaagctgacacccgagcagcaaaaggatcttgaagctatgatgcagcaagcacggaaccaattcttgaactcattcatggagacacgtaagggaacaattgttcagaagtataaagtaaatgtaattgctgatgttcccggaacaggttcgtccaaggatcgagaaatacagcaggttccagatggtgcaactcaatcaggtgataaaggtactgcggatggttttcaaggggtttaaggtgatggctctcaaggggttcaaggtgttggttctcaaggaattcaaggtgatggttctcagggatttcaaggtgaaaatcctaaccaagatggcaacacggcacagctacagtttaacaacttccaagatcggattgattatgatgtgcaacatgctttgattaattaatctggggtattagtcaacacattgtcaaaca

SEQ ID NO: 16827 - DNA, 5863 bp, Oryza sativa
ccgggactaaaaatagatctttagtcccggttggtaacatcaatcgggagtaaagcttatattgatcttttttcccggttagtgttaccaaccgagactataaatagatctttagtcccggttggtaacaaatcaaaaaattcctcagagctttcaaaccaggactaaagatgtttttagtcccggtttttaatacaaccgggactattgtgaaatctggtggaccgaccaaaaatggtttctccaccagtgtttgcttctccttttatcttaacgtaagagagatgtattccttgtaatttctatttcagtttagtggaattataatcgcagggaccttcttcttgttctctatgttaggaaaccggccggcccatgaaagctcggcacaggttatactctaatgggccatcactagagagaaggattgtacacttgaagatgaaatgatgagttggaatgttgcctctctacatatctttgtgtttccactttttcagacattatgcaacccctctagactacgcttataacataagggttgcataacacgttctcactacgacattctaccgaagaccgagagagaataactttgtgtctctactttttcagatattatgcaacccctatagactacgcttatagcataagggttgcataacacgttctcactacgatattctaccgaagaccgagagagaataagggaagaacttgtaagatccattctgcatatcgctcatctaattgtgcaaatggtaagaacttctttttcttttgcatgaatcataaatctatctcggttgtcaaaatatagccgtagcgttagcacggataaattattagttacagatgaaacatcaaattttaacggttgaaacatatatgtcttttctctaaattataatctctaaattataatcttgtgatcttattttaaaattttaattaaaacaaattcaatggtataatcgaatcgtagacctgttaattagtttatgagaaaatttgtattagatactagtaatacactttctaacctataaaaaaaaaagagaaaaatgagtatacgttgccctgcatacaacatgcagggggagagagtgcgcgtgctactgtatagaggggctgttgagttaaaaaaaaacatttcacccatcacattaaatttggatatatacatggagtattaaatgtgaaaaaacaattatacagtttgcgtataaattacaagatgaatcttttaaacctaattgtgccatgatttgataatgtggtgctatagtaaacatttactaatgacgaattaattaggcttaataaatttgtctcgtggttttatgtggaatctgttattagactatgtttaatttagttctccgtatatttgatgtgacgcaaggaatttttttttccaactaaacaggcccaccgtttagagaaaaagagagcgggtttcttttcaatcttaaaatcgggatcagcacatgggagaaaggaccgagcgagggctcgaacttttttcccccttgcgcgtcgggcgcccgaggtaaatcattttgaagaacaagttggacggattccattgtcagaccgtatcaatccccttttcatttgttaaagaaaatgttaaaaaaagaagaagagaagtatacctacccgtcccggttttcccccaaacttggctgcactgcagagctcctgttgttgggtgttcgattacagacatctggttcgctgtaggagtttattagcacgtgattaataaaatttattttagctatttttttaagaaaatagattaatataatttttaagcaacttttatataaaacttttataaaaaaacatatcgtttatcagtttaaaaaacgtgcgcgcgaaaaaagagaggggtgagttgaaaaaaagattctgttctttaggtgtaaagttttcgaaatatatggtcgtacatttgaaatattaaatgtaaaataataaaataaattacatattctgtctgtaaactacaagacgaattcattaagcataattaatctgtcattagcaaatatttactgtagcatcatattgtcaaatcatgacgtaattaagcttaaaagattcgtttcgcacatcctgagggcagcaattggttttttttcccatatttagtgccttatgcatatgtctaaatatttgatggcagcaattggttttttttttcatatttagtgccttatgcatatgtccaaacatttaatatgatgtttttggccaaatttttttaatctaaacaaggccatagctcatagctgccctctccctgacttctgaatctcttttagagagagagagagagagagatgagttcttattcccttggcggcatggatgctccggtgagtttctccctaggtgccatgggccctctcctcaggaagctcgattcgcttccggtggctcccgaaatccggctgcctgagccactgaaggacggaatcgagctcctcaaggaagatctagaagaaatcggtgccgccctcgtggagcagtccatggtagattccccaagccacagggcaagatactggatggatgaggtgcgtgacctctcctaccacatcgaggactgcatcgacaccatgttttcgatgcgctgcggcggcgacgacggcaagcccagatccgttcgccgccacaaggttggccgtgtgaaggttgacggtttctccaagacgcagaagccgtgcacgaggctcgccaggatcgcggagctcagggctctggtgcgggaggccagcgagcgccacgaaaggtaccagcttggtgacggccgcgcctcgagctcgagctcgagctctcaccgcgtgttcactgcgcacggccaggttcctgcgccgtgcagaaatctggttggcatggacgaaccgaagacgaagctcaccaatatgctcaccgacgaagcagagctgcatatgaaagtggtatgcattcttggatcagccggtattggtaagaccacgcttgctgaacaagtataccgtaaacttagatggcaattcgattgccatgcttttgtgcgggcatcacgaaaacctgacatgaggaggcttcttggggccatcctctctcaagttcagctgcgtatacggatatctgataccagcacggtgcagagccttattgataatctctgggagtatctacagaaaaagaggtaattaattaacgctatattcactgctttttaatactagttcagctactgagcatcaccaatagactctcaaaattctattcccaaaaatctgttattgggcgttctaaactgattttggggtgttgaatgtattcctccttccaacaaattggcttaattaactgcctaaaattaaggacttggcccatgtaaaaactattaacagaaatcatgctccccatcatccatcatccagcgtgatcacatctgcatgatcggccacgcctccctccgcgatcactcccgccatgattttgggagtcaaccctctcccctagaagagtagagcaagacatacgggaatgggagctgcaaaattttggtagacctttcggatattgttggagcaagatttttacaaaaaaaattgtaaattttggtattgggaatgattttgggagactcttgtgaggctatctccaacccttcatgtcattagcatgaggggactcagtgtccatagcattaagtatattgtcacatcggaaaaaatctgaggtggcaagagagttaatgaggagagagatgaaaagatgaagaaaccatctcttcacaacaaccaagaatgaaaacaagtgataggttcataaaaggagagagaagaaagatgattggatatatagtgtctatatgacatagcaagtatggaaactactttgatagtttctaggttggggatggcctgatgctgcacattgaacaattgctgttccctccgtcacattgaataaggcgcgcatgcattttaaaattgaactctctaaatatctgatcaataatattttgttataaattaacttttatttgacaaaaataatatcattggattgacatttaaatttactttgatataattgtgattttgttgttacaaatatcatagtattttagatattcaaaatcaaagatttgttttaaaaaccataccaagtttgactgcgccggataaagggggtaatttagaaaataaataaataaataaatatattatcctgataaacttcctttcctttttgagagagacctgatacactttgttcttttcccagagaatataatttaattatactttgcaggtattttattgtaattgatgaattatatgaaacagcaacatgggatatcattaccagtgcttttccagaggataataattgcagtaggataatgactacggctggaattgaaggtgtagctctcgaatgctgcagttatcattctgtcaatattttcaagatgatacctcttggccttgatgattctgcaaaattattctttaatagagtttttggatcagagcaacaatgtccttatgaattgaatgaagtttcatataggattacagcaaaatgtggtggattgccactagcagtcattattatagccggtcttttagcaagcctgccgtgcaaaacagagctgtggtacaatatagatggatgtttatgttccagtgtgactacagatattgatttggatgagatactgaaggaaatcataagtcttggctacgacaatcttccacattatttgaagacatgtctgttgtatcttagtttatattcggagggtttcataatttggacggctgacttactgaagcaatggatatctgaaggtttcatcgctgtaatagatggagaagacatagaggaagtcgctgagagctatttctataaccttgttaacaggggaatgatccaaagtgtgaaaactaagtacaataatcaggtgttgtgtactgtgcaccacactgtatttgatcttattattcacaagtccaaagaagagaaatttatctccgcaatagattactctcaaactatgccaggaaattctttagaggctcgtcgattgtcattccactttagcaataccagatatgcaactgaagttgcaggtattacactgtcacaagttcgttcgtttgcctttcttggacttctgaagtgtatgccttctattatggaatttaagcttcttcgggttctaattcttgaattttggggagataaccatggatgcatgagttttaacgttgcaagaatttgtagattgtttcagcttagatatttgaagatctcaagccaaataataatagaattaccagcccagatccgggggctaaaatacttggaaacacttgaaatagatgcaagagtaactgcgattccatctgatattattcatctccgaagtttgttgcatctatattttcaagatgggatcgttctacctgatggcattggctgcatcagatctttgcgtacacttaagtattttgatcttggaagtaactctgaagagaatatacggagtcttggtcagctgacgaacttacgggatcttcatctcacttgttctgcaccaaaatctaatcagcaggcaaagagaaacctcgtaattctagcctcttatactgggaaactcggtaacctcaaatctgtcaaattttctcctggtgattcaggcatggatatttcctttttgttttatggaattggtatttcggttgatcgttccagaacagcgtcctctcttcctttctctgttaggacattagagttgccatccatttgcatatttgctagacttcctgactggattggtcaactc

SEQ ID NO: 16828 - DNA, 7911 bp, Oryza sativa
tttatggaattggtatttcggttgatcgttccagaacagcgtcctctcttcctttctctgttaggacattagagttgccatccatttgcatatttgctagacttcctgactggattggtcaactccgtaaactccacacattgaatcttgctgttagagaactgatagaaaatgatattgatagtcttgcaggactgcctgacctcattgttctctcaatgcatatcatgaaagctcctatggaaaggattgtcttcaacagaaaagcatttccagttctcaagtatttcaagtttatatgtggcacactgcgcatggcttttcaggcaggagccatggccaatcttcacaggctcaagctaggtttcaatgcccataaaggggagaagtatgacaatattcttgtaggcattgagcacctattaaacctcaagaagattgctgttcgaattggaggagctgctgaagccaaggagtctgacaggatggctgcagaggctgcgttgaaagaagccattagaaagcatctaatgtttcttgatgatctcgacatagcaagggtagaatgtgttaaggaagagtataagtgtattaagaaaaaacacaagatcaagattgaagattcaattagcgaaaaaaatggggactcaaaaaagcagcattctgtcgaaaagaaagcagtgtggggcaaaactatgaagaatattgctgatagtgggtatgttctttcctattatttcagcctctacattttccaatatatattgtttagaaataaatgattactacaacaataaccttatagtaaaacgctaaaacacagttgtatcaaaaggaatctttacaaaggtacatctatgctctttgaaaaggataagatgggatgctctatactaattggagcctctactagaagctttcacattaaccttagaaggcaaaagactggaaattcccacattaacaaaaaagaaaactaaaagcattaatctttgaaagatcaaatggtatgcgccaatgtatcaaatctaaggttgatatcttccaccacagaatatgtgcatttatcaaatttggaatcaataaatacctagttatacttggtttggacactcgagtatagtattttgatgaataataattgaaacattcagcattaacaaatattgagttttactcggtctagagtctcactagcttattttttatgattttattttataattccgaaattcagaattgataaatactgtgttgtactaggtttgaagtttttgttgaataatagtttcaaaattcaaaaacaataaatatgctcaatttagagcgtagagtaattttctcatgacctaataattctgcagtttagatttaatcatagtatctcatgatttgataattcaaaaatcgaaattaatacatactcagttgatgcttgtacattcacacgggttaatttctaccggtgtccaagcggtgtagcaagatcaaatagtatgggttagactcaatttacactttgtagtcaaagttgtgtgaccttgtaagcaatctagacaaatggcaaatctatggctatctaaaatttaaaacaaatcagacatgctatttacgggaagctgttttgatccctcaagagaatgtccctcgcttgtaaaaaaaaaccatctagaattctcaaaaaaaattcacaacattcatactatgtatgtatgtatgtatgcatgcatgcatgcatgcacacacacacacatgtatgtacatataacacatatacatatacatatacatattcatacataacgcacacacacaaattaacttaaatttttgaaaattttcaacttatgagtatatactaaggtacaagaatttgattcgtacctatatctagcaacaaaacaactcaaattcaactttattttacaatccattattacatacctaactaattatatgtttgggtggtatatacctagaagcaaaatctaacaaaaaaatgttcaaatttagttcaaacttgttagtaaagaagttaatgtccatacctgatctacattgccttgctctcatcatcgtcagcgttgtggcctttctcacaggcaacctctcctcgctcgagatccataaaaacaagagagaaaaaaatggattggttagttcgtgtgtgtatctatatataggtctatagtaaaaaaattactgggtgatgcgttgtgggatgggcgatgctggtagtctgcgggggtgggtttacacacacaacactccactaggtccaaactcaatttataacatttaggtataaaaaataaatatattcataccggaatttgtctttttgtttctcaatatataggtcgaatttgaagttgttctctcgtggaatgttagatgtcactgtactccacattgttaattaaatttttataactattttaattgaatttaaaagcaaaaaagtatatgaggggatatcctttcgtgggattagaattcattcctgctattaactagacctgtattgcagcgtgtttcctgaagattatactatgtcaagggagcaacgggtcgcagaaggcttcgtagtgggcattgaaaagtgcagggcagaggatgcggccgagcgaataatcaggaatgtgcctgtggactatgatgggcttggccaggtgagcacatccaagatacaggaccacttgcctgaacttgctcctcgtgctgtgcaaaacgagaagttcggctcttcaaatgatcttagcataatgatacaaatcaacaagtatgctcgtctgccatcttatgagtggagggacactgatatatccaaactgaatttccggcttctccgcgccccgatgttacttgaagctgtaacggcccgttgtcacttgttggacttaatcctcattggttcaaacaacattactgttcttgaccttggacgtcccacaatcaccaaactgccggcatctatagaatgtctacctaatttacggtacttgaggttgcagggcacgcaactgaagtcgctgtcggaggttattgtgaagatccccccatcagggggttggacatcaagaataccaagacagaggagctaccacaaggcattttgaggatgaagaagttgagtcacctgagtatgggggagaagcagaaaaatattcaagtattcatggaaaaaatgcagactctggctgagaccgtccaagacagcgatgacttgtccgacgaaacagagggaatagccgacgacgaaggcgagttctctacaagggccaacgcgtcaacaccgaaggtggatgaggacgaggtggaccggagggccaataacttcatcgccaggttcaggaagcagatcacgatcaggaattcaggattcgccaaaaaggagagcagcatcgacgaacgactgtggatacgagatctcgatgagtgccaactctccaagagaggtggacgattttaagaagaagttcgacgagatcattgccaggaacaggcacacatggaagccaatcgagtcaccgcgttctgtcaagcacggcaagtatttcgttcgctgcccgccgtcgctaatcaccagcgctgtcttttcctttttctttctttctatttttctagtatggtactccctccgtttcaggatattgtcaggaaacccctaatcaatcgccttgtgaacactggatgaactcacgcgaaagtggaagaacacgtagaacacaatagtgtagacgaacagacaacaaaaacagagtttttggtgctgcctgaattgcttgcagcttttcggggttttttctctccttttattgtacagaactgaaacatgcaaagctacgccaaaatactcggatctctacccacgactcgcggcttgatcgcgtccatccccacgtccgctcatcgtgcgcatacgcccgcaggcttaggcacgccgcgagctattctcgcttgactcctacacgcacggcttccacacgttggggctcatacactgacaatgcacaaaacagaatccaaagcttagataactagctaaaaacaagcatgcaagatttatcctcgaacaattctccccctaaaccttgcatggctgtaaaacctcaacaagaccgatcttggaccaaagctccatgaatcgatctcgcccaagggcctttgttaagatgtatgcaagctgctcgtcagtattgatgtattattcgatcttaaccctgccttcctcgacgcactcccgaatgaaatgatacctagtgtccatatgtttgctgcgatcgtgaaacacagggtccatatgtggtctaacccctggtttgataggtagccgatgttcaacaattgatcagctgagtcttggcatctcataatactcccaagcgaagcaatctctgaattcctttaacagctctatcaacttggttctaaattccgaagataaattcttactaataaatgtcggccttggtcgatcacccggacctatgtcaatctcttccaaatcatcggctgacatgaaactctgtccttgcttgtcatcgagatcatctactgtgtcctcggtgtagacgtttgaaccctccacgacgccctcaaaataatagcttgggctctccatctttaattggctgtatatcagaatcggacacttttagaaaatctccatcccaaacttttccagataagcaatcgagaccatccatctcccaaagagctaaatcggcactggcaatattaactgacctgtcggctggcacattttcaatctcgtcgccttaccactgaatcaagcattgatgcatggttgaaggaatacaacaaatagcatgaatccgatcccttccaagcaacaagctgtaggaacccttcccatcgatgacaaaaaatgttgtagggatagttttgctgtcgactgtcagttccacattcaaaattcctttggtttctgatggattaccaccaaaatctttgagcaccatgtttgtctagatgagatcctcagcatttctgcccagcttcctaaatatagcataaggcatcaaattcactgcagccctaccatcgaccatcatcttggacatcggcttcccattgacatagccatttatatacaatggtttaagatgccgattctttgccccttccggcttctcgaagactgcttgttctggtgacaaaattaacttagccgattcttcttcaactttgtcaacatcggcttgtttgaccccaaattcagcaggcaacgtgaaaaccatgttagatgcggtcacaacaccttttcctttagccaatctctttgcttcatcggctgtggcttcatcggctgcaggaacttgattcttaacacgccactcctgctttggcttctccttctttagccgatgattgatttcttgctcaacctcctgaaagcgctccctattcctcaacctttgaacccttctcttctgattctttgtaaaaataccagaaggacaccattgagtcttcccgtctttattgtcttcttggtcacaaccttggttcaccgggcccaacctttgatgaacaggaactcttgcttgccttagccgattgcttctattatacgatcggcttgaattctctataacattactgcacccaggacagtcttcaatagatggcagcctcataccttcattccagcaaaatctaaagaactcacagtcccaataaggatcaaaaccgccatcgtcttctccataatgcctcccctgctgttcgtcatattttttctgatacttattgatgattttagccgaattcacctgaaaacctcctgctcttcctccatcggctgtttggccagctgtgtgtaccatattaacaggaaaaggactgccatcaaccttcatcagcctcttggaatcatcaattttgattttgcctccctcaatagctgcatggatctgctgcctgaagactttgcaatcattggtagaatgagacccagaattatgccacttgcaataccttctcttgcccaattcttgagccgatgggattgtatgaccagcaggaagttgaatctgtttctcccgaagtagcaaatcaaaaatcttatcagccttggtaatatcaaagtcatacctctcctcttttccagaactctttacccattggcagggtataacctttttgcttctaacccactcggctactgctatttcagaatcatcatcatcatcatccaatccatatatgtaaggaaaaacatgattaacctttttaaaattcttcctggcctctgcaaacctttgttcatgcagggttaccttctatgcaagatgtgacaaactatcaaagtcttgagatgagaacttctccctgatcggagctatcataccctgaaaagccagatcggctaactgggcatcagtcaaggccaagctgtagcatttattcctcatctctctgaatctctaaatgtactcctgcacaggctcatcatgcctttgcttaattgctgtcaaatctgatagtttcatctcatgaatcccactgtagaaataactatgaaaatgcttctccaaatcggcccaactgttgattgacccacatggcaaagaagaaaaccaagtgaaagccaatccagacaaagacaatggaaaacctcaaggcatccacagccgatgcttcaccacactgagctaaaaatcggctaacgtgttcataggttgaaacactatcttgtcctgagaattttgaaaaatctggaactttgaatcagttaggcagaggaactctctcaaaccactcggggtaaggatgccgatacaaatttccagcatctttcggcttaagcccaaattgttcccttattacatccgcaatcatatcggctcatggtcgttgctgaggcactccttgtgcttgttgtggcacgggctcgaattgattgtattgaggaacaaactgggttgagctggtcctccttgctgatattgaacttgtggcgatggaggctgatactgataattcaaattgcccccctggtaattctgaaagtttggttgtatattacgcaccaaattttctggaaaaacttgaggtaccaccgtttgatctggttgcacattatgaaccaaatgctctgggacaacttgatttgcagcgtgttgccttagctgattgtcaggtgttacaaacccagctgatgtattcattaaaccttgccgctgaatcggttgaacaacttgttgcctccgtggggtttgctgaattggccgcaccacctgctgcgttggcggtgtctgttgaatcggctgttgctggactgcgtcaacagtaggttgagggggtaagaacatggctgcaccttcatcttgagttagccgactcacattctgttcactatgctgtggttgctctctcaccaacaaccgaggattaattaattgacccggtgtcgatgatggtgcagcaggtgcaggggccgatactggtgctaccggttgagccgatggtgcattgggaggaatcggctggacagctgactgattattagtaattaagggccgataatttgggaaaacacctcctggtaaataaaccggtcctatagcctgatactcagctatcgagccatcaaccatcgacttcaccatgtttgacaatgtgttgactaataccccagattaattaatcaaagcatgttgcacatcataatcaatccgatcttggaagttgttaaactgtagctgtgccgtgttgccatcttggttaggattttcaccttgaaatccctgagaaccatcaccttgaattccttgagaaccaacaccttgaaccccttgagagccatcaccttaaaccccttgaaaaccatccgcagtacctttatcacctgattgagttgcaccatctggaacctgctgtatt

SEQ ID NO: 16829 - DNA, 11004 bp, Oryza sativa
tgttgatgtgaaaacacgaggcctgggagatctgcttaactccagtgcaggtccaaaactcgccttcgggtatgctagcgtgccagttgatttgatcctgcaatcaacaaaaaacaaagacaaagaaaccgcggttaaatccataaacgatagctgatcagctaggacatatcatttgagccgatgtcatatatgcaccgatcgatagtcattatctttgaactaaatctactcgatcggccgtagatattaacggcatatagtccttatatcgatatatacttaaatcaagtgattgggatagatcggtcgccatgccgagacagtataaatcacttagaccgaaatatatattaataataagactatatgtgtttatagcatagccgattagatagatctagcatgtatcggctattactccgataccactctatattaagatattaaagcaagtaaaatataccaaacgaaagcctaatatacttaaatgcagcaagatattaacataaagggcggatttaacatgtcaattaagcatataggataaaaagtagttaaatcaggtaagatcggctgaaaccccgatactactctaatcggcaaccaagaagcaggctagagattgagattctaatcacgactcataagatcaaactcaactgatgcagctataagtatgaaaagaaagacaatatctagacaatcaagccattggaagttttatagagtggtggatatcatatataatctaagccaacgtcgatatttaacctaatcggctgccttctattgacagatgttagccgattgtaggttagatagcgatattgccagagattatataagatatatgataactcgacgaattacataaacaagattagagtatcataaagatggaatcactaatactgagaacgcaagccgccataacaagttttatctcttgttgaagatcaaaaccgatgcagctcaacccaaaagcaaaaactcgtcgaaacaaaatgaaagtgaaaaggtggcgatgcgccgagattgtattgaacgtctgttagtttgattacatggggctcggggtctatttataccctagaattacaaaatatgaccatatcggacacgactcttatctctaacaaactctaagataccataagtctttgcggcagacttttgcccaaacatatctctaagaaaattacataaaatatcataattaatagatacaatttccttctcaggactctatccatgcgtggcaatcatcatgaagcacatcaacctaaaccgacaacatatgctatgtcatattgtcggattcggctcaatcggctaacctagtccgactcgaaccctgccgatctagccacagccgattcggacttcagccgatcttcactctgtttgcgggacgatttccatctcgaattccatctcagtttcttcttcttctctgatccttggattaccaaatttggtcgttaacactaagcagaattgcagactggttgtcaaccttcaatgtgacggcgctcccttcttctcccctgagctcaacaaggagacgcgccagccacacacactgtggcacgcagcagtcgtcgccgcaatgtactccgcttcactggacaacagagcgacgaccttttgcttctgagactgccaggtgatcaaattatccccgagaaagaagagaactcccattgtgctcttacggctatcaacatcgcccgcaagatcactgtcattgtagccaatgaggcacacagcatccttcttccttcggtattgacagccatagttggtggtgctggcaatgtatctcaacacccgcttcacagctgccatgtgctcggtggtgggcttcttcgtaaaccggctgacatatcccaccgagaacgccaaatctggccgcgaatttaccaagtatcgcagtgatcccatgatccgcctataatccgttgcatcaacagccggtgcggcactcgacttgctgagcttgaggcgtgattccatgagggtgaggctgggattgctgctgctcatcccggccatctccaatatcttctcagcgtatgcccgctggcacacggtgatgccgtctttagtctgattcacctccaatccgacgtaatacttcaacaatccgagatcgctcatctggaacgtgcccttcatctcctccttgaactgctcgagctcggtggactcgccaccggtgatgatgagatcatcgacgtagatgccgacgaccaaccggcgcgtgcccgtgcctcggaagtacacggcgtgctctgacgagcttcgagagccagcagggatgcgtcgagcttggcataccacgcgcggggcctggcgaagaccgtatagcgctttgtcgagtcgcaacaccatgtgctccttgccggcgtccacgaacccggctggctgcgtgacgtagacttcctcctggagctcaccgttgaggaaggcggacttgacgtccatatgatgaacggcccagccctcactcgccgcgtgcgccagcagcacccgaacggactcgagccgcgccaccggcgcgaacacctcgtcgaagtctatcccctgtcgctgcacgtagccttttgccacaagacgcgccttgtacctggtgacattgccagcggcgtctttctttgtcttgaagacccatttgagtccaatcgggcgctgacacggcggcccgttgacgagacgccaagtgttgttggcttcaatggacttgatctcctcgatcattgcctggcgccagcactgatgttgctctgcttcatcgaacgacgccggctcttccgcagagaccatcaggagatcctcgtcgaactcccgtaccgcctgtccaggtggtgttgctggggcgagcacgttgtcgacggtgcggaacttgagtggcgcgtcatcatggtcgacgtcgaggttgtcctccagacctgatggtggtgacacgaactccaccgtcggtgttccagcgtgcggaggagtgcttggcgacgcctggctcggtgacgacacgaacggcgagcctggcggtggtggcgccgcagctggggaaggtggcgccgtctcacgttccacgaagcgccgtgtcgatggcaccgcatctggatgctgcacggtggcgtactcgacgacgaagtcggtgtcgacgcctgtttcagcctagccgtcccacctccactgagcctcctcgtcaaacacgatatcgcgggagatgtgcacccgtcgcgtcacggggtcgtaggcgcggtacgcctttgatcctagcttgtagcccacgaaaatcatgtgtttactcctgtcatcgagtttcttcacatttggcatggtgttcttcacatgtcccacacacccaaatgtacgaagatgatgaaccgccggcgcaccgccgttccatagctcgtatggagtttttccgccgatgctcttcgacgacgacctattcagcaaatagactgccgtatttactgcctctccccagaacatacctgggagcccttttgcctttaacatgctcctcgtcgtgcccaccaccgattgattccggtgctcgacgacgccgttctgctgtggcgaatacggcgccgtgagttctcgacgcagtccgagctcggcgcagtactcgttgaagtggctgttgacggtcgttatcaatcagtttcgaccgtcaatattactaaaataggagagaactagtgatgcttccaatgcataaatatgatagaacaataatattccactagtattaggtttactaaccattttgcagagaatgacaataaagtggaggagaatcgacatcaacacaaacgataaatcaatcggacgatgtcaagagatagacttatgtatgaatgggccaagaaatcagaattgacatgacaaactgggccaaaattcacaagtctgcggagaagaacaatggaggaggccacctgccgattttgggccaggttgggccggcccctggttcggccgaaactccctctccaccgttggatgtggggtttggcagggacgctccagatcctctcctgatggcggttgcggggtacttcagacatttcgcagcagttacaaccgtcataccttcctataaaaggacttcaccttctcacttcactcacacacctcaagcaagagctctctcattcctccaagtttagtttagtagtatctagctggtggaatagaattagaataggaatcaggagtccggaagtcttcagaagagttcgggtatggctctagcagctttcctttcctcttttgtaagctttgtacttttattagaatactcttctatatacatttatggtattgaaatacttttcgagtatatgagtacgtactttacattatgttcttgttatactgaatgtacggctagcttatctaggagatgctttggtgcgggtataatgtttgcttatgcaattactctatgtcatgacgatgatattagagtagtatctggtagtttagacgtggtgtctagattacgggatatcattatttggggttatatattgcggatgagaggtgggccgctgatggtgacagctcagtacgggtattccttcgagcctatatataatcctaagttaatttcctggggagggtattcctccgtatttagccccggttggatggtcatgacgggctgtcgtaaggaactcgacagttaggggtggcttctcgaagtaccaggagggcatcggatagagggtattagctagtatatcagttaactagaatgtatgtatactatgtatattagaagtataggaatagattttctttctcttttctttccacctagcttagaagtatttctgcgtcattactgggaattatatttctagtaatgttgttaagaaataccaacaagcatttctggcgccgttgccggggaagattcataatagagattacttgaactaatactttatatttacctctgtataatcattttcctttgcaagctagccttggttgttttcactttttgttgtgaaagcagggtagtgcatgactggtttcaacctgccggaaaaattcaaagaaaatccagaagctttcttccggagtgtcaggccgcgggtcgttgcttcgcagaaaactctaccgacagagaaaccagccttaccagcgccaccaaccttcaagacaatggccagcaagactcttcgcgagttcgctgctccctctgctgacaatgtggccgttgggccgcaagtaacataggagatgtggattttgacttgaagtccagcctcatttcgacttgtagcacgtacaccatcaagggcgtcagtcccaacgccgttaggctgcggctgtttccgttctccctcctcgggagagcgaagcagtggttttatgccaaccgtgctgctatcaacacctgggataaacgctctacgacattcctcttgaagtgcttcccgatgggcaaaaccaacgcccttcgtggacgaatttccagtttccagcagacaagggacgagtccattccggaagcatgggaacgactgcaggagtacgtggccacctgtcctcattatgggatggacgactggttgatcctgcagaacttttacaatgggctcacctcgatgtcccgcgatcacctagacacaacagctggaggagcgttcttctctaaaacggttcaaggagccgttgaactcatagagaagatggtctccatatgggttggagcgaggaacgactctagacccgtcagcgaggcatgcacaccatcaaggagacagaactacttgctaccaagctggacctcctcatgaaatgcttggacgaccacaagaaacggccacaaggcaccgccaaggccttggactcacatgtcatgtatgaagtctgcggcggcatgggtcattctgggaacgactgcccggaaacctgtgaggaggcgatgcacatgggcaacaacagcaacgggtatcgtctacaaggaggtcaggggtggaaccaaacacgaccatattatcaaggaggaaataataacggtaacttctgtaaccaaccctccttgaaggatcttgtttttgcgcaagctaaaaccactgatgcggtaagcaaaaagcttgctgccaatgattagatcttagagaacataaatgtcaaactagatggctttgcttccgcatttcagaaccggctgagctttaataagatgatggaaacttagttagctcagttggcatccttagtccctgcaaatgaaactaggaggattccggggcaaccagactcctccattgaaaatgttaaagcgatcacgacgaggggaggtaagtccactcgtgatccgccgtatcctaaccctacgggaactaatgggatgtcaaaagaaacgccatgtaatgactcggctgacaaggagattcagccagaaaacaccgtgccgcaggagtactgcgacacactgttgctgccattcccccagcggagtaggaaaccgtcagtggacaagcagttcgcttgttttgttgaagtgatccaaaagatccacatcaacgtgccgtcattggacgctatgcaagtgccaacatacgcccgttatctcaaggacatactcaaaaacaagagaccgctcccaacaacggaggtggtcaagctgacggaacactatagcaacatcatactccacaagctcccggagaagaagaaagatccagggtgtcccacgatcacctgctcgattgaggcacaacaattcgaccaggccttgtgcgaccttggagccagcgtcagcgtcatgccaaaagacgtcttcgacaaactcaacttcacggtgttgacaccaacaccgatgcgcctccaactggctaactcatcagtccgttacccggcagggatagcggaggatgtgccagtcaagatacgggatttcttcatcccggttgactttgtggtgctggacatggacacagggaaggagaagccgctcatcctgggccgaccgttccttagcaccgtaggagccaacattgacgtgggaacggggagtatccgtctccatatcaacgggaaggaggagaagtttgagtttcaaccaaggacggaacaatgctccatggttagaatcaagtatgggccgaacccgcagaatattcaagaggtcaaagtggagccacccaagacggatagcctggtaaggtttatgcagaacttcctggagaaggaaacaacaatgcccaggaatcgttattggaggacgccggtaaaatcacctataccgccaagaagttagagcagtcagctcagaagaagccgtcttccacaccgaaatcaaagaaggtgtggaaggaaaagccaaagacgcccgccccattacctccggagacgggtggaaaatccatgaactgaatcgaaaggagatacggtcttgcacgtcggactttaaatgacgcgaccttcgccaacaggtaaattggtatgtatccgcatatttgttttcaacaatttgaatttttgcatcatcacatatttgaatttcaaaattacatttagggtttttgaattttgaggaaattcttcaaatgaattttttagagcaaactaaaataaaattttcaacgaaaattcactataccacgaccacactgaccgttggattccaacgaccgaaagtggggccggttgggcccaccaggggtttggccgaactcactggttcggccgaaccggctaggcaacggttacttgccatttttggcagggtaatggctagtgggtcccacatgtcatttctgaccgttgtgggtaccctataaaagccagccggccgagagaaggaattccaccccatttcaacacattttcattccctctccaaagtttgctctcaagttcattcaagctttgatagttttcctcaagttcaaatcatttagttgcatatatacaagttgctttggtgaaactaactggcgggtgaaactcttgtcatttctaacccccgccgagttagcccgttcttgctccattgtgcagtatgaggaggcgactgtctcgtctgttcaaagggtcgggctctccatcaagtcgtcatgacgagtctagcactcgctcatcagctgatgtctcgatggaagacgctgacgctccacgacaactcctgagcgacgctgacctagaccttgtcagtgatcgggagagacaagcctactacatgctgagcgaccgggagtatgctcacacgtgaaaatactcaccggagttgctgaaaaagataggtatggatgttgaattttgttctatttggaaagctgttggttggcagagatttgctgtggtagataagcccggttctcgtttgcttactttgcaatttctgtgcactttgaaagaaatagaagatggtatttcttttcgctttttccgtaaggagttcacgctcacatggaaaggcttgagtacacttcttggttttcacgattcctgtaaaatcgatctctagaaaggaatttctgggttcgagaaaaataggttttgggaagatatttctggtgctccaatttgcaagaaacctagaacaaatgatatccataatcctacacttaggctcatgcacaaatggattgctatgactttgtttcctagaagtgatctgagacccattaggggagatgaattaattatcatgtttgccatggttagaaaaatcaatattctcctgtgaaatgtatgataaggcaatggttagaaagtataaagttctctgctcctgttgagtgcacttctctgattactcggatagcaaaagggctaggggtcgttagcgaccaaattgcttttatctcagccgcttgtccgcgtattgatgaggcctatctagtgcaagggcatattttgaaacatggagcagatggatctttgatatactttttccccggttgtacaaatgaaatcccattgccaaatgcagggtatcatttgtacaactgccatgaactaaccattcccctgcagaccatagaagaatctcgtgcaagtggaacatacagggagacgcgcaacctgacaaggaacgaacgagaaagttcatcatcctcgacacccatgcagatgtatgaggcaggttgggcaccaactggggatgcacctggatggacccaagctccacgccatagcatcggagtctcaacctgggcaagcgccagtgaggactcgtggcatgcgcctcatgacgaggggacaaccaaccctccagatcaagtggtgttcctccatctccaagtgaatggcgcttgagttcctctcattgggacttggggtgaaatcactaggagaatggacacccttgatgtgcagacgggggagatctagtaggacctcgcggaacacatagctcaaacgcaagaatggcaacaatctgctgatgctcagttcgctaacatcaacaacatgatgcagcaacagcatgatgaccttcaggcgtactttcgctttcaggggttcaatccttatcaaggactctgagcgaaagccaagcttggggggagatacctctgcccccactgaggtaacttgtatcacattacatatctccctttccaattgcatatttgctttccaattgcatcttacaaaacatagaaacaacataaaattttgtaaaatagaaaataccaaaaagatatgataggtttgagtcatgctaggtaagacaagctagttctctttgttgaaatgatgaaaagttgctctgttttatatctatgatatatgggttcttggtaaatgctctctcaaagattgaatttaagtagccaacaattatccgggaacctgaggtaaatgggctgcacttgctgatctaagcctaggttgttgcgagatatgagatagtaaatatgagtagctatgatcctgttactagtttgacttgaattccggatgttttgtttttcaaaatgataaattgaaagttcctcagttgatataaattcctactagagccaaaaatgtgctatcatgattacaccatatacattttggttacttgccattccattaaactttgtcaaactcatgtgacttgtgtagatacttctcatgctttatgatcaagatcatacactcacatatatgcacatgctaaactccaacactgggagctaagcaatattccattccatatccatatttccaccaaaataaattctccatgctttcatgtgctttcttctcctaaaaaaatcattttgaaaaaaaagagaggagggaaaggcatggttatgagaaataaagttatgctccatcaagcatgagcatattactggaaaaaaaatgtaatcatgccctctcctaataaataaaagaaggatttttgggagaagaaagaaaagcacaaaggagaagcattttcttttatttttcctcatataccatttccactgtataccacacacattttgcacgatcttgattttgagtatgtttagttatctgctttagtctaagtttttgacttagtaataaatgtgaatgcaagtatgccatgtttgatccttaccgagctccacatataatccttagagtaggaatcgacaaggcaacaattcggtgaggaatttatgttgatacacttagagagactgagtgaatcaattgaggaacttggctttcttttgcaaaatcatttgaaaacttccggaataagagttgaataaagattgggtgactagtgctctagttgttgttctgtctttcaaccgtccaaggcaaggagaagcagtgtctcgtgggaatcaggggtaagggtaagccaccgtgccaaagattatttaatctgagagagagtacatataccctgcacctgtatctttgagatatgcaacatagtagcaactcctgatcaacaaccaagtctttgattcctttcgtccttcgctcgagacgagcaaaggttcaagcttggggggttttgttgacggtcgttatcaatcagtt

SEQ ID NO: 16830 - DNA, 11882 bp, Oryza sativa
ttggtgcgggtataatgtttgcttatgcaattactctctgtcatgacgatgatattagagtagtatctggtagtttagacgtggtgtctagattacaggatatcattatttggggttatatattgcggatgagaggtgggccgctgatggtgacagctcagtacgggtattcctccgtgcctatatataatcctaagttaatttcctggggagggtattcctccgtatttagccccggttggatggtcatgacggactgtcgtaaggaactcggcagtcaggggtggcttctcgaagtaccaggagggcatcggataaagggtattagctagtatatcagttaacaagaatgtatatatactatgtatattagaagtataggaatagattttctttctcttttctttccacctagcttagataaattattacgaggatgagtaggaatgcttgtgtgtcactctacccttggattatcttaacccctgcttagaatatgattatcacaagtaatatataaattattagttgagttttctctacatgatcttcacacgggataaaataaatacgatacccttggaatactctcgggtgaaatgctacaatggtatatccgtatgcttgcggatgaactctgtaaccataatataccagaagtattttgtcgcgtcccaaaacgactctaaaatacatcctctaaattatgcctagaataattaaaattcgtgtgaaagcctccaacaattaaaatgtgcaaagttaaaagccaaataaggcttagaggatttttgtaaatttcctaaaagcctaaaatgtgtaaataaattttagtggaattttcagagcacaaataataattattaagaaataaacaaagttaaaatgattttataaaaagaaaaaccctaaaatccctccttccctctcttgggccgaatccggcccatctccctccccctctctcctctcccccgcggcccatccggcctctctccgcacgcgcaccgctgacgggcgggcccgcccgccaccctcgctgacgggtggggcccacccgtcatccccttcctcccgccgctcccgccgcctcccccgcgccctagcgccgccgccgccgagaatcccgccgcctcccgccgtccccgcgtgcaataaagtggggggaatcactccccgtgatcccctctccctttccccccccccatttttccctctctctctcgcgttcaaacgggcggatttggccccgcaaatctcgccggcgccattgatggtggccggacctcccgcgccggtttccttcccctccggccgctctctcccccttccaaccctatttaaaccctccccgcgcctccctcgcccgtttccgccccttgccgcaccgtctccctgccggaatcgagctcgcgccgtcgccctctctctcttccgtcgccgacgacctccggccggccttctccgctcgccgggcccgtctcccgccccggcgtcgcttcctccggcttcgccgcacccccgtcgaccccgtccaccccctcacagagtccgccgacccccggaacgctgtcgaccccgtcgacccgagccgcgccgccgccttcctccgctccggccgcctttttcatcgtcgccgtcgacatagggtgagccgtggaccgccgcctctttttccccttcccttcccctctctcggccgccgctccaccgtgcctatggccaccgccggcgaccataggggcgcgggtgccgcctcccgccgcccgcgccgagtggccgccttcgggcgcgccgagtggcccccgcgtggggcccggccgtcagccgcccgcgcccttgggtgcggctgacgcgtggggcccacggcgccggccggtgcgagcccgggtgcgcccggtccaccgtggaccgtgaggctgccgcgtgggccccaatcccgtggacccggtccgcgcgccccctcccctcggctgatgcaataaaccctttttaaattaaaatttaaatgaagaaattcgcaaatattcatttaaagagcatataaacttcaaatggccataacttggccatttgaactcggaattggaccgttcaagtctctaattcttccttaagaagtcaagaacccatttttgtgctttgttcctgcttgttatatggagtttattagagtaaaagcccttttattttccgttggtcgtgtagacgttgcagcttcggaagatccgctcttcgtggaggttgaagccgacgtttgggaaagtgagcaaggcaagtcacatcatccttgaacatattgaatcccagtttataaaattattttgatttaaattattgcattatcgctttatttaaattcccgcgttatcactgttttatctagccatgcctatttacctttgttatgaccttattattgttattgttattatttccttgttcaccctagaataaacaaaaccccaactagtggacactctactcatggtaccactagtatgattttaggtagatgcttcgctggttaattaggcaacattaggtggtttcacaactctagactttgggaatggttggattattgtggaatcggattcacacctccccctccattcaaaaccctcaaaatggttttaggctgggctcggggtgcatggttttgatagtagcacctcggccatataaggaccggtcttcaggcctctgttgcaaagcactaccgtacttccacatgtctagtgggtaaggcttagtttgtggctcagtctggttataaacaaaagtacacggatggagatggacaaagtcgggggtcgatggacatctctagggcaaatgaaggctacacgagctgcggcccggtagtcgagatgtcatggcacagggctggtgtcctgctgctaggggctcagtcctgcctacctgtcccgggggttccggccgtaggtggggttgggtcggtactcttgtttatggctaggatgggttggaaactatgtcatgtcttccgtccgtataccgtggtggtatgtggcacgtggttacacgtgaggaagatgtgtcttgtgggtaaagatgtacacctctgatcagagtataatctattcgaatagccgcgccctcggttatgggcaagcctagcaatgtacccaagttagtgtttttaattcttaaaacctgcttaacaactaaaatgtggaatggttggcctgggttggcttgggacgagctgggacccagggtcgggttgccagttcggtctgaatcatcgtaggccttgggttaaggcaggttcgtgtgggttcacggccttgattaataatcttgtatagctctaggaccatgtttacaaagtagctttgagcaactaagtgacttttaatgctgtttactgcaaaccgtaacccccctatattatggctcccttgtactcccttgcatttattctgcacttgtgggtgtgtcttgttgagtacggtgattgtactcagtcttgctcaatttttcccaaacccagaagaggagcccctggatgatgaaggctttggtgtctagctcgtgcctgccgtcaagcgcctgtggtcgtcgccctagtcttccgctgtttcccgtttgtctttgtgtgtgctgggccttcgccgcccatgtaataaagtaactatttacgcttccgcttgataaactctgaaatgtatcagcttttggtgtaccttgcctcctgggacaaggaataatacaagcacgtaaggaacacccgttgggttatttccggtcgtgacatatttctacgccattgctgggaattatatttctagtaatatcgttaagaaataccaacagtggtcggcggtgaactcgccccctcggtccgtgcgtagtgcacaaagcagcttcccgacttgctctcggcggccgcttgtatctgcttgatggcggctggtgcgacgtccttcgacaaaaggagcttgatccacatgaagcggctgtagtcgtcgacgaggagaaggaagtagcggttcccactcggcgtcgctggcgagatcgggctgcagagatcgccatggaggagttgcaggggctcgttagagcgagacagcacgcgttgtggaaacggcgcccgtcgatgcttcccggcgagacacgcctcgcaaacctgatcgacatgcatcaataatggcaatccacgtaccagggtctccctgctcatttttctcagcgcagtaaagttgatgtgcccgaaccgagcgtgccaacgccacgcgttttcgccggggcgcgccgtcaagcaaactggccgcgcgagcttgatgtcaagcacatacaagcgccctgggctccgagggatttgggtgagcaggcgccactgctcgtcgcggacgcgcatgatgccgtcctcaaccaatacttggaagccagttttgtggagttggccgatgctgacaatgttggcagcgagccacggcagaaagtacgtgttggcgagggtgcggtgttctccattcttgcaggtgaacaacaccgtgctgcgcccctcgatagggacgatcgagccatccccgagccgaacgttgccggtgacactagtgtcgaggtcggagaaggccgctcggcaacctgtcatatggtttgacgcgccggagtccatgatccagctgcgcgggtcgcggtctgcttcatcatctaacgcagtgaacaccttcttctcgacgagctcgatgcagacgcactgaggcgccggcgtcgctggtggcggcggtggcggcaacatggagcctgcggtttcgacgcagcctccagtcaggagcatgagcgtgggctcgtcttgggccacatgggcctggtcttcatgcttgggcttgctccggcactccttggcccaatggccgagcttgccacagttacgacatttgtcatccctgtgtgccagtgaggaggtggtgtaatatacccgaaattctaggactcaaaaatttcatgtcaaaataattagaggttaacttctccaattttgagagccaaaaatttccgttttaaacttaggtgatgaccaacttaaaccattgcatgattaaaatttgggagcaaaataaaatcttttcattcccaacattagactagaaatgtcaccaagcatatgagcatacatgtacataatgcatgcctaggctcgagttctttgtgcatttggagttttggtcttgcattccataataggtcccatgagcataatctaaaagaattatttcactaaacatcactaaacaaacctatagttaatcttaggtgataacatgtggacttaatattaaactcaaatatcatcttctcagtctaaaagaagtttaatgtaatccctataataatattagatgcaattatgaagtgggaatacatatacaaacaaaggtcatcctaattctctaaaatattttgtgcaagataaaatcatggaaaaatttatgtagatagtgattagcacaaacttatcctctgtactttttgtcaaatgttaacactcaagttgatacctcaaattaatcagtcaaagcaaacaactaaaagaaatcaaattaaattttaatcggctaaaaccatatttcatccaaaagtacatttacctgcacataagtgaatatgggaaataatttattcgaatactagattatttatcatgaataaatgtaatttttctagaattttcctcctctgtttaagcctcctaaaaattcaatctagctttctaatagcctatctttgtttaatttctgtgagcagtctacccattatttttaagtgcaaccaaagaaaatggaatctagatataaacatctaccaccagtaaaatctacactaattcttctggtccacatattaagatattgagttgcaaacttagggggaagaaataattccgaaaattatccaaaaactaagtctacccaaactcctacccatacctctcttcctagagcctagcttccatcgacttggccccacctggcagcctctccagctcgcccttcctctgtccctcatcctcagccgaccaagaaacacagagggagagatcgagagccgaccgagtcctggacgcgtcgacgcgtggtgacgacgtgtcgacgccttcaagtcactgagtcatgcctccatctcctccagaccgagtcgcccaactccacacatcactctggagctgaagaagccgagggagaggtcctcagcctctccatcatcctcaacctcgctgccggtcgtagtgacgacgaccttcgccaacgccgattgggtcgaggtcatctgtatgtttttcgcgttcccttctctccacacaatgccgaaccatttctcttttgaccacctcccgttttgtgcatcacagccaccgaaacgcgaccacgccgacgacgccctggagcacgcaccggagcgtcgccgcttcaatcatcgttgtcgtctagccatcctcgaccatctcggagcaagccgctgcgccaagaatctcacctcgacctactcttcaaaacgcctcaagaaccccagccgaagacatcaagaacacggagaacgcatcttttcttccccggcgccgatttgaatccgccaccgtcgccatggtcgattccgccttctctggtgagccattgtctgattctttgcacatgaagcatccctgagacctcgctaacaacgtatgacctcatgcatgccagttggattggtagatcaagccgtcgacgtcatcccggagtgaagcgccgtcgccaagccattttcgtgtgctgccgccatcgtccggacctcatcaactccggccaacaccatgttatatacccatgaacctcaaatactcacatgcatgcacccacttaaccaatacatgactgtagatgcacatgcaccatcacccgaaaacaccttccgctcacactcgccatcggcgctactccgatgtcccctaaccaagaaaactagaggaatggaatcgcgagagcttgctcttcattttatcttttgacctcaacctcaaacgagacaccgtttgccgccggatcgagctcagccatcgctagctctgctctgtctagagcagagggatgtctcctttgaattagattaacagcagggatccatttacaattgtagaaacacactgacatatgggcctaggactgcgggttgattcctagaaacctcaagggcctttttgcatattggtccctcacagccatgtggaccccatcctttataatctggagaataattaagaaaatgcccaaacaaatatatgtttaacacaaaaatgcacaaacttgtaaaatccataagaaatcaaatatagcttattttgaagtgattccagtttctgtagatttatgaagttatgaactctattttataaatataaaactttacactcactgtacaaactttgcctctaaaatttatctaagataagtcatgcaaaaagcatatacaaatttgtaaaatgcatagaaaattcatctcaactcattttgaaacaaactcaaattctaaaaattcatcatcatgcactctctgattaggtgaaataaaagtaattacttactttgcatcaagagcctctaaaactattatctttaaaatgactagttttagataagctaaactttagaaaatcatataaaatccaacttagcttcaattttagtaagcttaagttctttagaataataaaaatgtgtattcccaggttatgaaataaaattatatacttactgtgtagtaaaagtctctaaatattcatgtaaggatttaccaacatagagcagcctttaatttgtaagatttgtagaaaattcatttttagtccaaatgaaatgaaccaagtttctatagaaccagaaaatagtgagcttcaacatagtaaaataaaatatgacaccttttgtacaaattatagctttaatctttaaatagataacctaggagttaattgcctagtgatggttaagcaaaatatatgtgtagaagtatttataatgcactctagctatgaataacctaaataaaacttgttagaacagtggagccatagttcctttcccatccactaaaacttagaagaacttagctcataaaataatttctcggttaatataatgtattgttagtctagatcagagcacccctagtttataaagtatgaaccatagtagtaaaaaccttaaacatgtgaactaaaaatattttagttaaccaaattacttcttttattcaacttaaacaggaggtagcatgttctgaacctacaactctagagtcatgcacatataaaacactatacacctataacacgttatagcttgtaaaatgcataaagaattcattataaatccaaaaattgtgaaaccaaatgtgttagtcttagaaaacacatctacacacccctgttaagtctaatctaataaaaatcactttacaaaagtattttgtagcactacctaagactatactactataaaccgacataacttataaaaattcataactcccaaatggaataagataaaatagaaattctttcacctaaattcattttagaccagtaccaacccactgtgcacaaatcatgcattttagagcattttggatttttagttctttcggtgtttaattgcataacatgtatttatctagataattgcataatcggtgaaggagtggattagttgctaacatttctctgatcaaggcaagttttctcctcccatcctttgaacacattgaatccccatgatttgaggaatggaaatgtttgattgcaaagttgcatgtgaacttagactatatcggtatttaaaattgggttaaggtagttatgacctatttgctgcattccctaccttgaataattgattctcttgctgtttgaatccctagaaatgtttagagtacagtctttgtgctcaaatgggtttatatatgctctatgtgcaactacttgcttagccatgcttagaaatatgcaaatgctcattccatctataattaaaatgtgattttgacacatgaacctttgctggaataaaatgaatatgatgggtatttgtgaactaaaatgtgtaaaatgtgattttagacttgggcggcaagtggtgtgcatatgatgttagttgcatgccgatagggggagtgtttgcccaagtcagtaaggaccgaacttgtgtcaccaacttaaagttattcgtacatccacatgtgctagtatgggatggtctaagctgattaatctatttagaactagccttgcattctggtaggccggtgtgtatgagttagtcgataattctgaagaattagtcgatgattcagaggaacttcctatttgccctgacgtggtagtttaggtgactaagtctgtccaatacaacggtattatgccacgtgggtgggttctcgttgtgtccgccaccacggcgttaagtttaaggcgtgggcccgccacttaacggttctagacatatttccaagtatgcctaggatggaggaaaacgtatcgtgctggtgcaaggctagattctatgtagtgtaaaggcttcgttttgacctctagtccgcactcataatgtagagtgtggggtgcttggccggcactgaaccaactagagtgtagcctctgggcttctatcacatcatgtgggtaaaggtatacaaactctgcagagttctttaaactaatcgattagccgtgcttacggtcaagagcgctttggtgaagtgtcgtgagtatagactatgctttaaaatgtgtacatgtgacttggtttaaaattgataaaatgtgttgagttgtgtgagtgtgatgatatattatgacttgttgtcaaggatgacaacaagagtttgattatgatggaattatgatgaacttaatattgaaacttaaaatttgttttgttaattgaagcatcaactcctttacaaaagaattgcgaaacaaaacttgctttatgctgaaattgaattacatgttgccttcctttgaatatatgccttacatgtagtatagtaggattgacttgtgcttgccagtacattaacttgtttaatgtactgactcttgctgttgatataactttttgtttgcaggtttatacttagtctttgagtgatgcgggttccgattgcttcttctaggatgagaacttaatggggtaaacccctagtcggtgtgcttgtgattgggtagtcaagcttccgttgttctctaataagtctatttggccggtcgacctatgtaattattaagttgttgtaagtcttaagtttctttcatcttagttgcgtttgctatgtataatcatgcttaagatgaaagtgtgaatctagtgcacatcctgggaactagattcacatgagtatgagttaggaatatttgagaggttgtagatctttagccatttttgtcaagtctcctgaatgtgtaacacatctggtcgccgccttcgagtggtttgacgggtacatctcaggctgaagttgactggcaggctaagggctcagcaatgtctccaatattcctctctcgaggcgtcggatgttttattatgcttttttgatgacttgaattattcacttcatctctcaaatataatggaaggtccgaagagcctacgataggtggacccatccgagctgccgccggtgcacccctttctgccgcggcgcttgttgcgtccgctggaaccggcaccagagcgtttcgcctcctgctccttcttgtggcactccagccattcttcttcggttaggtagagcttgccgtcggtgttctgggaggatggtgggggctggtaatcctcggccgccttgagtctcccggtgatttcctccaaagataaggtagatatatcgagaagagtttcaattgaaagaacgagttggctaaacatcggtcgggcgacgcgcagatacttctcgacaaccttgtcatcgggctcgggatcaccgagggtggcgagttggttgacgacactggtaagccgcatggcgaagtcctccaccgactagccgtcccggaacacgatcctctcgtactccgtacgcacccgctgtgcgctggccttgcggatgcggtcgtcgccgacgcgcattgtcttgatgcagtcccacgcctccttcaccgacgccttcgtcgccaaggtcgagatcatctcgggtggaaccgtgctgcagatcccatcaagtgccatccgatcctcgtgcagctcgacagcagcgcggccacattcgacagcgtcccacaggcaacgtgctcgcaacttgatcttcatgagcaatgcccagtcattgtaattcgtcttcgtgagaaccggatagttcgtagacgatcctgactccttgaccacgcggtgtataaccagcccgcggtcattcccgccgctgcctgaggcacggccgctggaacctccaggagtgcgtgcgctcggcgacaccgaccaacggcacggggagcttgtgacgccttggcataagtgcttcttctagcgcacgatcacgtgtccaagccctaaaccttgctctgataccaattgtcaggaaacccctaatcaattggcttgtgaacactggatgaactcacttgaaagtggaagaacacaagaacacgtagaacacaatactgtagacgaacagacagcagaaacagagtttttggtgctgcctgaattgcttgcagcttttcggggtttttttctctccttttattgtgcagaactgaaacatgcaaagtgacgccaaaatactcggatcgctacccatgactcgcggcttgatcacgtccatccccgcgtccacacgttgaggctcatgcgctgacaatgcacaaaacagaatcc

SEQ ID NO: 16831 - DNA, 709 bp, Oryza sativa
  unsure (1)..(709): unsure at all n locations
cgaaggtcgcgtcatttaaagtccgacgtgcaagaccgtatctcctttcgattcagttcatggattttccacccgtctccggaggtaatggggcgggcgtctttggcttttccttccacaccttctttgatttcggtgtggaagacggcttcttctgagctgactgctctaacttcttggcggtataggtgattttaccggcgtcctccaataacgattcctgggcattgttgtttccttctccaggaagttctgcataaaccttaccaggctatccgtcttgggtggctccactttgacctcttgaatattctgcgggttcggcccatacttgattctaaccatggagcattgttccgtccttggttgaaactcaaacttctcctccttcccgttgatatggagacggatactccccgttcccacgtcaatgttggctcctacggtgctaaggaacggtcggcccaggatgagcggcttctccttccctgtgtccatgtccagcaccacaaagtcaaccgggatgaagaaatcccgtatcttgactggcacatcctncgctatccctgccgggtaacggactgatgagttagccagttggaggcgcatcggtgttggtgtcaacacccgtgaagttgagttgtcgaagacgtcttttggcatgacgctgacgctggcttcaaagtcgcacaaggccttgtcgaattgt

SEQ ID NO: 16832 - DNA, 18128 bp, Oryza sativa
aaaaccactagacactttttgacaggagattttcttgaattgtgagaaatcgataaacagagttaggctttgtcgcaccttttggaggaaagtttgatcgacgtgttccttacagtgggtgcaaagattctccaagatctcggctgatattgtcctgtgtctggtgttgtacttggcatcaagcattccaatgagacgatcaacgatgtcattatgctccctcacgatgaacttagagatagcttcactctttgatgataagattgacagtgtttccccagctgtagctttgatggtcttgttcatcttcttcttcttcttgataggtataggggctctcagcttcttcttcttcctcttcttgatgggattggttgcagcaggaggaactggtggtagttgtatttcatcttcccctccattagcgaggaggaaggtctgcaattgcttcctgacgaggttttctctggtttccaaggtgatgtcgagagaagaatccaaaacaagttcagtgaagatctccatggttcgcacctgctgctcctctgttcccagatcaagaatactttgcaggttggtgaccgcctgtttatttgaggagatctcgtggcgcagccttgttccaggagcggcatgggttatgaggtggtgcaccaccttgagcgagctgtttgctatgttggcccacggctcgctcctgccgatgtcttggatgagcgtggcagagtagagcggcacggtgatcttgtcgaggaggcccggagcggcgcggatgtccgtgcaattgtgtgggtcgcaggtgagcccctcgagaatcctgagtccctgcaggatcagctcgttgcagcctacttgttcttcttcttcttccctgccatcgttctcgttttgtcgcatgccaacacctggcttcttcctctcacgccgccgctgcttcctctcacgccgcttcttctccatttctgcttttctacgagcccattcccgatctcttctttcagatggtaagagctgatcatcgtcgcgctgattattgttccagagtggctggacggttgtttcgagcaatgatgacacggaccggattgctccagggaagtgcgcaagctggatgccgccggcgagatgcgccacaatcctcgcggcgaggactctcatctctttgttgttgttgccatctgattctgactctgatgatcctgttcctgtttgtgtgctccccagcttatctacgagtatctgtatcttggtcttggagcgaagaataatgctactcgcatcttccccggccgtgatgagcctgtctaggatccttgctccccagaggcattcttcctgcgactcagattccagcagccctgctgcgtagctgagaaaggtccttttctcagcaagaggagcagggtcccgcacgcatttcttccgggtgtactgaaggtattttctaactgacctcatgcgccactcttctgggaacttgcattgcttggagaaattaacggcgaggctgatctcgcaaatgagaagacatatcaagaagcagtagagcacacactggcacagaaccaggacgtagaagaagtccagtcctggcgtcaggttcgctaagctgctcgcttcaccagtaataatggaggaggatgaggatttgtcccaatggccctggtaatcacggtgcctcaggcgccatgacgagaggccgatgcacacgataggaccaaaaaagttgaataggagtagaatattgaacatcggaaggactgggcttgctagtattgcagtaaatgcgtgagcaatcgccccctccccaacacgaatgtatgagggcaacaatggcaacgtcaacaagtcggaggcagtaacgagtaccatatttcttatgttccaaacgctgactgtcaggatgtcctgcgactgcaactcgttgaagatgctgtgggatggacaaacagagtaatgttaatgatatgcacgtcccagagaaagtcatagtatagacgattgcatcacacactgtattcgtaaatcttagtatgcacatgcgcgtgcatcccgttgtaaagctatgaatatttctttttacatgacttttatatatgatattatactgttacattttttaacttatgatcttatactttgagttaactatggggaattattctaaactctcaaataattatgaaaacttttgaaacaattcagcaagatagaataaccaagatcagcgctgagagaaattatgttgcttgagatgcattctacaggtgtcaatcggcacgcgcgagatgtacaagtctgcatagagagcctcctccttatctcttcccacacgagcacacgcggttagagtggagcgggtgacgacacgcccgcgcccccccccccccctcttccagcaaactggccccatggagaagaggggatgtagttgagcgacggcgatgtccgtccagtgagttccctcctcctctaccccccctcctccaccgttccgctgctcggcctcgccaacaccaaaaggcgtcaacgtgctaacgtggccacgccaaccggtctccttcccttcccctttgccccgctttgcctccgccacctacactggattacctcccactgctggcaccggggttttggcggcaccaccactccacctcaccggcaccaaaaacatcaacttgtcagcgtgacccagctggcctcctccccctccccctccccttcgcctcactttgcctccactgccaacactagcctaccccccgttgctgaccccatggcttcggcgatgccaccgccgcctcgccgtgtgccctagtccgtcacccaccaccggtttgctgcctcccatgtcatccctctaagcccgatcacccactcccccttcccatagcgctaccctttccccaccctaccctcaaaaccttaatcctagcttgtcgccatgtggtcgaaaaccgcacacaacttctctccctggcgcttctaataagtattctactccctttgttctcttatatatgacgttggttacaaaatacaagaaaaccccacgaaaatcgctcctaggcctattcgacgactggcgccaattttcagtagctgccaccccacaacactctgtactagccgagccactgccattaagcacttccctgccagatcagcccaatcgacagtggccacagtgccctcttcgtgtcgaatgtattgcgacaatcccagatgagctcccggtcctccacgcctttgccattcttttatcttgaacataatcctgcccatgccccttccaccatgcgtcaccacttcctgtgttggatccggctggctgacggccaaaacctcgggatttggacggttgatgccttgatggtatgcatttcctctctcaagttagttctgatggataagttggagaggaggaagaatggcaacggggctgcacccgccgggttgtagcatcccgtccccgtccccggagtggaaaaaatctcccgtctccatccccatccccgcactcgggtggagattttcccccgtccccgtccccatgggggtgatagccaccccccgggttcctcacccccgacgacggcagcaagaagacacagcagcagaggaggcgacaatggcatctaaacaccggcaacggcgtgcagcaggcgctcgcgcgagctcgtggcttggcgacggcaacaacggcgtgcacgcggcgccccactcgaacccgcggctttggaggcggcgatggcagctcatcgtggacgcgctgcgacgcggcacggaggcaacagcagtgcagcatcactgcagcttggcttggaggcggcggcgatgtggcgtggtcgactgccgcggcttggtggcgcccctggccttggtcaacgagaggacgagtggtccgtgctgttgtttgtgcctagggtttagttggtatatatgcacctacgaatgggcctcaagtgggcttttaatttctttatggttgtgggcttttaacatagacatgtgcacatggacctaactacacaggccccatggggattcggggacggggagctaaggaatgtccccgcccccgctccacccgacggggggcaatttttgtctgataacaaccccatgggggatgatatggtctcatttgaagcccctaatagaggttttccccgtcggggatcggagagagtgacgaatgagcaagagggattggggcaggacaggatacccccaccgtcttgccttcattctcacgcaagataagcagaaggccagacaaccgcaacagacctacagcctcatcttttcgcttttgcttatgcttatcagccaaaatttgaatttcaaccttaaatttaaagttgattttaaagttttttcatcaaaatttatttttcagcatttgcttttagatcgttaagaacgcatatataaaagttttatttacaaactatttttcgtttacaaatataccgtttggctagcacagtcgtgccagcttccttgctgatgctgacgcccacaggtgcgcgcatgggcagctgatgcgtctgcgcttgcacgtgtcgaggcccattgggaaaggtgtttatgtttttttttgtttgtttgaattattttgattgtattttagaagtccacctacatcatgaatctttcaacccaaattttaaaacattctattgaatctttaaaaaaaataagagaataactttcaactcaaaatttcaaaattttaaacttccattccgaacttagaaacttttaagtcgaatttaaaaaatctcatctcaaaatttaaaacactgaactcaactttttaaaaactttcaactcaaaattaaaaaacttccaactcaaacttcaaaacttttttacttagatttaaagaactttcaacgcaaaattcaaaactttcaactcaaaattaaaaatctttctactaaaattcaaaaactttcaagtcaaaatgtaaaagctttcaactacaaatttaacaccgtcaagtatttttaaaaacttttgaactacattatttatgtattgcattttttaaaaaaataatactaaatacgtactatcaatagcgcgtactaatagtcgtagtgggtatatatactttagagtagcggtgggcacggctgcactacttaccaggacaacagagtgagagatggtgagttggtgactgtcgtgtttctagtgtgagcaaaactcaaggccatttttttcctggttgcggttgtatttctcttctcaatgaaattaggtaaaacttctgcttatgttcaaacttaagaacttttacgatatatttactaccaatataataatggcaatttaggattttaaaaaattatgtatttggcagcgtcacccgcctggacttgttgtggctaccggtgcctccccatgaagaacactgactaggaatgagtaaatagtaatactctctccttttataattatattataagtcgtttgaattttttttctaattaaacttctatttgtttgaccaaatttatagagaaatatagtatgttttcaacaaaaaaacaaaaatattatcaaaatatattcaatgttagatttaatgaaactaatttgatattttaaatgttattaatttttctataaacttggtcaaacttaaaaaagtttaaatagaagaaaagttaaactagggagtagtttggattgctcgggggaaaacgtcttgcgttgtttcaatatatgctatgattttaccgattgccaccaccaaatagtgtagaaagaaaattaacccttttaatatgtaatctacttaagtaaaggggcaagaacacatcaatctaaatacttcagttacttatactaacagtactccttataagtttaaaaaaaaaaagtgtgtaaggctgtcagttgtgccctcgtattccatataatctttttttagacaccatataatcttttaagagagaaggaaaagcagtggggtaggtatatttttagagtaattttactacttcatccttttaagttcaaacaaggtacctaaaactttacgctcatacctcgagttacatacctattaaatatggaaattatccgtacttttactagtgctagcaaattctagtggcaagggcgcgctgaaaagatggaaaattaattgacaaacctggttgcctgtacaacagtaattgctgtcaagcacgcgaaatcctttctttgcagcgagctgacgtagccaccaaggaggactaccgtcgaccacgtgaacgcaaggtacgccatgaacgtgaagaccattctgatgtacacctgcacggcgaggttacgattgatactcacttccagctcggcgcggttctcctgtcgtcggtcggactccgactcggactcgccgccggcaatcatcgtaccctccaccagctatgcttcgcttcaatatggggcgaagctgcagcaggccacacataccatatatatagtacttcgtccgtttcacaatgtaagtcatttttagtatttctcatattcatattgatgttaacgaatctagataaatgcatatgtttagattcattaacatcaatatgaatgtagaaaatggtagaatgacttatattgtgaaacggagggaatacttctctcttttttttaatatatgatgtcgttgatttttttagatatctttaaccattcatcttattaaaaatattactacatatgttttataatataagaagttttagagttggacacagtaattaagaaagtagataggctaggttgcagtgacctaaatagcaccctaaggttctgagttcaaatctctataggagcgaatttcagattgagttatttgaggactaaattccctgtttgataagctaagttcccaatttaaaaatgttgtatatatccggttggatgtagaggccgggtaaaaaatacccttatctaaaaaaaaaagaaatatgtgggaaaaatgaatggtggatggttgtgacttgtgattggttgggaaaaggaatgttggtagagaagttgttatattttaggataaattctgaatgctaaaaattattatatattgggacagatggagtatataattattatttattttataatgatttgatttattatcaaatgatctttaggcatgacgtaaatatttttatatttacacaaagtttttaaataaaacaaataattaagcatttgttaaaaagtcaataacatcgaatgtctggaagaggcgacgctagcaattcttcttgttaggtttagcgctagctgttactggccacttggctatatagtccatggaatcatcgtcaataaattagccccaccagtttatcgaagtgcagataataataaactgggactgtcacgaaaggtcacggacgatcctattcttcgtgtggaatcaggggaacgatggcggctgggcgatccagccaaataagccagcggggtcatcacgtagtacgtactaccttccatttcaaaattaattagcttctttttatacacgaattgtcgaatttgcatataaaccagttcagttttgtaatatataaatgaatttattttagcacgaaaaagtactaaacaatattcctattttggagtcttatgtccagagagttttaacaatgaaagttaatttgtcacaggtaaacggggtctgcagggcggatccagatcactaccaccggggtcagatgaccccgatgacgtttatcaatccatcagccaaaagctcgttgatgattgaccccgccagcagctccaatgatttaatgcaccccactcccttgaaactacgttcaattcggttcaaaatatagcagctaagtacaacatgaaatatttatagtatgataaatttggaaaaaaaaatgtccgtacggatggagatagtactatataacaatgtgtgtgttcaaattttgagaaacgtatattcatacctcatgggatactgggatatacacttgttgttgcatgtcacttgcatgtcacttaaaaagttataaaaaaagtaagatagatcaatatgtgttactccacaaacttgtactctctcggttccataaaaaacgaatctagaactagatatgacatactctaatactacgaatttatatgttcagatttatagtattacgatgtgtcacatcggattctaggttgatttttatgggatagagaaagtaggttcaattcaacctgtacaaatagaaacaaaaacaataaatttaactatgaataaaacgcataagtcatactcaaatttgttagggacaactttgtttttgccctcactttcatctcaatattgattttgcccatatttttttaaggttttctttttgcccccactttttttgaaccgaacaatccgtttacccctttttagatggagcagttaacggtgttaactttttatcaaaaggatatttatacacccttccatctttattcattaattgtgattttacacctagcccaaactcgaaggcggctagcttgctggcactgccctacttcttccctggggcaaaattgggggcaaagtgatgtctaaattgggggcaaaatcacaattaataaataaagatggaagagggtatacatgtccttttgacaaaaagttaacactgttaactgcttcatccaaaacaagggcaatgtgggggcaaaaatgaaaaccctaaaaagtaggggtaaaatcaatattggagatgaaagtgagggcagaaatgaaattggcccaatttattacaattacttctaattgcataagttaaatttaaacttgcatatttatcaaatgatatatcacatattgatctatcttatcaagttttttttttgataacttttttaagtaacatgcataaaacgacggatatctcttgaagagacaaaaatccatgtccccaactctgttgtagaataaagtaagttgtacatctattttatcatctcaaccgattatgactatctctatgtcaacttttctatctcaaccaatccaaacaatctcctatttatttctatttattttttaatccagcactactacacatattaaattttcttactaaatttatagtagcaattatctcaactgtttaatttaagttgaagaaagttataaaaaattatagatacacgtttcctttttaatcaactcttaaaatctccgagagctctccaccgccatcgcctgctcccatagacgacggtgcctaccctccacgcgaggtcgggcattggtcgagcagtgtcgtcattgcatcatcctaccggcccgaggtcacctccgcatccaccgctcatatcaaggctgccgggtcgctcagttttgcggcttaagctcggcatatgcgctactagagtgcgcatctcggtccaccaatcatggttcacccaagtcacattggacctgctccagcataggtctaaccgaagccacaactttaggtcttgagcctacacaacccataagattagtcggaccgtccacaccttttaagtcatgctccccatcattaattaccgatgtggaactaaactcaataatgtcccccatcacacatcgggcccaacaatctctcccattacatcaacccatgtgaccccgaagacttgttacctggcctcaggcccaacatctaccggtcatatcgatccatgtgaccccgaagactttttactcggcctccccaccatgtaacccatgaaaattgttccgggtttcaaaccttagactctgataccacttgttagagtgtgcagctcggcccaccaaccgtgggccatccaggtcacattgggtctgctgtaccacttgcccaacaagagccacaactttaggttatgggcctacacaacccaaaagactagtctgatgggtgaagaccgcttccaccttttaagtcatcctcccccatcattaattaccgattgtcagctttgcccaaggatacgaacggagcagcaaactcacgcaagcagcgaactcaagcgatgacacacgcaagagtagcaaattgtagtggacacacacgatagatcgacaatggcgacgcacacgcactaagcttttctctctatggctcaatggagatgaacacagggaagctttgcggcaacaaatctctttatctgtgactcacacacacaaacacagaatttacatggagcttataaggcccaggcgacgacgtgagttacacgccgagcaacgtcctgatggccgagtctcacgcacatatacgctcacacgatctatacatgcatagccaccgactactgcatgccatgctccacgatccgcatgagacagctaacaaccctgaggaatcgcaccaactaatccatgcaagacacacacacaaactaattatgcactaacaaattagttagtctaccatgcaaacacaaacacgtacttcacgttgctgcctatacacaacacatgcaattaaggatatatcaagcctactagtcaagattaatactaacacatacgagttgtgagactaaacaggtccactaaaaattagtgcatccaaagttaaggtgtttcgatttaagctaatatgttctgatatattttgtgtctgtagattccttttcaaatttcactctgtctgcttgaatctgctagacctattctaacgcgacgcgcgacgatgactgccacgacgacgacggtgccgatgccttggtctaaccgccggctgcgacgacgcagcctggatccgccgccggctcgcaacgggcacgccgatccactaccggctggtctcaggtagggaaagggaggcgacggctgcgcggcggcgaaaaggtgaggcggcggctcggctcctccctctttcggcgacgggcatatatatatatagttgcagcgacgtaagtagcaccccaaagtcttgagttcaaatctttataggagcaaattttatattggattatataagggtgtatgttcttaatttaaaagtaggcctggtaaaaatatacccttctctaaataaaaaaaaaaggcccaaacccttagcaaccaggccttaattagcggagtcgcagactcgcttgttaaaaaatatacccttctcggagtcgcagactcgcttgtaatttggcaacgtttgcgatcttaattagcggagggaaagcttaggagacgactacggatcggacatctgatgcgattgttttcgtcggacgtctgttctactgttggatccacatccatccctttatgtccatctgattaaaaaaaactattacatacgtatgcagagaagagcaacaacaagaaaagtttaaccgtgcatgctcagtaccaaatgagagaggtacatggatagtgacaagcttcaaactattttttctcgaaaactatttatccaatttacaatttgattacactgttgtattcgttataattaaatctatataacaagatatcacatcattatattctgagaaaaaaatacaaatgtttcaaccgttgaacttggatgtttcacgtgtgagaaataaatgtttcaattggaatttgactatgttgcacattttaagttctatattgtagtagatctttataaatattacacgtgatattatttagatgtttcactagttcaatgtaaatgttgcaccggtgttttttttagtgtttcaataaataggtgtagtgttgcaacacttataactcgatgtttcatatatagaataaaaatgtttcaattaggatttaacagtgttttattctttttatttattttttaccaaaatataatcaactaagatcttattgtaaagatttaattgcaacggatataattctgtaatcggattgtagatttaataaatatttttaggagaaaactagtttaaagctactaatgcatgcatagcttttttttacatacatacacacatatattagagtgaagtactaaggagaaaagtaagagagagagaaatgtgcaaccctgcagtaggctgagagaaaaaaaaataagacaacagctagacatatagtatgtaggtcgtgagcagatcatgtctgattttgtttggtgcgtcggacgtccgacggcaagcattttctgaaagcttaggccatgtacaggggtccaagctcaggccttgggtttcactgatcgatcggcaaattagctaacgaatcatagagaacaagttttttagtctttccaaaccctttcaacaagaataactaaaaccccctgagcgagggtttagacaagttgatccgctatcgccgtatttgttcctattgtgtgctgaaggtttctctgccttacacaatttgccacaaagcaccaagttcgtggatattcaatgcaggctcgagcttggctcgtagtcatgaattggaagttcgaatcgagctgaattcgagcagctatcaaacctcgagcttttttgtcaggcctacatggcattatgaggaaaaaaaaggcttattcttggtgagatcggcctcatagagtgttatgtgatgagagccagcgcacaagttatagagaggcagcctcaacaagaatttctgcattggcttctgaaatctgaagaagtattggagagaatttggaagatgaagtgtctaaacagaattgaacattttgtacgtaggttggctcacaacttattgaatagtttcacattagttgtggaagggcaaataatttaagatataagtaggggagccccttacttcaatggctagcttttggggtgggaaaggccctttacgatcctacaattggtatcaaagtctggctaggttaacatctctggtccgatgaacacaatgtgtgaaggcctgatggactgtgggtgcctgcggggcccgtatacctgatggaccatgggccagtggggcccggatacggtgaaggggctgagggataccaatgtgtgaagggggagattgttgaatagtcctacattggttgaggaagggcaaatgacttagttgtggaagggcaaaggacctaagatataagtgggggagcccctcacctaggaatcctaattggcgccgcgccggcgccggcccacatagcccaataggtggatttttccacgtatgtgcaaactttcaacccagatttgaatactttcaactccgacttgaaaactttcaactccgatttgaaaacattcaacttcgacttgaaaactttcaactcatatttgaaaactttcaactcagatttcaaaattttcaactcgagattcaaaaactttcaactcagattcgaaaactttcaactcgagatttgaagactttcaaatcggattcgaaaactttcaactcgagatttgaaaactttcaagaacagatttgaaattttttaagttaagatttgaaaaaacatgaaaactttcgactcagatttaaaaactttcaactcgagatttgaaaactttcgacttcgacttgaaaactttcaactcatatttgaaaactttcaactcagatttaaaaattttcaactcgagattcaaaaactttcaactcggattcgaaaactttcaactcgagatttgaaaactttcaagtacagatttgaaatttttttaagttaagatttgaaaaaatatgaaaactttcgactcagatttaaaaactttcaactcggattcgaaaactttcgactcgagatttgaaaactttcaactcaatttcgaaaactttcaactcgagatttgaatactttcaaatcaaatttaaaaattttcaagttaagatttaaaaactttcaactcaaaatattttttaaaaaataagtgtgctaaagattaaaaaaagtaatcagaaaaaaagaaaaaatcgcaaaaaaaaacgaaagaaaaaaaaatcatgaataaaagaaaaaatcgcgatgggctttgtgggccagggggcagctcgcgagcgcgccagttagcaacacccccctcacctcaatagctagcttttagggtgggaaaggccctttacgatcctacacaactcgctagctttgtgttgcaatctgaagagaaggggaattaaacgttgatactcagtgttttatacgcagaataatggacgaggatggtggccatctgttcttttagtgcaagtacataaaagcacgtttggctggacatgttctaggaggaggtcagacaggaattggcctcaaagagaacagatatagaagtgatggagagcgtacttaagctagatttatcgctacaattgaaggtggtgtttttattctactactggtggtgtgaaagaaagttttccttatttgcttccaattaaaaagtaggtctatgatcaataccgatcaactagagtgacacatcagtagagtcaagcttaacttcattcaagctcaattacaatagattgaagctcaattacaaactagcaaacattgccaggtcccccataagagaacacgccatctctaacatcagtgacagggtaacaatctgatacgtgtgctagatcatggtcaattggatgggcgttgccagctgcatcaaagaatttgagattactaaatgaggcagcatttttgggtggagcaatcccactgcccatcggagggctcggtttatgttctttccagaaggcaaagcccccaaacacaatgttcaccggcttatttgacaaggatgtaaagagagatctcggatagtatcctataatcttggccttcccatcaaaaccaaagtagatttcccagtcaccagagttttgatcctagaatcatgtgtaattgtattgttatgtcagatatatacacgcagaattgtaatcattgatgagtgaatgatttctccattgttggacaaaataatgaatggtaccttggatactctgacagtaatgtattgtttccttctagaggtgctggaaacagggttaatcacctgtccaggaacgaatgggtgcgagccacctgtcctttggaatccaggacagcgcatatctaaacaacctttcttggattcttcaacctagcattggagtagtcatgacatgataaatgtaaaatctatatgatagttcagtctccatctgaccattgcaaattctttttaggatatggcactccctgtctctctcatgggaattaacttaaagaaaaaaaaataatatgtcgaataaagaactgtattgttaatgaagaaacttacaaaccaacttgtagtgaagtgcgtctgtgaatcgttgtatgattcaggatcgacctatatgaggtacaacaaaattaaacataaaaactagatgaaatgaagtaattgattaatttcattattagctctacttcacaaggattttgactgtatgtttaaacttgtttatgtcagtattagagaagtaaagaagaaaaggtaattcaaaaacatggagataaagttcaacttacattccatccagcatgaattacatttgcagctgttgtttcatctgaattataaatctatatgaaacctctggtttgttgcccgtgctctagattaaatccataaacatccatagtagcctctaatacataatactcagtagcaccgtcgtctggaggaatccatccatgtactgcaagctgccaacgtatttggtcatgaaaatcgtaatcatgtcagcagatgcatctttcagaattagaagacaaaaaaaaaacattgggttgggcactcacatattttgcgctagattgatttgattcatgactcgatttagataagtttgcatgaagtatgggggccatcaatgctctccaattcttttgaaccttgttaattgtgttcaggaaaagcagaatgaacaatatcaactatggctgccactactagtacattttacattaaactcaatcaaatttgaatcataattaaagacagtataaagttgtagatgtacttcctcaacagtagggaagcatcctcctattgttgaaccagtaagaaacaacacaaagaacagtgcatatccagaaaaaactttctccatggtggaattggggagtggaaaagatattgtgttctgtgtgccttttgatacacgtgttcctacatatcctctttatatagacgaatcagaaggggcctgcaaactcattaaatcagaaatcaaaactaaatatttaattcgaagagaaatcaaaaccatatctttcattcaatgaatattaatgaatatatatttatattgcaatgaatgagaagtgcatcaatagaagatatcttcaaccaacttaataaataaaatagatacaaagtgtatcaaacctaattattattttgtctgtacagggttaaaggagagatactgttcaagtccatttatgtacctagatcagttcttttgtaattgacctgaaatatcattgtggtcagattagcattgctcaggttaaaaggatggtgaaaattaatacttttccttatgaaaagtgagtcgcctttggtactggactctccaaggcgccatgtataacctgctaatgagggggaaagtggccgtagaatcgttcttggcagccagccaaacaggagatgctcactgagagctccgccgttgaggagtccaaagctccatattcatctcctgtggctgctcatcgtcttgtacgggtcgtcagcagttagtgggaggagatgggcaatggtggcagataaaaattgggtctgaaaacgagttaggcccagtgtattgagccttaaaataggcctcaagtaaattataagaacacaattcatcacaaataatgctttgccacatcagagcatacctcattattggatcgatctggcacagcaataaggtactggttcagtagaaaccggcacctattataaattataagtaccggttaagagcacaaatcaaagctatagaagtatatgtagttgcactctgcacttcgagcatcgcacgtgacgaggccgccgtcgccactcctgaccgctttgcaaaggtggttgaagcatggcagcttagagaaggaggacgacttgttggggtagtaggatcaggggcggagctagagtattgagggggtgcccaggaatctggtcaagaaaaatagttatacctatctattttcactatatgtatcccctcgatacaaatttagacactcgtagcttaaacttgatataaagcagagtaaattaaacaagtggcacggcgattccaagggctaggctccatcaagctctagcataccctccgatttttgcaaaatattttttttaagaattatacagtacaacgcagacactcacaacgcacgcgcactcacccctatgaacacacgcacgcaaaccctacccctatgagcatcttcgaagactgggccagcaaattctggatagattgacgaagtcactacaggcgcctcgctgtcgacgggtacgtcgcctaccactgaaagcacaacgccgttaaatcctggaaaattcattcccatggggagtcgaacccaggacctcgggtgctactaagtctcttgtaaccactattttcaactagatagctaaaccatggcgtgatagcagcgtttttcctgggaagaagatgaacaggcggcggcgcagcgcctaggagtcgagagaaaagaccaccgaaggaatgaagcggtacgcacgtgttaacagtgaaatttggtaagcccagagtagtcatcggcttagagtcaacatcggctttgaagtcctgagattagccgatgagagttgtcaagtcgtcagttgtcggattcgtgctatattcggttaaggaaattgatctactaaaggaagcttatccgaagggaccgagttcaaatagaatgcggcatgacaagttatctattaattaggaatagcttgttagtttccttttatctttaggaaagtgtgtttagtgtcctataaggactttatcttttccttttatctttaggaaggtttctttcttgtccgacaaggacttgtatcaacccatgggtataaatatgtacacccggggtctatgtaatctatcgctacgatcaatacaattcggtgcatcggccctttttaccctttataatttattt

SEQ ID NO: 16833 - DNA, 18035 bp, Oryza sativa
  unsure (1)..(18035): unsure at all n locations
ctctgctaatctagtcttagcatatcaatttagctctatcggctgcttcttgttttagggtttctactagtatcggctaaatcgcgttgctagattagattagcttagatatctaccaccctgaaaactcagtcaacggcttaattgtctagatattattttttttcatacttagtgctgtatcagttaagtttgatctactaagtcgtgcttataaccataatctctagcctacatcttgattgccaataagggtttcattagggtttcagccggtgagttatctggacgttgcatcagctcataaggattgcatatacatataagttggatttatccgatgacaacaaaggtttcactgtttaatctaatcttgtggatttcatgacatcggacctccagccgatgtgtgctttaaccttcggatcgatgcttatttatcacatcattgctagtcgattggtttatactagattatattgttattttattacatcatcatcaaccgattgcctttatattattatctacattggacatatagccgattgcttaaaccctatcgatatcggctggtatcggcatcggctattatcgctatcatctggaactactccatcggcttgtcagccgattggctgttttgatctactatttgcatatcttgtcaactgcaggatcaaactaactggcacgcccgcatcttaccaagatttcgacctgcacaggagctaagcagatctcctaggccagtgtgttcgaatttttcgtcaacacaaattggcacgcctggtgggacatgagttttgcacctaacaagtctgaagaagaagtcaattccaagaaggggcaatctactaagccgatattttaagattaagttgatgaagcagctcattgcaccttgattgaacagtctgaagttttggtggttacattgtaaattttgatcaagagaacagttgatgagttaattgttcagagacaccagctcgggggcagattgaagagcaataacaatatcggctcggggggggggcaagcacatcagtatcggctcatgaaagccgattgcaagaagcaacagaggatcaattttggagtaatcaacgcgagacagaagataattttgaagcatgagtcctcatactccaaaattggggggcatgtgtgaacagtgaaatttggtaagcccagagtagtcatcggcttagagtcagcatcggctttgaagtcctgagattagccgatgagagttgtcaagtcgtcagttgtcggattcgtgctatattcggttaaggaaattgatctactaaaggaagcttatccagaagggaccgagttcaaatagaatgcggcatgacaagttatctattaattaggaatagcttgttagtttccttttatctttaggaaagtgtgtttagtgtcctataaggactttatcttttccttttatctttaggaaggtttctttcttgtccgacaaggacttgtatcaacccatgggtataaatatgtacacccggggtctatgtaatctatcgctacgatcaatacaattcggcgcatcgccaccttttaccttttctactttattttatcgtccggtgggacttggcacctgatgcggagctgcatcggtgttcgatctccggctaagggataagtccaatgttccgctggcccaagcaattctatcgtttacgtcggcgtcgttcaaggctgcatcagtacattcgacctcttggattgctttggtttggatgatatatttgcctacctatttatcatatgtctctgttaatctagtcttagcacatcaatttagctttatcggctccttctcgttttagggtttctgcctgtatcggctaaatcgcgttactagattagattagcttagacatctaccaccctgaaaactcagtcaacgacttgattgtctagatattatgtttcttttcatacttagtgctgcatcagttaagtttgatctactaagtcgtgcttataaccctaatctctagcatgcttcttgattgccaataagggttttatcggggtttcagccggtgagttatctggacgttgcatcggctcataaggattgcatatacatataagttggatttagccgatgacaacaaaggtttcactatttaatctaatcttgtggatttcatgacatcggacctctagtcgatgtgtgctttaaccttcgaatcggtgcttatttatcacatcattgctagccgattggtttatactggattatattgttattttattacatcatcatcagccgatttcctttatattattatctacattggacatatagccgattgcttaaaccctatcgatatcagctggtatcggcatctgctattatcgctatcggctggaactactccatcgacttgtcagtcgatcggctgttttgatctactatttgcatatttgtcagttgcaggagcaaactgactgggatgcgagccgcatctcaccaagatttggacctgcacaggagctaagcagatctcccaggccagtgtgttcgattttacgtcaacagcacgaaaaagaattattaggccgaaatgcccaattttgtgggctcgtggcctatgtcctcctcccagacttcactgactcggtcaccccaagtccacagccaccagaggcgaagcccccaaatccccctccccccaccctagcacggcgacggcgtgactggcgggcggcggaggcggcattgcgggcttgcggcagtgttgcagtcgaaactcctaatgggcgatcaatcgctgggctacaggagtagcgatcgatttctctttcctttctaatccaaacgcgtgcgtccgccacttaccttttttggctttctcagcctagtccttttttctttcctattgggcttggcccacgagagcccatccgcagccacattactttcctattttagtaaatttatgcatctaaagtctgtacacctcaagtttacacatttaaagtttatacacctaaagtttagagacccaaagtttataagtcaaaattttatatatccgattcaaatttgaatttgaattcaaatatttttatatatagtatttctataaatctaaagtttatacacctaaagtttatagacccaaagtttataagtcaaaagtttatatattcgattcaaatttgaatttgaattcatatattttttatatatagtatttctatacatctaaagtttatacacctaaagtttataaacccaaactttaaaagtcaaaagtttatataccctattcaaatttaaacttttgacttataaacttgggtgaatagctaatttagtccctcaagtttcaccgaaggctcaatttagtccttcacgtttcattttgtccacatagctcctttaaatatttgctttggcttgaaatcatccttgggcccacttaatatgccttatggctatttctagtcaatatttctattagaaaatatcccttttgcccttaatttgtatacaactatgaaaccaagatgaataaacaacattacaaatatactttccattatttcaacatgtgcacatgaaacttaagcaattgctatcgtatacacttgctagtacataatttattttttgttttatataatttactatgcattatctatataaaaaattcaagcatgcaatttttctcttatatatgtgaatgataagggggtataagtgtcatttatcaagagaattgttggttattgataagtttgaactaaaataaaaacttgaaggactaatatgcatagattgaaatattagagagtagagtaaactgagcctcaaataaaacttggaggaccaccttagctattcaccctataaactttgggtctataacctaatatttgaattcaaattcaaatttgaatcgggtatgtaaacttttggctatataaactattagctattcacccaagtttataagtcaaaagtttaaatttgaatagggtatataaacttttgacttttaaactttgggtttataaactttaggtgtataaactttagatgtatagaaatactatatataaaaaatatttgaattcaaattcaaatttgaatctaatatataaacttttgacttataaactttggtctataaattttagatttataaactttagatgtatagaaatactatatataaaaaatatttgaattcaaatttaaatttgaatcaaatataattcaaattcaaatttgaatcgggtatgtaaacttttgacttataaactttgggtctataaactttaggtgcattaactttagatgtatagacatactatatataaaaaaatatttgaattcaaattcaaatttgaatcggatatataaacttttgatttataaactttgggtctctaaactttagatgtgtaaaattaaagtatacaaactttaggtatataaatttactaaaatatgaaagtaatacggtgctttaaaaaaaaaagaaagagaggagggaggaaaacgcgtgaaggcgcaagtgggtccttccctgatcgctcgccgcatgcgccagcgatcaatcgcgcaatagtggccccccacggcgtgggcaggccgtaggacgcaggcagcgatgcgaccgtgcgctgtagacggtagacccatagtgccgagtgggcgagcagagtagacgagcagcagcaaagtcagcaactagcagagcaagctccaaatgcaaaggcagccaagccgtgagtcctcactccatgttttattcttttttatttcagcagcaatagctagaatgctagttgatgagatttacaagaattgagcttcattgtctcatagatttgatttattcatagattagtagctatggagaagaaaacaacattgttaaattattttaaaatgattcaagtggcacccttccaactgatgagaatataaatcagccagaaaggtttggagatcatttcaatggaattcgttcgataaatttgattggttgaatatagtgtggaaaatgatctcttaatattcttagatggttgatgcaaatatgcaatcactcacttcctagtggcaatgtacttttttttatggtttctttttcaatcatatatgtgtgaataactaccttaatgtggtttttttaatcatatatgtgtgaataactaccttaatgctttgaagttgagcctatcctttattcctatcctggattcgccattggggttactgacgtgtgggcctaatctttatgggtctcacataacagtggtaaagtccctctgactttacgtgagaggagactcatccctcgtagacggtgaccagcaactcagcaagaaccggagaacacgaggctgcgctcggaggcccaataaggtggcgaccaatatatctggtagtagatcggtatgggcggcgaaacatataggtgtaggaataagttcatcataggtcccttaacttgtcaacgaatccgattttcatccctcaaccgaaaaaccaaatataacgaatccctcaactatcaaaaccggtgcagattgggtccctcggcggttttgagggtggttttggctgacgtggcgtctacatggctgatttgactcggtcttcatctgacgtggcattgacgtgtcgcctacgtggacccacgtgtctgtttcacacacaaattaattaaaaatggtggagtccacatgggccccacatgtcatcctcacccctcccctcctctccttcctcctctcttccccatatcccctctcttcatcccactctcctctcctctctctccaggtgacggagaggcagcggcacacacggcggctcccggtcgtcgctggccgacttgcgcagcggcgccggaagcaggaggaggtggcggccgcgacgccaactgcgacacgctcgtgccgtccttcgtgcgcactgacggctgcggccgtggcgaccactccccgccggtccacacgttcggcttcggcaaggaccacgacgcggtggcgatgcacaccatcgccgaggtcaccggcgggacgttctccttcattgagaacgaggcggccatccaggacgggttcgcgcagtgcatcggtggcctcctctccgtcgccgtgcaggagctccacttcgacgccgagacatggagaggaccggacagaccacgagcgtggccggcgacgaggaggcggagtccggcgtcgccgagcgctccgtggaggtggaccgggagctggtccgggtggaagccatcgacgacatcgcgctggagtagggattagttatcgttttttctgtttcggtagtagaagagatcgagcagggatcggattgtgggatggcacggttagtcgttgatccggcaagatcgcacatgtaacaacctcctgtgtggagaagaataaaaggaagaagagaactcagaaaagctgcgcagttttgcagcaccaaaacgttgttcttctctggttttctacattgtcgtttttcgtcagacactgttcatcattctgaaaccgtcagacaagctaggatagccactgaaatcgcgtgtgtttgctgatagctccgtcgtggtctccttcatgcagcggccggtgggaagctaccaccatgtcacctgccacgacggcttcaaggtgctccacctgccgtagaaggcggcaacgagcgacgacacccacaacgacctctagctccgacgccgtgggcaggagttcgacgatgatctcgggttcacgctgtgcaatgattactactcgccgccgccgaagttggtggacttcgtcgccgaccatccgttcatctccttctagctactccacgccacgaccccttcccgtgcggccgctcctcggcgctgctgcgaccggccgcctcgccgcgcgacgccctgcgaagacgatggattgcgacctctcctcgacgatgaagccctgcaagggcgaggagctcgcccgccaccgctcctcctctgctccgccagcccgcttcgcccgctcgtccacgcctcgccgccgaggtgctgtcctgctcgtcggcctccacgcgcgctcgtaggcctccctccgtcgcctgtagagaaaggagaggagagagtgatgaagagaggggagatggggagagatgaggaagaagaggaggggtgaggataaaatgtggggcccacgtgggccccaccattttttattaaatttgtgtgtgaaactgacacgtgggtcccatgggttttattattatttttggatcgaattgccatgtaggcgccacgtcaatgccacgtcagatgaagaccgagtcaaattggccacgtaggcaccacgtgagccaaaaccaccctcaaaaccgccgagggatctaatctgcactagttttgatagttaagggagatattgtatctggtttttctgttgagggacgaaaatcggattcgttgacaaattaagggaactcagatgaacttattcctataggcgtatagccaatatttggtgggccacaagggttagcgctgaatgtggcccatgtaaattaagccagaatggaacaattaggaataagttcaccggaggtccctcaacttaatagcgagatttttttaagatcccttaaccataaaaccagaaatgtgaacccctaaactctcacaaaccattcactggaggtccctcggcagtatttttacccggttttgctgacgtggcatcctagtcagtaaaaaaaaagtacgtgggatccacatgtcagctgcacatcttgttttcttgtcttttcttacccttctcttctctccggcggatgcgggaggctggcagcgagcgagcgcggcagcggtctgcgagtggcaggcggaccggtggcgggcagagcggtggagggcgagcacagcagctgccggccgcctttcccctcccccatctggccatatcccgtcgaccacctctccctctcccatcctctccacgtacgcgtcgcgccggcgggagagggggtggagcgccgcatcgtcggccgcgtgtcgtgaggaagaaggcggcggccggcggcggaggtggaggtggaggtggagggaagggcgtggtggcgacgacgacggcgccgacctgctcgtctgcttcccagcgaggcagcacctggcgctgatgcccaagccgatctgcagcccgtcgaggaccaccgtggacaaggcggtggccgcgcggcggtggcggcaacagcagctcccggcggcgcgctccggagcctccttgaacagggagccagatgtaccagtcgacgtacacgtgaggcctccttgaagggcgcgccgtacgcgccattaacgacgcactggacgaacacgtgaggcctcatgtcgcggttgttgttgagcaccacatctctggggctcgggctgtccctgtccatgaccacgctctcgtcctgcaggttgttcaagccgtggaggcagttcaccacgagcacctcttcttcttctcggtcaaggtggaggtcctcgcggcggaccgtctcctactttgcggcaatggcgcggaacttgaatggcacaccgaactggcgcgcgcgcgcagatgctcagccggcggcctgtctcctcgatctggtcggctggccggaagcccggctgcgggacgtcgatgccggtcatcctcacctccggtggtccgccttccctggttcccagcaaaaagaacaaagctggccactggaatccgtagctgaggccgtagtcgacgatgtgcagcttgcgcttcccggcgacggcgttgtagatggtcttgttggagaagatcagaagatgacgctcaccttcttgacgcagcaggccgccgtgaacagcttgtacgccttgaggaagtccaccgtcgatgtgcgcttcgcaacgagcgactggtacatctggctccccgttccggcgagacgcgcctcgagcgtgttctccaagtggctcatggtgctggaagggagcgaagagacacgacacgccggcctcatctccgccctctccggccagcaccagctgctgccgcgccaccgccgccgcccctccgcctgttcctcctgagcctggagccgccactcacccgccgccgccgccgccgttctgccgccgcgctcaccgcagtcgcactcacgaaccgccgctcgcccgccgcgccccgctcagccttccggacccctatgcgccaaagaaaaaagcaattaagaatatcagtgctgactaggattattgacctaacattttttttgtcacttacacgtgggccccacatatttattttttatttttttctaactaggatgccacgtcagcaaaaccgggcaaaaatactgccgagggacctccagtgaacggtttgtgagagtttaggggtacacatttcttttttttttttgaacgactcgcatgagacagtgcgaagttctattgatagagcaggaaaaaaatacaagattacaaccctgaagagtcgtaaccaggtaaaggaaaaaatataccaccacccacacgccgacatcgccaacacacacgaccaggagaaggttagcaccggatcggccgccgctaagcgtgaccgaccgccactagaccaacaaagggcaccgacgagattgcccctgcgaagccacgactgatgcaccgatgctccaccaccacacaagctttgccgacatgtgggacccctgcaccggcgtccctcgccggccagccttcgtgcgccgaagaccgcgccacacctaccggcagctcctcctcacacctaggtcgcctcctccaccgccggccgcgcctttctgcgccaagccggtctcctctaccggacgcgcctctcacgctaatccggcctccctccattggccgcgcctctcgcgccgagccagcctccgctgccattggctgcgcttctctgcgccaagccggtctccgacccctccaccaaacggtgccgcgctggtcggatgcggcagtctcccacgccctcggctagtcaaccgaggccgccatgcctccggtgaccgcgaacacagtcaccaccaccacagccgttgctgccgaacacccagccaccttgncgtcatcattcccaccttgcacccgactccttccccgccgccgacgttgccaccgtcttcagagtcacagtcgccgtcggcgttgtcaccgacgccaaccaccggcttcacaaaaccgtcactgtgccgtcgccctccaccatcaagcagcttggatgcccacgccatggcttccaccgccattgccagttgacacggcagccaccatgttgccgtcgacccactaccgccgccgcggccatcaccacacagccgccgtcgtcgccaactgccgccggcatccagatccggccgagaccgtcgccaactgccgccggccgtcatcgtcgtcgtcgccaactgccgccgccgtcgtcgccacactgtcgccgccgttgccaactgcctccaccctccagatctggctgagaggggcggatctggggggcaccgccgccgtcgccgccaggtttcgcgctgtcgccgccacgggagcaccaccgccgccttcgcgccatcggccaactctgtccccgacgccatcgccatccccgccgccttcagccaccgccgcccagcgtcgcgcgcccttagcatcgccgtcgccctccccgccgccttcagccaccgcagcccagcgtcgcgcgcccttagcatcgacgtcgccatccccgccgtcttcagccaccgccaccctcgccgccgccagccgccgtcccaccagatccagccggagcgggccggatctagcggtcaccgccgctctgcctagggcggccccctgcccgcccggaagagaggatgcgagaagccccgccgccgccgtccttgcggccggccggctttgccggcggcctctcgggcggcggccgctcgggtggcggcaaggtggagggggaggaggggagggagaggggcggccgggtcgccgcctcccgtgccgcccccagggaggacgacgcgagagcttctcaacagaagaactgaagatgggggtacatatttctgattttatggttaagagatcttagaaaaatctcgctgtcaaattaagggacctccggtgaacttattccaatggaattaccgtgaatttgttgcccatagcatagatttggtggtcgagcaacttatcgatgctgcgcgtgtgtctgctgcgtattcaacatggtatacgatcgatacatttccttcttattttttctcaaaaaatactaagatacattattgttctttcaaccttatattattggccttcatatgccgctagcctctcttttcaatggagacatgctagcatggtggacagcttgcaggagagagatggtgaaagaacagagaagaaattttgacggcctcttcatctacacagtttggggcatttggcttcaaagaaatgctagaatcttcaagggtgcttatggcacagtggtgcaagtcgttgagtcaataatcgacatgtgcaaggcctatgatggagctcacaatttagatgagtagttctcgcatcctcctgctagttgctctgcactatataaaaattcctgtcaactcctctgtcaacacctcggaaggggtccccatgggatcctttgtaaccgtacagactcggtttccctctcttctccttttatgaaataggcagagctcctgcttttacctaaaaaaaaaaaaaacttcaaccacaactgcagaagcataatacaagaaagatgcgtatgccaaatatttagtgatctcatttgatgatttaggctctattgtgctcctaggttagttattactcagaatttttactttcaacccaaccgcccccagtcccaattgcactactctcttatatatacaaaagtacatgaattaattaccagcagtactaagtaatgaactacattggcgcttacaacaaataaatcaacacaggactagctttcctgttttttttttcccctcaaacaaagaaatgttgtgtaataatcgcctcggcattcaaatctagtctttggtcagccacagccgctgctgatcctgatcctccaacaccaccatcagctttgtcatcgcgacctgcctccacggcagggtgttctatcacatcgggtttgatgagttcatctgcctggaccagctgggcggctgctggggctattgtgccatcgcaggaagcacggtcgtccaggacaagagcgctgtgagctgcacatagaccagaccttccccgagcaattctatcacacttgtcctcgccaccaccaacgcttgattcccctcctcgccatgagcacagagtatcatctgcacctcctgatccaccgtgcgtcttgcagaaatcggtgcttcgccttgtgctcttggtgcagcccagaaacttacatctcttgccggctccgtggcgtacacagtgtgcactcggcccccatgccatcttggtgcagcctggaaatgagcaggccattttcatgcgatgcttctcgcagagcatggtgactccgtctgcggttcctgtgcatcctggagacttgcaatttttacctgaactcacgtgagtgatggtggctccagagcgagattctgcactcctggacgacttcttatgggtctcagtctcaccctttttgccgcctccatgcttgctgcagaagtcagttttccggcgtgcaaaccggaaacaaccctcgtgcatgcagcggcgactaatatgagctaagcagaagtctgtgtgctcttcggcgctctttgtacagccaggatagtagcacctcttgcctccgccatgggccctgcagaagatggtttttcctccggctttctcctcgcagccttgtttcttgcatttcccgctaccacttgcacccgccacacttccaccactggattttacagtgttagctgcgagcatttctgaagcatcgcttactaccgaagcgcacagggaatgcgaggagctttccttctgatccgacccatctacacatcttggaaactgactggattctgcatcaactgcgcacttttcagggtttcttactcccaataacaacgaaagtgaagagctttctttctgatccgacacatctatacatcctgggaactggttggattctgtatcaactacgcactttccggggtttcttactcccaataacaacgaaagtgaagagctttccgtctgatccgacacatctatacatcctgggaactgactggattctgtatcaactgcgcactttccagggtttcttactcccaaggacaatgaaagtgaagagttttctttctgatccgacacatctatacatcctgggaactgactggattctgtatcaactgcgcactttccagggtttcttactcccaaggacaatgaaagtgaagagttttctttctgatccgacacatctatacatcctgggaactgactggattctgtatcaactgcgcactttccagggtttcttactcccaaggacaatgaaagtgaagagttttctttctgatccgacacatctacacatcccgggaactgactaaattctgttttagtaaatatgaacttttcaaggctacttactcctggagcagacaaggaaagtgaagagctttctgtctgatccaaaatttggggttcccagttactgcaaagcatcaagaaattaatcttcaatcaaaagttaaagcacgatataaataaaactttacaggagacaataaaagagaggtaattaataaggctttgcacttaattcatctttagataaccgagtcaattattttatagttgacttaagtgtataacccaaatggcaaatgacatttgcaaacgaaaagtaatttgtgaataaaatttttatatacatgttcttagcgatctaaaagcaaaggttgaaaaataaacttcgataaaaaaaatcccaaaatcagctccaaatttaaggttaaaaattggtttattgtgcaattagtttcactgaaacagtctttcagccgaggaatagcatgagcttccaggataagctatatgtgttataatttgacagtcataaacaggagagtccatctgatgacttctagcttctcttgctaacttgtcagacaaacatttcacttctcttgggatccaaacaactcttcaagatttctgcaaaattaaatctcgcatttgacttacgattggtctaagactctaggatcttcttgaggatttatagttcttgcatatacaaggccactctcaacgttccataataccatagaaattaataatcttgttattgtatcagaaatctttcttcatactaatttgaagctctcatatagaagtgtccacattattattatcctactccatacattttttttactccctccttccaaaagtctaagtcctatttcattctttggttttccaaaagtctaagtcctatttgtaggcactatgtgctatattaattttttttatcgaaactcaagaagtcattttagtacttattggttgcatgttcattggttttgtcacataatgaatgagtagacgagaaattacctagcatttccttcattaagagaagaagtaagcaattctcacattaatataaataaaatcatatgcatccttatattctatggccaaaatattcaccacacaacaattactgaattcaaaataaataaatgctatttagttgtaattggctttagagtctttactttattttttgatgatttcataattcaaaatctgaattaatacgtaccaaattatttatactccatttggagttcgaattaaatcattatctttatttaataaatctaaatttaggaattaataaaatttagtactcccttaggttccataattgttgatgttttgaacaataatatggttttcaaaacatatcttaactataattttctattataatatatgcaataaataaataaatacttacttttattatagtaccttttaagaccaatttatacatgttattctattatctccaaacttaatattttgagacttattgatagccaaagttctaaagtttgaccataaccttgtctaaaacgtcaagaattatgaaaccagagggaacagtaaattaataaattttgaaatacatagtctcagtatcaattagtttttcagcgaattaataattgtaaaattcaaatatagtaatgccaagtagtgctcagtttgaaatctcaattataatatttccatgatttagtaaattataaaataaaaattaataaataccaagttggcttataatatttccacgatttagtaaattataaaataaaaattaataaataccaagttggctagagcttttcacttgcacgtgaaacggggcaagacattagtgtatcactatttgagtattaactattacaaaattaaaagattaatttatttgattttttaaagaaacttttataagtaaactaggaaggaagtcagtgcagatgcacgggcaattcattttttgtttcgatgacatgcgcctaatttgaatacaattcaaaatagcatatatttttacaacttaaagcatagttaatatgttttttgattattagtttggttttccatctaatctaaatgagaagaaaaaaaaaaaggatgtaggacccgacgcgtgtatgtaccgtaaatacatacattttttcttaaggtggaatacctacgtatctacatgcatgtatattgtccggtagtggcatgacgacgtgagatgttcggatgtttttttttcttataatttctatgattaactagagcgccacatagaggtttagaagcgtttatagggtactatgtgatggattagaagcgtttgtaggaagtttatcctcttgattactttttctccctttttctctttatgaaaatatttgcaacaataaattttaaataaccacaaccttctaaattatgtatatttatttgtaacaatatattttagatcatcataatttttacttttaaatcatatatattttagatcatcataatttttacttttaaatcatgcgttcatttcttttatctatttggacaattagaatttatgacgtatgttttctacttcactcgtaaaatgtatattcttctaagttctatttattatcctttgcatgtcattcaaacatatatgaaaaattataaaaagaaagtgactatgtattatgtcatcctgtaccacttcacaggcattccttaataaaatagaaagtgatatattgttagatcgactttttaaagcctcaccaataagaagaatgcctgtgtgctaaaaacatatattttttcctgtagtgcaactgaaatcatatatgtttacatcatgtattttttattctacattttttaccatatttgtggatgaataaattttgtttttctacaatagaaaacactattttaaaacccatctattttttctacccacgtacatatatttttctgatcttatagcttttcttttttacttgcatatataagtccgtattttttttaaagtaaacagtaccttttaatagttttctatcgtacatacgtacgtttttttaaatgaacagtaccaaaagttttttttttcaactgtgcgtacgtacgtcagatttttccttctttttccattgtgcgtaggtaactaggattttctggtataaacagttcactcgtatacacatgatatgatatcaagaggaagcaaagagatctaacctaatggtctagataatgggttcaccaatttaaatgaaaatcgacggtgagattataaatgccacgtggcaacctaagagcgtttataggaacaccacgtggcggtttagaagcgtttgtaggaagattaatggacatttagtatataatagatagatagatgtactgtttagcggcctgaaaacatgctcgctaaaaatgagggagtaggtaagcccttaagctattcagaactatgccttagttgttcaactttgcagtacatgcagatgaatgttggacttggatgtttaatagataataatgtgttaaaaattaaagaaaggttgagtaagcaattgtgttgcacgagatattgctcaaacgcagaacataagaacatagatatatattgtgaccctgcttgagggagctagagattattgatccttagagtagatgcgggcatgcggctagtaaaatttcagctccctcaagcagtggaaatgctctctagattatgtgaccaagtagttgtagaattcataaatgaactagcagacagaagctagattactcacaaggtgcttgtcagcaacaactcctcaccagagcgcctatattaagggaatgcaatgtcaacacaatttataagaaaaaaaattaattatgagaaggaagaagaaatgtcatcaacaccgaaaacaatgctaagaaaaatgagtaattgtgaaaaacgaaagaaagtgagaggtaggaccccactaattcacagtaagcaataataataagaatgttaatagaatcaatttagatcgttcatattttataatctaatacatcatatctatctatgctatcgcctcaactattggttgcaaaataaaattttctattaacagtagaaattataaatcaactattaagattatttttgctgatgataatattaataatagagtactactaccagtagggaccaccgtaaactttatactatgtattttgcacgccagatcggatttaaacgcattcagtaatatctctaccttttaataggttgaaaaaagaagtatgaacaggaaataattatttctataggttgaaaaaagaagtaggaacaggaaataattatttctctattactgaatgttctattagagaaaagaaaaagacccttactcttcatcaacaccaccaactcttcgtatattg

SEQ ID NO: 16834 - DNA, 598 bp, Oryza sativa
ccgattgatttatcgtttgtgttgatgtcgattctcctccactttattgtcattctctgcaaaatggttagtaaacctaatactagtggaatattattgttctatcatatttatgcattggaagcatcactagttctctcctattttagtaatattgacggtcgaaactgattgataacgaccgtcaacagccacttcaacgagtactgcgccgagctcggactgcgtcgagaactcacggcgccgtattcgccacagcagaacggcgtcgtcgagcaccggaatcaatcggtggtgggcacgacgaggagcatgttaaaggcaaaagggctcccaggtatgttctggggagaggcagtaaatacggcagtctatttgctgaataggtcgtcgtcgaagagcattggcggaaaaactccatacgagctatggaacggcggtgcgccggcggttcatcatcttcgtacatttgggtgtgtgggacatgtgaagaacaccatgccaaatgtgaagaaactcgatgacaggaggtaacacatgattttcgtgggctacaagctaggatcaaaggcgtaccgggcctaccaccccgtgacgc

SEQ ID NO: 16835 - DNA, 656 bp, Oryza sativa
actataggcgaattcgagctcggtaccctcagaaagacctattattcatttggatattaaacctagcaacatactattggatgacaacatggtgccaaaaattgcagattttggtctatcaaggctcttgggtgaagaacaaaccagagtttgcacacaaaatgtcatgggagcaatgtaagtcaccaaacacattccaatgtctattgttttgtagttttcctacaaggtgaatttcatttgcattagtcacataatcctccaactattgatgctgatattatacagaggatacatggcaccggaatatttatatcgaggtgaaatctccactcaatcagatatatacagtttaggtcttctaattatcgagatcacaacaggggagaaaaacttccccaatagagaggacatcattgctaagaacttcattgagaatgtaaggcaaaaataatgactgtaccagttttagaacaaatttactgttttcatactaaggagttcttttagaataatgttatatataagtttgtgtgctgtcgttgtttataggtacgccgaaatcggaccaatattgtgcatatatcactgaagtacccatcgttagacacaaattgcctccagcaggtaaagacatgcattgaaattggactgag

SEQ ID NO: 16836 - DNA, 601 bp, Oryza sativa
gagagataattatccatcattgttcatcgtttggaagcgtatccttctactgtgtttttgaccaatttcacatgaaaatttacatcatatttcattccatcgacgggtcgacgatgtgtccggcgaagacgaccgcacttgacatctcctccactatgaagtaggcgaacggatgttcggcgacgaagtccaccggcggcggcggcacaccggaaggaagcatccttgtcatggtggcggcggcagccacggttccttcctcgttcacctcgatcaccgccttgtgctggatgtcgccgacgaacaacggccagccggagccgtcgtcctccaccatgtcggacaggtcggcgagctccggcgaaaacggcagccggaggcccagctgctcgagggcgccgacgacgctgccgccgcatgacaccttgaacttgggcacccgaaactcgccgacgggcactggccacgccgccggcatgtgctcgtgcaggaaccccggccgcgacgccatcctctccaccaggccgcgcagcccgtcgcgcgcgttcgggaggaagatggccatggcgtaccgcgtgaactcgccgccgacatcgccgcc

SEQ ID NO: 16837 - DNA, 12771 bp, Oryza sativa
  unsure (1)..(12771): unsure at all n locations
acggaaaatgggtgcctcttacctcagcgatgagctcctgaagggatggatcgcataggtgcgaatgctggcgtaccgtgttgaggatgtattggacagctttttctaccattctattcaattcaagaaagataagttcctgaataagattgttaagggatcacactatgctgttgtttttaatgcaattgctgatgagttggttcagatagagaaggatattgagcatgtttcaaagttgaaggacatgtgggtttaccctgtcagtcagcttattcctactcaagtcaccatctctgaacaccgatttcctcagtacagttttccccgactaatgaaagatgaggatcttgtggggatggagaataacagacaacacttaaagcaattattcagtcatggaatttcagctctcagggtgatatctgtgtggggtatgggtggcatggggaagaccacattggtccttaatgtatatgagcaacataaggagaaatttgacattaatgtgtggcttactgtgtctcaagcattttctgtggaggctttgctgaggaagctattatgggagataaggcgtagatgtgagctcacaacaccaggtgatggtgatagtgtcaacaaggagcagcaggcttcagatgagactgacaaactggaggtttcacaattgaaagaactgaaggatgagttaaagaaagcattaatgcgaaagagatttatggttgtacttgatgatgtatgggaccgtcaagtatttgacatgatgcatgatgtgtttgaggattttaggaatggaagtcgcgttgtgatcaccacaaggagaggggatgtggctgctcttgctcacgagggttgccacctcaaacttaatccgttagaattgaacgatgccctccttctgttcagtaaaaaggcatttcctaatagcaatgaccttgagtgccccttaaagctcaaggacctagccacagacattgctaagaaaagcaatgactcatcactgacagagtgccgattggagctaaatgggctagctactgatattgcagagaaatgcaactgtttgcctttggcaaatagcccagcacaggttcaagagctagttgcttatattgtaaagaactgccaggacttattacagatggaaaataatccatctgggcttcagaagcttgctactgatattttaaagaaatgtgagctcttgcctttggtgaaatgctcagcagagttgcagaagctcgccattgagattgtaaagaaatgtgggggcttgccgcttgcaattgcttcagtaggcagcttgctgtctgcaaggatgcaaatagagtgtgtgtggaagcagattcatgatcagcttccatgtgagctggagaaggatgatcaggtccgaggagttctaactctgagctactatgacttgcctggagagctcagaaattgctttctgtactgcagcatgttcccagaagattacctcttgtcaagggaggttcttgtgagacagtggattgcggaaggttttgtggaaaagaaaggggacagcactctggaggaggtggcagagggatatctcatggagctggttcatcgaaacatgcttcaactcgtgtataatgatgagcttggcagggttagtacatgcagcatgcatgacattctgagagagctggctctttctatctccaaagcagagttgtttggcaccgcaaacaattttagtgagatggcacagatgaacacaaatgtgcgtcgcctgtcagcatgtcgatggacacacacagaacatgatttatcaaagataaaattcccacatcttcgaaccgtaattgcactccagtcaagtatggattttgtaccatcaatattatctgaatctaagcaccttactgtccttgagctgcaagactcaggaatcaaccaagtcccagcatcgataggggatctttttaacttacggtacattggcctaaggaacacagcagtaaaatctctaccggactctatagagaagctcgtgaatcttcaaactcttgatgctaagtcaaccaagatagaaaaattacctagtgggatagtgaagctctataagttaagacacttgctgattgacagattaagtgatggtacaagaacggaattccggtatttcgaaggagtggtagcaccaaaagggttatcgaggttggaagaactgcagacacttgagactgtagaagctagcaaggacttgggggaacatcttgaaaaaatgatccaattaagaaatctctggatcggcaatataaaagctgggcactgtgcacagctgcttgcttcattgtctaagatgccgcttctttatagcttgcttctgtgtgcaagtgatgaggaggagaaacttaacatcgaaaaactcgtaccgacatccacaatgctccaaaagctaattatcagaggatgcaccagtgagagcacacttgagtgcccggtgtttcaggaccatggacgacgcctgaagtatctagctctaagccggtgtcaccttgggcatgatgcatttgagaggctcgaaaagtgtgtgccgaacctgacatatttgagtcttaacaaggtgcataccaatggtgcacacactttggttcttcctgcaaagtcgtttccgctgctgaagacactcgtcttgaggaacatgtccaatgtcaatcttctgaaaattggagctgacgcccttaaatgtatcgaaggtttatacattgtgtcattgtcaaatctaaagagcgtccctgaaggcattgaatcccttagctcccttaagaaactcacccttctaggcttgcacaatgacttcaaagctgagtggaacaagaaacgaatgcacgagaagatgaaacatgtcactaagcttcgtgtgtacgagtggtcctaattcagtatagtcctgcatggatctgaagaacatgaagctgcatgctgcacaactggtgaatccgtgattgcaggttttctcagatatctatatttttttggatactgtagttctgtaattgcataatgctttaaatcctgttaataagtcctggaacaatggtattttgccatccggaagattattcaagttctgtatttttctgttttcttggaagctggttttcttgtaagaaatggcacatatcagcccagctttatttgcaagtagtgtaaggattctctccatttccatcgtttttaggcatgttgcaatgtggtgtgttgtgatcctgtaaaatttctggtaggcagatcttccattgcatttgtctgtatatctatggtatctacttttctctctgatcaggctataattcatacatatatgagagataatttggaaaaagaaacatacgtatatgagagataattatccatcattgttcatcgtttggaagcgtatccttctactgtgtttttgaccaatttcacatgaaaatttacatcatatttcattccatcgacgggtcgacgatgtgtccggcgaagacgaccgcacttgacatctcctccactatgaagtaggcgaacggatgttcggcgacgaagtccaccggcggcggcggcacaccggaaggaagcatccttgtcatggtggcggcggcagccacggttccttcctcgttcacctcgatcaccgccttgtgctggatgtcgccgacgaacaacggccagccggagccgtcgtcctccaccatgtcggacaggtcggcgagctccggcgaaaacggcagccggaggcccagctgctcgagggcgccgacgacgctgccgccgcatgacaccttgaacttgggcacccgaaactcgccgacgggcactggccacgccgccggcatgtgctcgtgcaggaaccccggccgcgacgccatcctctccacgaggccgcgcagcccgtcgcgcgcgtcggggaggaagatggccatggcgtaccgcgtgaactcgccgccgacatcgccgccgccgccgcgcttgcgcttgtcgcggaggagtcgcggcgatcggtagcggagcttgagcaccttgaagccgtcgtgcacggcgacgcgctggtaggaacggctcgacatgtagggcacgtcggcgacggcggcggcggcggcggcgccgtcgtggcggtagaacggcttcctctccgtgtcgctctcattgaagggacgatcccacttgcccttgaagtagatggcgttgccgagcacgacggcggtctccgggccgacggatctcggcggtaggacgtcggtgatgagcttccccgtcgcccgccgcgcccacgcgttgatctgcttcctcgcttcctctgccttctcagaaaccaaatcaagaacacattgatcgatcatggatggatcaagtaaaagaataaatgcatcgatgagtatgctataaccaaccttgttcttgaagtcgacgacggtggcctcggcgttgtactcggcgctnacgacggcgcggtagctgggcttgaacgggcgcgcggcgtcgcaccatacgccgggcgcgaacacgacgcgcggcccgagggactccgggcccctgtcggcgagcgcagtctcggccgtgcgtccgacgaacgccgccaggtcatcgcgcgacgccgcgccgagcacggcgaggatctcgtcgagggtgccgccgcccgcgccggcggcggcgagggaaagctctgcgtgtacggagagcggcgagaaggccaggttgcggccggggctcgcggcgccgaggcggtcggcgaggcggacggccagcgccgtcaggccgccggagatggcccgatggcgatgacgtcgcgccgcctcgccgtcatccatgcgaactgctgcctcgtcgatcgcgggaaaagaggaagggaggtttaaaagtcggcagatcgaattcgtatctctctatttttttatgagaagtaatataaagaaaatcgattcaaactagaaaacctacaaaaccgccggccatgcggaaattttctttgtataagcccggcatatattgcaaagtagtagtgcgatagggaaaaaaacagacgcttgttatagttaagtgaaaattggattgctcttttgcatgcttgtatagttgtacgggtaaagtgttacttcgagaatgctcaaaatcaggcgcccgatgcggcgaaaaaaatcgggcgccacccatgctcgcctccgcctcgcctcccacacgcccccaccacgtgtccccaccatttgcgccctttgcaacaatcgtctggatataacggaaacgtcctgttagggggatttgtttcattttttgttccatcaacaatgtttcagctagtgtactcgtgatgtttcactatgtatggatgaaatgttgcagcggatttttgatactgtttcataatttcatcttaatggacacgttgtttgttcatgtacacagggtgtaagtgttgcaatggctttaaaatcgtttgttgcatacgtttgaaccaaattgtttcatccagtgatcttactgtgtttcacttttttttaagaagtgaaacattctttcgctatttgctgaaacattgtttttatatagggtgaaataatacccgattttttggaaaccgttgtttcatacattgtaccaaaatatttaatgaggtgatttggttgtgtttcagctttttacaagattaaaatatttttgatctacttagtgaaacatgttcaatctacttggtgaaacagcgcccgatttttgaaaaaaaatttaaaaatcaggcgcccgatttgtaggcgcctctacgtattttacattactactagtaacgtattacgtagtaatggaccaagctatataattagtaactagttgggtgcccgtgctttgcaacgggaaaaaataacaccaactttgcctcaactcacattaatttaggtacaatatacgatgaagactacaaacgttcatctagatacaaatagctacaagtgatcattgtaccattatagaatagattagattgtaatcccatctaacaatgaaaaaacaaaaaatataattcaatactcataggacatacagtagcaatttcagatcttagctctcaccattgaccatatttaaatttgttctgaccaataggaaactaagatgatcaacagtatcagtatggccttcaaatttgtaaagaatacttcatacttacatgtcccatatatacccaaagctatcttctgatcaactaaaaatataatttccatttgtaataaaaaaaaacataggctggatgtaacatatgtgtttggaccttgccttccgaggtgagtcttgctcagcaccctcatttgctttccatgccaacaactctgtaccgtctgtaccctactcctttaacaactcaatgaaacagtggccttcatatataacatatattttcattattccaacactacacattctaaaatttgaatctctttacaaacaaacaacatggaactgaaggtctgaagccctaaagtaatgttcatgcaaagcatttcaccctgttcaactcttcatttcttcaaattttcaaatcacactctataattataattaccaaggaactaaaatattaattaaatggaaaaagaagaatatttcagtacattctaagaccaagtaaagaattactacaaaaccatcaatgaccaatttaattatataaagtatgcaaatttaacgccattttgaaaaatcaatagttgttgaagaaaaattggttatttgctgcatatccttcaagctttgctgctcggttagattgggaaaacagggaacataagccatggaagatatgtcacataataagttttatcaaaaaggcacgcagaagccatggaagatatgccacagaaccaaatttatccaaaaaatcacatcacaactatgtaaatgatgcttataaaaattacttgaatagagcaatgatcagcggttcattatttcctgaaacatataacaactgggttagaaattgtgaaacatttgatgactgcagaagatggttccgcatacctaataacttgatgacctcgaagacataacctgcaacgttctcatctaacagatgacagtaaatggaagatcaattccaatgtccttgtttgtactatatatattagtaaatagcagagatcctttgacagcatcagcaaatagaactacaagagaagcatttagtggagcataatcttctgcttcagtagaaatgattaaactcatatcactaagcaataaaatgtcaaaggccctcttctttgctaaataaagtaaggactaaggagcactgctgcagaataacaacaaaagcatcattatgcatcctatcaagtatagagaaagttagtgacaatttaattttcaacattgatgagctgttccataattgtcaacatgtttgcaatatgcagtatccagtgattcagacgatcacacccaaactttaatttcagaagcatgtacatatcaaatataaagaactaaagagtacatttttgtttgatattgacataaactctaaaagaaactatagcaaatacttcgattatttatgacaacttaatgcaatcatgttagggtccaaaaaccaattgtaatctcattatcatctcagagaaagcactattctcaaaccaacaacaggggccagccagatgttgtgtgtatcttccttcattaatctaacatatgcacaaaaagagatagaaaatgtacagctcatgtgacaactgtttacatacccacattgccatggctgagaaaccacaataccactccatgcagctggtatctccattaatatgaaagtagtaaaacatagtagtgggttatgggcttttgatcacatcagagcatcatggttagattatctggcagagggctatgtgcttttgatcacaacagagcatatcaatattcagatgcttgcctagttgctcagtcacccctctctatcaaaaaacaacatattgactgacatatcacctctaggagtataggacttcctaactgatcaggaaccatacataaaaattaacggtccttgccataatgcttaagctattataaacaatatattgatggacaaacacatgtaagtgtgatataacgctatgtagtacctacatgataattgatgccttaggttgagagcaaatcaagtcacaaaagaaaatgaaccacattaaccatgagaaaccataaaaattgaagtgattgccatggataaaatcaatggtccaatctatgataaaaacaaaaataggacgaagtagcagagaggtgtggcataacaaactcttaattttgaaaaattctattggcaatgtaatcaaccaattacaaagacatagtcacagataaataataccttagggacacacccttactcccacaaaatcatttgacatgtatatgtaaaaaaatacatgtacaaatttggtcatttcaaatctaacacctaacatagaagatcagttcaggagcaattaatttgttctgattctcacatggattagaatcaaatagatgatttacaaatcaaatatttgtagcatcaaacgagcatgaactgatggtttaattgccactgaagcaaacaaatgtaagtatgtaacacgataattaaccaatcacaaatgtacaaaggcatcactgcatacatatgacaccaatcagttagacaattgtacttttttttagaaaatcaaagagtatataacatgccactgaaatatggcatttgagaaaaaaagaatgaacaatcacctgagatctaaggggtatgtagtgctcacagtacttgagtccagggcagcctccttcgagcactgccacttcttgccatatataagctctaggtccagcttctttccgaagtacggtccaatagcactttccgaagtacggtccaatagcacgaaacacacatatcagatgaacagtgttatccctttacaatgtcatgaagatgcaacacacacttctacaatgtcatgaagatgcaacacacacttctcttgttagaagtcggtagaaaatgatgagcaagggaagagctgccaaggtgcttcaccaagacaaatgcttatgccagagagatagtggtaaaaaaactctttacctgatcacctcgtcgtcagccatggcaaggaggcggccggagggtctgctcattgcaggaggccgcagtagaagttgtgcagttctgggcatattgaccaccggcggcgatggatttgagtgcaaggtggtctcttcccttttccatctcgtctcgcaggcgagtcaccttgcggatgctactccatccagagccgtgggcggaggaaaagagaggaggcgtggtggtcatcgatggtgacctggcggcagagcttgcagcggatgggtggcgatggagcttgagggccggggacaacagcacgtcgatctgcgcggggcggtggtggagcttccggcaaagggaacagtagcgctcggctgagatcggtggtaacggtggcggtggtggtggcgggagacgatcgaggagagattgggggcgatgcggaggaggacgagaggggatcgggacgagtggcagcgcggagccggtcgtcggggcggagatcgtgggcggcgtttgcggcggcggcagcggtgcgggagggacctagtggaggagatcggcgagggcgacggggaggatcgatggaggcggcggcgctggtcggttaggggaatcacggtgacggtgggggagggagctggtggaggatgaaagagagggcggcggggaggatctatggcgtcgaagctggtgggggaagacggcgatggcggcgacgaggacggcggggacgatcgatggtggcggcagtgggggagcgatctggtggaggacggcgtgggcggcggggaggatcgatggcggcggtggcgcgggacggtgggggaggacggtgggacggcggggaggatcagctggtcgaggaggacggcgagggcgagcgggcgagaggaagggtggcgagaatgcggcgaaaagcgagcgggcgcgcggaagccggaaggccagggcgtactgggtagttggagcacgattggagcgcgatggtgcgggcggataggagcgtctggagcgtcgatttggtgcgaggatcctagaaaacatgtcagccgttcgattgtccaggactcaccaccaccactaggaactttttaagtagtaaagatgggttaggagggtgattaagaataaagcattagatctagatgggtacttcgatgggaggaggggatgaaaggaggacaagtccgcttttaaggtagtatagataaaccaaaagtgcatattcaaaattcaccaatataagaaagacacatggaaaaatagagttagaataatatatctaacttataaaccagaagtgcacataaatttaccaatataaggtcttgtttagttcccaaaacaaaaacttttcacctatcacatcaaatgtttggacacatatatggagtattaaatgtggaaaaaaatcaattacacagtttgcgtgtaaattgcgagacgaatcttttaaacctaattacaccatgatctgacaatgtggtgctacagtaaatatttgctaatgacatattaattaggcttaataaatttgtctcgcagtttctaagcggaaatatgtaatttgttttattattcgataaaatttaatacttcaaatgtgtgtccttatatccaatgtgacacctcaaaacaaaaaattttgccatctaaaccgggcttaagcaaggcacatgctcgaattcaattgacgtggtcaagggtactaatgtctgtacatgagcaattttgtactaaatatttatcactttgtactgaaatatataccgtattagctttttcacggtcctatattcattatcccttgtgtcaaagtacatcttgtattagttgtgctctggataaatcatagccttttaaacaccatctcaagccaatctaacaacagatgattcctcattcaagactttggttggttaatctctcccaagagaattgatagttaattggtggggaattttttggaacgactctcacaagacggtgcgaagttctattgatagagcaggaaaaaattacaagattacaaccctagaaggtcgtaaccaggaaaaacaaaaaaaattataccaacacccacacaccgacagcgccaacacacagaaccaggagaaagctagcaccggaccgactgccgctaagcggaccagcaccaacacacagttaattggaggagattgatcctctccaatccttttctcatagaagttagtcgaacaagttctaagttgatactctgacgatgtacctaatgaactaaacctaaacaaaatattggatggaaattttcaatcaaccatgcatacccgttaactaaaactttgtggcatagcaaagtgtggcaacatttttttttgaagaattttgtcctagtattcgctaaggctgtcgtgaaagatgtttcaattgccaaaaaagtttggcatcaatgcaacatatttacgacttcatgtataagctctgcaaactgaataaccatattcattacctgtaaatttcaatcctcaacttatatatctttttacatctaataagaagagaagctattctttataacaaagcactaaatgaagcagcaaccgtgtgtccagaacatgcagaaacattttatctaaaaaaacacgcataaacatttttgtaggaatttgttttcctcttctgatacgcaatatggtctatataggtggaggtggaattttttctctcaagggaacgtttactcgttttgtacatgtcaagaaaaacttataactttttttgatataatagacccatatataatatatcaatccatgcttgaattcaacctatacaaaatggaaaaaaataacaaaaatacacgtattgtttggactcaaaattattaatttttcacatatgttggaaattcgagtttgcatgtcaaaaatactggcatatcatatatgtgccagctgtatgccacatgttgatgcatcgtgtcaatttttttatgacctttgaaaaacatgcaaaatcaaagataatttccatgtaggggccggagatctagagagagagagattggaggggaaattggcaggataaagaagaacacgaagaacagagtatagtgtcttggagaagaggtagatgtattgagttttgggaagtagtttagtgtttacaattttcatacccctctcctcccttcatccaggcttatatagatgcaccggatacagttggaacttcaacctattcgggccaagcaattttgctcgctatgctgacgcacacgggatgaacatggcttccgtctgatcagattgtctgctgccgtatggtgaacagtggctgtaacagtgttgtcgctggagaggagtgtgagagtcgtaaaatagggaggaagggagggggagtgcagaagattgagcaacaacatagggagaaggagactaggagagagaggttagatggagaggcagagttgtggatggcgggatgaattttctttttacttgacacgaagtaattagttaataaacattttttattaacagaataacattaaagatttgctagttttgaaatatgccattactatttgtgtatttgtaactatgccattgttgtttatttgtaatctcagtgataccattatgatatgtattttacatgcattggacgaa

SEQ ID NO: 16838 - DNA, 1366 bp, Oryza sativa
ctcaatatgtggctgctggttgccacgggctgcttgcttgaagatgaagggatcaacgaatgagcttgctggggctagtttgctgcttgaagaccacgacgaagacaaagactcaaatcccatcgctggcgatgcctccctgttgctccctgattgggtcgagccgtgcgcatctgccgttagaattcggagcgtcagacagcactgcgcaggccgttgtgccaaatgaccttgtcagatgcagtgatggggaagatgaacagtagagaggagaggttcaagaagatggggtaattttgtccaaaaagtttagaaaatacaataaaggagtaggtagtggcataaaccaaataaccacgaaattataatggtatggttacaaatagttgaatactaacggtatatttcaaaactgacaaatttataatggcatgaatctaattaacctttaaaaaaagctaccatgaaatatcacaaatgtgtaaaaaaaacccaaatataacaaggcagtaagttaagactatattctaacctccctcttcccaccttccgctcgtttttcttgagcatatgcttctcaaattattaaatagtgtgcttttaaaaatgttctaaagaaatgttgttgtaaaaatacatattaatccatttttaagtttttagctaataattaattaattacgtcctaataagctattgagcaaagaaaaaaaaagttaactgctgcttgattatttgggttcaactggcaagaactatgaggggatatcgattacctattctgtggtaagcatacccattaattaatttacggccactttcgctactcgctaaaaatagaactaataatgacttaaaatagaaaacaagagaggagcaaacacgtactctgaatgaacggaggctactgacgaccaaactgaaccaaacacttgtgaagctctcctgccaaataccactccatacccgcgaaaaacgctattcaattagcctatataataacgcgtaaccacagcctcttaattcatcccagcaaaatcatctcgatcgatcgacaaagctatagctagcccagtcatggccgcctctcccgcaatggcgacactcctcctcctcctcctccatgctgtcctcgtcgcggcagccgatgccggcgccgccgataaggaggcctatgcggcaacaggatcaaccgctggcaaggagaccgctgcggcggccgacaaggagacctctgcagcggccggatcaaccgcgggcgccgtccctgaccccaacatcttcaacaaggaggccgtgtgccccaagacgacggacgagaaggcgtgccagcaactggtgaaggtcctgccgcccgagtttgcag

SEQ ID NO: 16839 - DNA, 18257 bp, Oryza sativa
caaccgaaggcaaggagaccgctccggcggccgaatcaactgtcgataaggagacctctccagcggccgaatcaaccgtcgacatggcgacctctgcggcagccggatcaaccgccgacaaaaacgcctacccggcggccgaatcaactgccgataaggagacctctccagcggccgaatcaaccgccgacacggcaacctctgcggcagccggaccaactgccgataaggagacctctccagccgccgaatcaaccgccgacacggcaacctctgcggcagccggatcaactgccgataaggagacctctctagcggccgaaccaaccgccgacacggcaacctctgcggtagccggatcaactgccgataaggagacctctccagcggccgaaccaaccgccgacacggcgacctctgcggcagccggatcaaccgctgataaggagacctctccagcggctgaatcaaccgtcgacacggcgacctctgcggcagccggatcaaccgccgataaggagacctctccagcagccgaatcaaccgtcgacaaggagacctctgcggtggccggatcaaccgccgataagaacacctatccagcggccggatcagccgccgagaaggagacctcttcggcagccggatcagctcctgtcgtcgacactgcgcctgcggccccgccgacaacttatgtttaattacaaacattcggtacttaatattttttaggatgctatacgaactttaaataactcttccaaaatttttactacaccaataaaaaatccttacaaaattttgactacagcaatgtttgtaaggagttaatcgaacaaggtctaagttgatactctgatgtgtctaatgtttcctaaacaaaatattggatgaaatttttcaatcaaccatagccgttaactaaaattttgtggcaaagcagcaaacaaaaattgaagaatttggtccaagtattcgccaaggctgtggcaaaagatgtttcagttgcccaaaaaagtttgtcatcaatgcaacatatttacgacttcacctataagctctgcaatctgaataaccatgcatagtttccaaaaaaaaaaaaaccatgcatattcatcacctgtaaatttcaattctcaacttatatatctgttttcatctaataagtagagaagctattctttactataactaagcactaaattaagcaacaaccgtgtgtctagaacatgcagaaacattttatctaaaaaaaacgcagaaacatttttgtaggaatttgttttcctcttctcatatgcaatatggtctataacactcgatctatataggcggaggtggaattttttctttctagggaacgttgtcaaccaaaaagttaaaaaacaacttttttttaatataatagacccattataagatatatcaatccatatttgaattcgaccaaactaacacgtactgtttgaactgaatattattattattttacatatgttgagtttgcatgttttatgtaacgatatgccacgagcgtttaatatttcggtttggtcatttgtagggtgaaaatttcggtccgaattatatgaatttttaaacaaaatttgaataaaatattaccaaattcatgaaaaaaattaaaaatttcagccaaaataatatcatatcgggggggggggggggtccgatagaaccaaaattttccaaaatccgaaattttgaatcctgtatgccacatgttgatgcatcatgccacctttgaagtttgaagtgaaatgcaaaatcaaagataatttccatgtagtgataataaatactccctccattttacaatgtaagactttctagcattgtccatatttatatagatgctaatgaatctatttatataataatatccagattcattagcatctatatgaatgtgggtaatgctagaaagtcttacattgtgaaacggagaaagcaaatcactttcctctctatagtctatacactactcttcggaaaaaaatttggtggagaccgggtgtaaaccggctcccgtgcagccccgaccccgatggttgctacgtggacaaccttaggatcgaacgtctcgctgtgcatggctgtgcatggctccaagcgcagcgcaaataggacggaggagtcgcgactcgctcgatggctctgggcccgtcagctcaccggctcagatcatatcaacatctcttctcagcagcagccactgtcgccgatgcagcctctctcgtccgtcgtccgcatggcggcgatagagagtggccaagggcgaccgccctggctgaggacgtacgaagacgacgcgccgcttggggcaacgtagaggttgaggtcgccctgtttgccggcggctagcgcagagatgtactccatcttcctatatatgggcagtagctgctatactatctcttcccaatcacaggctcacgggcttctttctcaccatggcgcatgattgatttgattagttagtatgatctgggcttctgcattcaaactttagtgtagttgttaactgctacattttaatggatgtacgtagtctgaatgtttgcagattctaattagatttgataaagtactaatattgattttggtcttttaccatgtagatttgatacatactaaagattttggagatttgagcatttcatttcttcatggtcacttggtcagtgcatatatttcagtaaaagatcagtgtcaagttcagttgaacaaattaacatatcatacggttttccggccgagtggacgacgttcgagaaagggagtggtgacggacgagagactgtagatgagaaaggcgccgcttgccgccgctggcagcggctgcggaggaaccggtaggagagggatctgagcctgcaagccaacggcccgggagccgagtcgagcgaggctcatctgccatatttgcgttgtgcttgaagccgcaacgagctagacgtccgattctgagattgtccacgcggcaaccatcggggtcaggattgcccagaagcctactcttcctcggaaggatcgagcacatgccctgcgaagacgatggcttgcgacctctcctccacgatgaagaaggcgaacggatggtcggcgacgaagtccaccagcttcggcggcggcgtgtagtcgtcgtcgtacagcgagcacccgaggtcgtcgtcggactcctcgtgtacgccgccgcctcgctcccctcctcgttcacctccaccaccaccttgtggatcacgctgctcacgaacatcgccgggtcctcgccgtcgccctccaccgcgatgccgctcatctccgcggcgaacatgtcgaacggcaggcggagcccgaggccgcggaggacgtcggcgatgccgtagtggcagaaggcgagcttgaacttgggcacccggaacctgcccacggagacgcaccccggcgggaggtgctcgtcgacgaactccggcgaggcggtgatcctgtcgaggaggcccgggaggccgtcgcggtcgtcggggaggaagacgagcatggcgaacgacgggaggctgtagcggagcttgaggttgtaggtgtcgctcgtcgccttgtacggcaggcggagcaccctgaagccgtcgtggcaggcgacgtggtggtagctccccgacggccgctgcatgaaggggacctcgacggagctcccgtcgaggcggcggaactcgcgctccgccgtgtcggacttgtcgaacggggcgagccactcgcccttgaagtagatggcgttgccgacgacgtgcctcgtgtccacgctctggctctccggcttgatcacctccgtgatcaggttcttcgtcgccctcgccacccacgcgttgatctccttccttgcttccaccggctgcatcatcaatggccacacatcaaatattaaatcaaacaaaagttgatgaattagctactccatccgtctctaaatatttgacgctgttgattttttagcatatgttttaccgttcgttttattcaaaaacttttgtgaaatatataaaactatatgtatacataaaagtatatctaacaatgaatcaaatgataagaaaagaattaataattacttaaattttttaaataagatgaacgattaaacatatttaaaaaagttaacggcgtcaaatatttacaaacggagagagtagatctgatgaatttgaggtggatttgtgagaggatttacgtgattcttgaagtcgacggtggaggcggcgcccttgtacgtgccgacgatggcgtcgcggtacgccggcttgagcgagtacgacgcgtcgagccacgagccgcaggcgaaggagacgcacgggccgccggtgggggcctggtcggcgaggacgcggcccatgacgacgccgcggacgaacgcctcaagctccgggcgcgacggcgcgccggccacggcgaggatctcggcgagcgtgctcccgccgcgccggccgacatcatcgcgacggcaacgtggatggacagcggggagaagatgaggttgccgcccgccgcgcccgacgagcccgacgcgaggctcttcagcaggcgcgccgccagcgccgcctgtccggaccggcaggcttcgccgccgccgaccgtgtcgtcctccttcgccgccgccatggcaaatcgacgacttcttggcttgctggctgcacgagatgttaacctaatccggtataataggtggcgttgcagctagcgatgcgtcaatttgtagcggtttcgaagtttagatttgattcggagtagaactctacatgtatacttctgtttgtgaattgtgacgtgccgattacctaaaaaggatgccggcgatattttcagtttctgggctcattgaatattctattttggaaaaagtccaaatactctcctaagctccgcctatcaccttaagctttaaaaccggacatttaaccccctaaactttacaatacaatctatattacaaagtttagaatgctagacggactttcatctaaaatttaggggggggtatttgaattttttccttctatttttctaacatataagtgtactttatatgtaaaaaaaactttatatgtgtactatagttggagaaagtgtttttatccgtggaaggaatgttatctttttttatgccacctaaatagtcattaaaaaaataaaagacattgacaagatagattaatatgaaacattactccacaaacatatatcacggtggttgtggagttggtcaagagctatctgtcctcgccattgccaattccaattccttcgctcgcgctcatgctcgatctggtggtcatgacgagggggcaatcagacctacacattacaacagaaccaggcattcgtaaccccaaaagatatattatactgtctaagataagatatggaggaagtggaagatgaaccatcacaaaagtaggatcatcgttttggccccacgtctgtgacggttgcaatatcagtgatatattgtaaggtctatctgtctatcttcacggaagacgtatctttgttccccgtctaccaaactgctcaccttctctcttgctcgtaccctgctgcttactgaccctctcgcacttgccctctttgccatggcctcacctcttgctccaactccaccgctaccgcacatattgtgttcccatagtggagctttccacctcctccttaatgttgtcgatgcctcgagatcacccaaccaagctcgccgtccttgtcactgggctgtctagatccaaagcagcttccacttcctctttctactcttgttgtcaacatccgtagttctagtggtaacaaagtgcgagacgtcagcctagggtttacttttttggtttagctgatttgatcgaaggtcaccgatataccgaaatttcgaacaaaatttagttaaatttgaacaaatattacctaaatcatgaaaaatttaaaaaagtaaaaaatttcggccagaataatatcatatcagaggggtccgaaatgagcgaattttcagaaatttcagtccgaaatttctaaccatgatcaggcctggcctcctaatagtcatggtccactagatccagatgaccctgacctcatggtggggtggtgtcggtggcaaagggtggaggaagtagaaggtggcaaaggtaggaggaagtaggaaggtagtgttagcggatcagatggtgcttgatgctgcaacttcaacaaaggagaggcacaggctaatataagtgtttggtggagtggcctcgacgaggacgagcggctgtgttgtgatggcggcagctagtggcctcgactttttctaatagctagctgctcgggcatggcatgcaagcatgtcgacgatgacatcgagatgtggatggtgacgagctgatggcacgacgagcatgattcaggtacacatggccggtacgaggatggcaacatctctcttgtcatctcatgacaatgttggaggggatgagtggtctggccaggtggcgacaccaaccatggatgggatgagtgggatgagtgtacgcaagcgtcctttttaatctttttaggaaaactactacagatggtgggaaactattttaacatctcgagtcttgtttatatttttttaatttactagtttacatataataaactagcatgatggcccgcacagattgcgcggctagcatcattatattttctttcatatattagcatatatgttttctcattatattattaaaatatattacaatgtcaacataattttacattttgtaataactttacgaaactactaatgtgtaatattcatattgtattttatatacgtgttagttattaattatttttaatatcaaattttagttatttgtaaattatatatattcctatatggactctagacttatcttttaatatttctttttttaattctgaatttttattatttctaattgtatttctatatggactctaaacttatctttcaatattctttaatttttaatttaaaattttagttacttctaaattgtattcctatattaactttaaactattcttcccatgtttttcctaatttccaattttagttatttgtaaattatatttttatacggactctaaacactacttttcattttattatgtttattttgaattttagttagttttaaattcctatatggattctatactctacttctaatattccttttttttattccgaaattttatttttttcataattgtatttcacttctaatattccttatttttaattccaaatttcagttatttcctaattgtatttctatatggactctagtctcctcttctaatgttccttattttttaattctgaatttcaactatttctaaattgtatttctatatagactctagtctcctcttctaatattccttatttttaattctgaatttcagctatttctaaattatatttctatatggactctactttttctttttctccgattaatgtgagaatttctaggccatgagagcgaacgaggaggctcctttttctattcctttaataatataatagatagatggatatccactcaaactattagaattcatctccgtagattagtaataggtggtcagctgtcggaacaattttttttttatcaaaaatgaacttttttttaccacttcacataactattctagtgacatttgtcaccgacgtcacaccatgctcagaacagcaaggagttagttagatctagcggcctccaccctagctttcccatcatcactgttgtcatcaattcttgtgcttggtgacaaatgtgatagcgctgagctcaggccgtagatttggtcttcctacatctcctcttcttgtcattgccattgctggagactgcagggtggtggtgtgttgtcgctggagagcgtgcgagggtgagccctaaaatagggaggaagagagggcgagtgtagaagagattgagcaacagcagagggagaaggagagaggtgttagagggagaggcggagtagtggatgcatggcctgatgagtttcccttttacttggcatgaagttcttttatgatcgaacaagataacacaaatgtagccatatatatatatcacaaatgttgtctgttcaacgaagagctactaaaaacccaaacatgtctctacctaacttacttcctcggtttctgtgattacgaactgtttagtgcactttttgtaaaagttttctgtaagaaagttgatgtaaaaatacatattaatcctttttaattttttagctgatacttaactacttatatgctaagagcacccgcaatggtaaagtaacgtgctatctataaaacatgtatatctcagcaattgattagattaatagtaaaccacttcaatagtatgtctacatgggtatctatagctctctcatgcattgcctcgtttttctctatagactatctctaagttagtagatagttttgctctctcttttcatttaatatcttccatgtaggaaaatatgctgacattgatctcttgtatagagcctataaataatcattgtgggtgccctaataagctactttattttacgtgcggaggaaaacaaaagttcccaactactaacaaacacagcctttaaattggttttacgctgattacgagtatatatgttcaatcggaaaggactatatacgaggggatatcgattacctgttcttagctaagtgtacccattaattaatttacagccggatatactttcgctgctaataatgacttaacgattttgctaaaaatctggcgacaaatttttggcacgaaatcactcggatttacttcccttgtggattagtctgtgcatgatttaattagcggctgtgatgcgtttccttcccacgcacgcatgaggccagcaacatctagcttggcacataattgatgagtacatacattgcacgtcgttgcagctaggtgaacagattgaagaaataaaatataaagttacagtcctatataactaaaattacattcgtaaattcagttgatatgacatgtaagtgcactataattttggtaaaaatgttgtgtaagtaaatatgtacttgttatttcctttaaaatataaaattacaatcctatataactaaaattatatttataagtttagttgatatgacatgtaagtgcactgtaattacactatagttacactgtaactacactatagttacactgtaactatagtgaaattacactgtaactatagtgtaattacactgtaacttttagtagatgggttggtgatatatttttttcaatgtaaagatctaacaaataaaatatatgcaatatatataattaatatatgttgatacatgtatagactcttctaatcaagtgatcaaatgagcctaatccaactaatctaaaatctgtgtgatttggacccaaaaatctgtcgtgtgatggatagctagtcccatgacttaaaatagaaaaaaagaagtgtacaaaactgaaccaaacacttgtgaagctctcctattagttagatccatgcaggcgaaaacgctgtgcgattagcctatataaaaacggcgtaaccacggcctctttagccatcgatcaccattaattcatctccatcgacaaagctagctaagcccagtcatggccgcctctcccgcaatgccgtcactcctcctcctcctcctcctagccgttctcgtctcggcggccgatgcctacgactccgccgccagcgccaacaccaacgccggcgccatccccgaccccaacatcttgaacatggaggccatgtgccccaagacgacggacgtgaaggcgtgccagcaactggtgaagaacatgccgtccaacatcgtcgcggggaagaaggacgccaggagcatcgcccgggggtgcatcgccaccgcctggttcgtggcgagggacggcgccaaggactgcaccgccgccgtggacgagtgcaaggacaaggtcgaccagtgcttcgacagctgccgccacgctttcgccgccgtgaacgacgccctggagccccagggcaccggcgacgacgccgtcaaggtccccgaggacgagaagctcctcgccatccacgcaagcctcaagcagttgctccgcggccccacgggcacgcgccgcccgcccctttgcaacacttgctgccaggacggctcgtgcacggaggagaagaagcgcaacgtcgtcgcgctgttcgtgcaattgtggagcttgctggatttcgccgacgcggtgctcgaggacctgtatcctctgacgaagctgccaggggacaaggccgcgggatcagatacctctgcggcggcggccggatcaaccgccgacaaggagacctctgcggcggctggatcaaccgccgacacggcgacctctgcggcggccggatcaacctccgcaaaggagacatctccagtagccggatcaaccgccgataagacctatgcagcggccggatcagctcctcctgtcgtcgacactgcgcctgctcctcccgtgacaacttatgattaattacaaacattcggtatttcatattttggaggatgctataggaactttaaataactcttccaaaatttttaggacaccaacgaaaatccttacaaaattttgactaatcaacgtttctaaggagtttaacaaatttctatacgtgtaactttttcttacatatctgagtaggtgcattgctgagggcagggtgcgccttccgtggttgtcattcgaaattgtctttgtaacctcgtcaatttaatgaagtttagaatcaaaatgatgagccttttatctcacttattgtcctctttttttttttggcgcccgtacacattatatggtaccaacgtaatttttaaaagtcaatagcagtttattattacaaggacattcaaatatataaccatgggcaatagtagtaatggtctaactacaatatatattaggatcgaaattaacatatcgtcgtagactacattcatatgaagtaaatcaagtatatataattgtgattatgtgggttttaagatcactttcagtgcaataacttttaatgtaattggctaagtttgatagcatatttctattgtccggagaaaactatgggttcaaatacctacaccatccgtctaaaaaaacaaatgctgactatgaatttggacgaacacatattttatagttagaatttgatttctttttttgaaatagagagagcacaaatttaattcgcccctacatacaaaggctgcctcctataagatccacttacccggaaaaatatgtggtgaaaaccacatgtggaaacttagaaactatctttggatcgaaaaatggacgtctgacattcgtccacgccatcacgagtaaaaattttactcacggatttactcataagtaaagattttaccttgagtatttttactggtaatgacgtgaacaaatcttagacgtccattttttatccaacggtagttttcaagatttcactgcatagctggtttccaccgtatattttccctacttacccggtcagagtgggtagtgtccagcgatgtgtaactactaactagttaacaacttgattgcattgggaagggagattgatgatatatttcaacctgaaattggattaatgttaagtacctttctaggtatagtgagtgagtgatttttttttccatccttatttttagaaattaagtcttttgattgacaccaaattattttctttttctttcctgcggtttggtgcttcctcttgttcctcttcctccacacagacaacttataaattgaagatatatgtttataaaaaaatataatcatgtgagatcttattagcaagagttaattgtaacgaatataatgatgtaatcggatttcaattcagataagtaatttagaagaagaaaacaatttgaagttttattggagttgtactttgagaaaaaaaaagataatacaaacatgtagcaagccttagcatagcatgtaacttgcacgatttatcaattagtgtcaggattttaatggacatgaacactaacgtaacgcgccggatcgataatttcctccaaacttttctggagaaagctagccatcaaacgtcgctcactttgccgcatctctgtagcgttgcatgcgtacagggagctaggggtggcggagcatcgtatgcatgtctgactctgcattctctctcccttttctttttgtttaatcaaactttaaacaacttatttctaatttctaagatattccaaccgtcaaaaaaaatcaaccttatgatatatcccagtacaataaaagtaaatatagagggagggtggaggggtggcgatcgctacccggtcgctaccgcgatcgatcgcctattagattttccgagagagagagagagggggggaggagaagaaaaggtggtggggttggcctaaaaagaaaagtggtgggtccaaccaaagatgagtgcattgtagagaggggagcgtcgactgcttttcttcctatgtggatgtttggcgggacgtattgctactaccctaagatagtgcgatttgatctgacttgttgactcttatcattctcctattagttcaataagacatactaatttcatcccaaaataactatgtagcaaaatctcttgtattttgagtacaactaacatattttgtcagttttgtttcttatatttttctataaatttggtcaaatataaagaaatttgaattatgaaaaaaattcaaaacaaattataataaaacggatgttgtaccaactaacttggctgcagttaatgacattaaaatagttactcccccatcattttggaacatagagggagtaaatagattccgtttatctaaagtagttttgtttgtaatgttatactgcatgcgtgaaactgatgcagttatttgataacgttccacacattttgggacagagggaagtacatatgtgagctgctctctccgtttatattttaagttgtttgaattctttcttaataaaattatttaaatttgtccaaatttataaaaaaaaagcaacttctacagtatcaaattaattccactaaatttgacattgaatacgaaaatgttactatattttgctaaaaacttgatcaaactttaaaattttgattaaggacttatataatataaacggatcgagggagtaattaagaaacggatcgatcatatatcacgatctaaaatgatcatcttcgagaaaatctttggaaggatagaatgtatgaactaaggtgatcagcatgcattattcctcggtcggcccacgtacgtggcattgctctcctgccacttaacacatttttgcatgcagactgaaatcgcgcgtactcatttcatgttccctttttttttaaaaaaaaaaataaagcttactcattcattccctccattcacaaaaaaacgatgttttaggcattttaataaagtcagtaaaatatcaactaaaagagtcagtaagatgtaacctcgatcactttgataaacaaaaaatagttgcacaagtataatactatgacaactttgtatataatgactgttactttaataacgtgaacaattatattatggtgaaagttagcttctaccacctatatatatgtacggattataaaatgatattttagattgtggaaaatatcaaattcaacatattattaacagtatttgtagtactattcacatagtacaaattatccctctctatagggattagaatccatcttcgtataacatcctccattcctccactcatcatacagtcatacatggaggggaaaagatcgatcaaatcacgtgatttctgatataccatttgcagtacatttttgagagaaaaaaaacgcgtaggaggaatgggaggatgtccatcttcgtaatcaggaagagatacatgcaaatcgccaaattgagctaatctgatatgttgcccttaattatgtacccatatagtactacaaactgatgatccctataaatagtgacactatctacactaattttcctcacaccacagagagttgaaccaaaccatctaccatcaagcttatctaacgccatcatcgtcacgaccatgacgaccaaggccaccacccttctcctcctcctcgccgccgccgccgcggcgctcctctgccacatccacgtcgccgtcgccgccggcgaggacccggagccgtgcgagtgtgcgacccgtcggacatcaccatcgcgacggtgaagaccgggcgggtcgtgggcggcctgccggagttccaggtgacgatcggcaacgagtgctcgtgcccggagggggacgtcgtgctgtcctgcctcgacggcgtgcccgccggcgtcgaccggagcaagatccacgccgccggcggcagcgacgggctctgcctcgtcaacgacggcctgcagatcgtgaaggggtcgccggtggtgttcacgtacgccgccagcgcgccggtcagcctcgccttcgacaacgcctcgccgcggtgccaacgacgttgagtttggctgcaggcgtaccattaattgcttgcatcatcttccatggaagcgatctgttatgtgtcatgtgtgctgtagcttgtcagctgttgtgttccctgtattgagtataactgggtgtttgggcctggcttgttgtgggccgtggaccgtgtgtgtgtttacgacgtgccgtgctggactggcggtcgtgtcgagtgcgtgtgtcttgtacccgttaaaaggggaactccctgccgatgagcaggtatcgatgagaagaaatcaaatacaatcaaactacctctctctctctcagttcatccccttcctctctaattcaacccaaatcccctagcgaattccggattagcttggcgtgacgccggcggagtcttggagttcgtcacatctggtatcagagcagtgatcccgctggcgaggaagaaggggccaaatctcacggagaggatggttgctgcggaggcagagctcgtcgatctgaatcagcgagttggggagctcacgagcaacctcaacgaactcctggggtcgctgaccaagctggagacgtggattccatcggtggacacggggatccaagcgctgaacaaggccgtggaaggaatcgccgcaagagtgacggttttggagaacttacctgcagcggcatcggggatgacgaccccaacgcccatcgagcacggcgaaatcgagaatcaccagggagacgaatccaaagccctcgcggctcaggatcgatccctggtcaagggtaagtcccgattccccaactctcccatcacttttgatataggagagtcttcagttcagaatcaatccagcaataggttccaaggtcctaggcttcccaagtctgatttcccaaagtttgatggtaacaatcctaagctctggaagaactctaaaaagtattttgaaatgtatcaagtgtcttatgaaaattgggcaaaatttgctaccctccactttgttggaaatgctgccttgtggctccaaacttatgaggccctccatagtgttgaaacctggcctgaactctgtatagcagtgcatagcaaatttggcaaggacaaatatcaggaacatttagaagagttagaagggcttaggcaaattgctagtgttgaggagtattacaccaagtttgaggaattaatgcatagggtcttagtttataatcaggcctatgatgaaacctattttgtcacaaagtttgttgggggtctaaaaactgaaatcaaagcagctatatatcaagctgcataggcccaggactgttgatacggctttgtctcttgccaaaacgcaggaggaacttgtcttggagttgaagaagggtactcaaaagctgggttacaaagagagttacaagttagcggctgtgaagaataattaccagggcaagggaatattggggcatgctcctgatgatgctggaaaaactgaagagaaaccaaaatgggaggacagatttgagtccttgaaggcttccaggagagctaaaggagaatgtttcaaatgtggagaaaagtggggacctaaccataaatgcccaaaatctgttcagttgcatgtcttggaggaattacttgaagttcttcaaattcaagagaatcaggaagctgggcaagattgtgaatcagaaggcagtgatgaagaattggtagtctctgaatgtgcagtttcaggaactatgggaaaaagaacagtcaggctgcaagggttaattcaaaatcaagaagtgctgatattaattgattcagggagttctagcagttttgtggctcagcatctggtggatagtttgagtctggcagtccttgaaacagctcctgctcaagtggttattgctgatggaggtgttttacaatgtaacaaggtagcaacaaaggttgattggtggtgccaagggcatagttttacttcagatctaaaggtacttcagcttgggggatatgatgtgatcttaggcatggactggctagagcatttcagcccaatgtggattaactggcaaaggaaaaagttaaggtttacataccaaggaaagagaattactcttactggggttaaggaaaatctgtctgattgcaaatcagttactgctaagcagttaaaaggaatgttcaaatctagagctattgctcaagttgttcaactatgctcaattgaagaaattgaaacaaatgaacagttgcctcctgaaattagtgcagtattgcaagagtcccaagatcaatttcaggaaccttctaggttaccaccacatagagattttgatcataacattcctctcatgccaaatgccaagccagtgaatgctaaaccttataggtatgctccgaaacaaaaggatgagatagagagacaagtgaaagttatgctggaacaaggaataattaaggacagttccagtccctttgcctctccagttcttctagtcaaaaagaaagatggttcctggcggttttgtgttgactatagagggctgaatgacattaccattaagaacaaatttccaatgccagtggtggatgaattacttgatgaattggctggagcaaagtggtttaccaaacttgatttacggtcaggctatcacaagatcagacttttgcctcaagatgaacataaaacagcatttcgaactcatcaaggattgtatgagtttagggttatgcctttcggtcttaccaatgcaccagcttcatttcagggactgatgaacaaaatctttgcactaatgatcaggaaaaatgtgcttgtgtttgtggacgacattcctgtttacagcaaaagcttggcagaacatgtgcagcatttgagacaggtgtttcagatactacagcaccatcagctgtttgtgaaggctagcaagtgttcctttgccaaacaacaattggagtatctagggcatataattggtgaacatggggtggcaacagatccagcaaaagttcaagcggttcaggaatggccggtgccaaagaatctgaaacagttaaggggatttcttggacttactggctactacagaaaatttataaggcattatggagttatcactcgaccactaacagagttgctcaaaaaggataagtcatacaattggacagatgctcaacaaaaggctttctgtcaagtcaagatggctatggtccaggctcctgtgtctgtgctggccatgctagatttttctcaagaatttgtgttggaaactgatgcctatgacaggggtattggagctgtgttgacccaaaatggacacccaattgcctatttgagcaaggcccttggagtgaaggctcaggcattatcaacatatgaaaaagaatgcttggccatcttaatggcagttcaaaaatggagggcataccttcaacattcagaatttgttattctaacagaccacaggagtttgactcacttgggtgaacaaaaactaaccacaagtatgcagcacaaagcttttgtgaggttaatgggccttcagtatagaattcaatacaaacaaggatctgaaaacaaggtggcatatgccctttcaaggagagatgctcagacagaattgttagcaatctctgttgggaggcccaaatggttggaaatagtggtagagcggtatgaacaggatgatgaggcaaagcaactattg

SEQ ID NO: 16840 - DNA, 1503 bp, Oryza sativa
atggctatggtccaggctcctgttgtctgtgcggccatgctagatttttttcaagaatttgtgtggaaactaatgcctatgacaggggtaatggagctgtgttgacccaaaatgaacacccaattgcctatttgaccaaggcccttggagtgaaggctcaggcattatcaacatatgaaaaagaatgcttggccatcttaatggcagttcaaaaatggagggcataccttcaacattcagaatttgttattctaacagaccacaggagtttgactcacttgggtgaacaaaaactaaccacaagtatgcagcacaaagcttttgtgaggttaatgggccttcagtatagaattcaatacaaacaaggatctgaaaacaaggtggcatatgccctttcaaggagagatgctcagacagaattgttagcaatctctgttgggaggcccaaatggttggaaatagtggtagagcggtatgaacaggatgatgaggcaaagcaactattggcacaattgattttgaatccgactggtgttgagcatttctctctacttaatggggtcattcggttccaaggcagaatttggttgggtaaatttgaagatgcacattaagcagctttgctggctttacatgctagtggggtcggtggtcactcaggaataacagccacttataacaggatcaaaaatttgttttattggcctggcatgaagaaagatgtgcagaagtatgttgcttcttgtgaggtttgtcagcaagcaaaacctgaacattgcaaaagccctagaaaattgcaacccctaccagtcccttttcaggcttggaccaccatcagtattgtaacgccccgattttcgttcgggaataaaaatcaattaataatacattttctagaaattaaataaaagttaaatcaatttaatcaagtaaaataatgggagaattaaaattttcccttaaaaatcattggccgggaatattttgtaatattctttgtgccctaatgtactctccggaattttccgtgaattttcggagctcgagaaatagttttaaagtcacgaagatcatttaaccaattaaaataaaaagaaaacaaataaaatcctccctcctctctttgggcccctttcggcccaattcccccccctctctccctcccgggccggccttctccctcggcccgctcagctctctctctccctcaagtctgttttgcctccccagccggcctctccctccctctctctccgacagatgggacccgtgggccccacctgtcatccccaacctccagcccgggccggcaactgccatggccgcccgagccgcccacgtagacgcccctccccgcgcgtcttccgattcccgcgcgcgtgtgggcacggtccaccccacgtcatccccttcctccaccatttcccctacttctcccctccaaaaccggcgccaaactgcccccactcacccacgtcgccggcgccccttcccccttcaaat

SEQ ID NO: 16841 - DNA, 670 bp, Oryza sativa
gagcttctcgtcctcggggaccttgacggcgtcgtcgccggtgccctggggctccagggcgtcgttcacgccggcgaaggcgtggcggcagctgtcaaggcactggtcgaccttgtccttgcactcgtccacgggggcggtgcagtccttggcgccgtccctcgccacgaaccaggcggtggcgatgcacccccgggcgatgctcctggcgtccttcttccccgcgacgatgttggacggcatgttcttcaccagttgctggcacgccttcacgtccgtcgtcttggggcacatggcctccatgttcaagatgttggggtcggggatggcgccggcgttggtgttggcgctggcggcggagtcgtaggcatcggccgccgagacgagaacggctaggaggaggaggaggaggagtgacggcattgcgggagaggcggccatgactgggcttagctagctttgtcgatggagatgaattaatggtgatcgatggctaaagaggccgtggttacgccgtttttatataggctaatcgcacagcgttttcgcctgcatggatctaactaataggagagcttcacaagtgtttggttcagttttgtacacttctttttttctattttaagtcatgggactagctatccatcacacgacagatttttgggtccaa

SEQ ID NO: 16842 - DNA, 1560 bp, Oryza sativa
tacaaaaagcacttagcatttttaaacgtttgctaaagatgagaccgaggtgaaagacgagagttgagaagtcgaacactcatcactaaaaatgaaaaagggtcgaagtaataagccctcaaacaaacgaagcgattaaaaaataacaagaggaccgaaacaggcagacctggatggtcgaagtatattcacatgataaaaaaaatactttacagatagattacaatatccggatcaggacattttcgccttacccctgttacctcagacgaacatggttcgtcatcgctacttattttatatattactctaaggggggaaggaggtgaaatgcacgccaaactataccgacgtcaagcaatagcagcttggcaattggtcatcttgaagtttcgccaaaacatagctacatttttgcggcgttggacatgacaccggtcgtaattttcgaaagatcggccaggatgtcttcgcatccagttcgccactttgacaaccacatagttatttccgttgataaccatttcacggtatacgggcttgcacgaatacctaatctttggtaagcccttaattgtgacaatttactcgtttgcgctttgccagtctttgaaaggaggctgaacgcattctttacgcagtggaacctgcgaagaatgtggaaatacatagcaaatcgccttaagaacaaagtcattcggaaaatttgcaagtttaaggcaagattctggcgaagatttccattccattcacataaacataaatgccatttctgctacataaaagcaaatcgccagcagcaaacaaaagctgaaccaagaaaaatttacatcaaaagaaaagaaggcctcacacctcacgatggtcttgcatatcttcgtctcttagtagttgcagtagtcggtcagggccgcggcctccttcttcgtcttttccaatttggcctttaagaccttattctctaccttcgcctatttaaaggcgtcggcgacaacctcattgtagggatacgcgcaggctatgataacataaatcaaaattttctagcacataaaccaggaaccatataagtattagatcatagatcgttaccactcgacatactgtgtccacattattaatttggtatctctataccatgatccatgagacatgatcatcaattaatacatgtgctgatcattaaacatatttgttccacatatgatatttgatcagggatcctttagaaatagtaacatacaacataaagagtctcatgaaaaaatcacatattcattaaccaataatgagttatctatttcaagaaacaatatcggataaatatgtaaacatagtatgtgatacaatcatctatatgattgcctctagggcatatcactaacagtctcccacttgcatatctaatacccattgccctagtgtgcgcctcatgcttagcctaagggagtggctttgtcaacggatctgcaacgttcaaatccatatgtattttgcatatcttcacatctcctctacccactatctcgtgaatgaggtgataccgccgtaaaatgtgtt

SEQ ID NO: 16843 - DNA, 1161 bp, Oryza sativa
catcggtaagaatcatttcttagagtcttacatgttgagcctcttcaacaccttgtcaatgtatgtactctggcttaatccaattagcctatttgatctatctctatagatccttatgcccagaatatatactgcttcccctaagtccttcattgaaaaactatttttcaacgatgtcttaacggattcaagcataggaatatcattcccaatcaacaatatgtcatctacatataggattaaaaaccacctctgccagttgagctcattggtccacatacattagtatgtactagtgccaatagttcacttgccctttcactttgacccgtgaaaggtgcctttgtcattttgccaagtaaacaagattcacatgtctcaaatgattcaaaatcaaaagagtgtagaagtccatctctatgaagcttctccatgcgtttctcatttataagacccaagcgacagtgccaaataaaagtgggattcaaatcattaggacgttgccttttcgcattaatgttatagactgaacatccatcaagattcacaatgtataagccattcatcattggtgcatggaaatagaaaatatcattataatagattgaacaaccattgtccactgatctaaaaccataaccctctgcttgcaaacaagaagcagagataacgttcttacacaaagcttgaatgcaataacaattatttaactccaaaactaatcctgacgataaagataatggcatagtgccaacggcaacaacaacaactcttgctccattgcccacgcgaatgtccacttcgcttcttgataagctcctacttctttttagcccctgcaacgatttttatatgtgagcaactgacctgctatcaaatacccaagaatcagtagaggaagtagcaagattaatttctataacattaatacctaaggtggaactctttccatcctgctgcatctgcttgaggtgctctaggtatttcctacagttcctcttccagtgacctgtctccttgcaaaagaagcactctgtatccttagcgggccctgtcttttgaaccttggtcttagagttgccagtactcgtgatctcatcagagtttagctttctcttttgaccagtcatcttgttattgggcttgcgcttatgcataacc

SEQ ID NO: 16844 - DNA, 761 bp, Oryza sativa
tagaagagcgaagccgccatagaagaaatgagagaagaccacaacctcgtttgtatcgggggtcggaaaagcctcaccgcatgctggccgccacccgatgatttccttgacagggagaacgccgtgcgccaccatctccttcaggttctcctccgtcacgtcggacggcgcccattggccttcaaagctttctttctcttccgccatcgattttacccgaatgcgctgatttggttcgagggatggctgtggagagatgagggattaaggcggtggatcacgggaaggattttgatgaactttttgaaggtggattcgagtgggatggtgaaccctagtttgccggcgcagctctgtactgtagcagggagtggggaaaatggcgagagttccggcggggaagacgaagtgacgcttggatctcgggatttcttgttaagggtatcggaggtgcaaatgggcttaggcctgaacagtacctcagctcagtatttttaacagcgtggcccattgtgttccttagggacttaggcattttttgctttggcaatttatgcgcacaatagtgttgcccaatgctgataaaatcctttttatgcggtcatataattctttgaattattgcaatgcaaattaaaaggtgcccgacagaaaggtgttatactgtttttgtcagctttattaggctacaaaagcagtctgggttaacttggaatgacttgtttttaccatagtcatttccttggtatgttatatgcctg

SEQ ID NO: 16845 - DNA, 689 bp, Oryza sativa
tctctcctctctcattcctacttatcctctcctcctctcactttcctctccctctcaccttctccttctcctgtgccgtggcgccgtgtgcctccttctcctcctccgggcggctctcggcggcgggctcgcgatggcggtgggcggaccgggagtggcgcgtgcttccttctcctcctcctctgggcggctctcagcggcaggctcgacggcgagtggcgggagtggcggtgggtgggagcggcgtggctcgccgaccaggagcggtgtgcgcacgacagcaagctcgcggcagagggtgaccgggagcggcgtgcgcacggcgggtggacggtggggaggcggcggcgggcagacgggggccactgccaacgacgacgacggggaccggcggtggtagctgccccccacccagatctggcggcggtggcggtggggtgcccggatctagggttagagtttccattttttgaattttttttggatttttattttcccgtgcgggcggcataagcacccacacgcaaaaatagtgattttcgcagacgatttgctctagacgggccgaagttccgcacgagaaaatctgattcgaccgcacggaaaaatctgtcgtgtagatccatacaaaaaaaacttttatatttataggcgaaggtagtgtcacgcttgttctcattttcttttag

SEQ ID NO: 16846 - DNA, 1685 bp, Oryza sativa
  unsure (1)..(1685): unsure at all n locations
tgttttaatataacacggtaatccatataacacattaatccatttttcatctctctcctgaatatgatgccatcatatataggtggtaaaatataagcaattttgcaaggtaattaacttgcaacaagtgatagatgatatggacttgaattcaatagtcagatatactaccctttctcacaattctttggcctagtatcacagtaaatacagttcgctgcaaagtgacacttctctatgcgctctgggtaatgttcttggtggcattttcgaagcgtcatttggtataatttgattttggaggataatgattgtgtataaataaatatagaacaaacgttaaagttagaaattagatcttgttaagcagttaattagtccttaattattaatatcattgcgaacttgtatacttctctatgtctcaatatatagctacttttggctatacatacacataactaaaaatagctattttctaggatagagggtgtcggtgacatgggaccgggggtatcttggctagaggtttggggcagccgcggtcacccacgtggcctgaccccctcgggggggggggggggtcgggcccgagggtgatgtgnccgcccctccctctgtctccccgaggggtcgggccgctcccgtttcggcnccgagggctggggcgcnccgaccccctgtgggtttggctccacgtgtgtgggttaggtgagcacagcggcgctcacctaaccgcgtttattgcgggttggacgagcgccccacgccgcatttaatgcagcgcagcacactcgttcggtccgtgacaggtcacagtgtgtgaccggtcacagaccggtcagatcgcgggttaggtggcaacaggcggcctttcgcacgcctcgccccgtcccgtcggaatgatgagagcctctaggcactcgtccctagccggagccggcgtgctgactcctggagttagcacgtcagtcccggctagattcataccaggtttcatcgcaaccattacaaggaagtcattttatgaagaagggctgacgtgtggcatgctaaactgacgcgtggtagacaagaatgaccggtttgtgactggtctgacgccggtcacgtcatcggcagacaaccgtgctcccacgttgcgcctgcttccggcggagtggaggtaggtatggcccatcccatcagagggtcattcggacaacagccatggcaaatctccgcccattaatgagggagtaacagggagatccccggtgttaggcgagtgatgacgctgggcctcactcaaagacaagctgtgatttagcttccaggcgaaggcgcaagccagttttttcttttttgggaagatagggtgagtccccacccaaaagaagagtaggtagaagtggtgcatgtgggatccccttgagatataaaaggaggaccttgcccactttgaagaagaggggagctcggagaggagagaaaaagaggaagagggtctctagagtttgaactctcttgctctccagctctttgtaactccttcacacacagatccaccagaacacaggagtagggtattacgcttctcagcggcccgaacctgtttacgtcgcccgtgtcttgtgcgcttcttctcgctgacaatcctcagatcgggggcttagaaactcccctagcgcccccggccgaaccgg

SEQ ID NO: 16847 - DNA, 667 bp, Oryza sativa
attagcaaggtgttgcttacctattttgataattgtctagctgtgatgccaaagctcactagacactaataaaatgaggatcttgctagagggaattttgtttcacaacacatagtgggagtatctttttttaaattgtttaataaaagattaaatgtagacatggtgctaattttgcatatatatatatatatatataattgttctcaggtaagagcacaaagagtttgtgcttaaagagccttttccagctaacttgcccaacaatgctagtactgctcagcgtagggatcatgaaaagcgatgcaatgattatcttgatataagctgtctcatacttgctactatgtcccttgagcttcagaagcaatatgaaacattggatgctcatacgataatcatgggactacataacatgtttgaggaccaagcaagagctgagaggtttaatacctcaaagtccttgtttgcgtgcaggcttgcagaaggtaaaccagtgagtccccatgtgatcaaaatgattgggtacaccgagagtctagaaaagcttggttctccagtcgctccctcccagctttgagccattcatattgaatttcaacatgaacaacatggacaggaccttggccgaattgtatgggatgctaaagactgccgaggaaagcat

SEQ ID NO: 16848 - DNA, 601 bp, Oryza sativa
agcatatggtttggtaatggcctcaataaagctgaaacattatttccatgcccatagaatcatagtgcgttcgcaatacccaataggcgaagtgcttaggggcaaagaaatcactgggcgattgagcaagtgggcatttgagctatctcccttcgacctacactttcttgcaagtctcaagttctggctgacttcttagccgaatggactctagccttcttccccgaacctgagccgatcaaccaaccatgggtaatgtactctgacggcttatggtctcacaaggggtgggagttgccatgatcctaacttcgctaggaggcatgccgatccgctatgctgcccaactgcagttcgacacaacgaacaataccatagagtatgaagctgtgttgatgggcctgaggaaggcgaaagctctaggcgtttggcatttgctgattcgcacgaattccaagctagtggcaagccaggttgataaatcttttgaggtgaaagacgacactatgaaaaaatatttggaggcagttcgctccatggaaaaatacttcactggaataacgttcgaacatttacctagagggcataataaagaggcaga

SEQ ID NO: 16849 - DNA, 696 bp, Oryza sativa
catcgactccttcactgcggcctggaggtacggaaggttcaccacatcggcctccgtgatcgtcccattgcctccaagtgcggccttcatctctgctcgcgtggtggccatcacattagggttgcgcagcagttctgccatggcccactccaccgtgatcttggtcgtctcggtccctgctgcaaggatgtcaaacaaaaggattttcacgtcacggcgagagagcttgccggtggacatgagcacaaggagagagtccagcacatccttgcactggtcgtcggtgccctgggctaaacggcagtcaattatgctgtccaggatatggaggactcgactcatgtgtatggccgtccagtggcgaatgccttgcaaatctagcggccggagcagcgggaagaaatcggacgcgttcggcttcgcaagtattgcaacgatatcctccataagatcccttaaattggggtgggcatcgacggagagaagcacgttcgccaggaggtcgaacatgccatggtacaggacctggccgatatcaacctcctgcccagcgcggcgacggaagctgtccaccatgtcgtgcaccttacgctcgcgggcgctgcgcgccacgccgagactgcgtggcgagaagacgtgcgttaccgcgatgctgcgcagggtcttccatagaggatcgtagctcggcagccaaac

SEQ ID NO: 16850 - DNA, 604 bp, Oryza sativa
atggggagcgtcgcctcctcgtctacggcgacggcagcgcgccccagggcgcgctccaagctgcgggcgcgctcctgcgtcacccgcctgtcgtccctgacctggagtctccagcccaacgatgactggacgacgtggccaacttggtcatgacggcacagcggcgcctaggtgctggtggttggtcctccgccaccaagacctctggcgctgctaccaccggctccgtgtcgtcaaggcggagggcgcgacgagcggcggctgttgctcgccattcggctgccactccctcgtcagcgcctccgacccgggaagatcagcgtggggggccagatgcccgcatcgatatcgagcgccggcgtaatggtcggcgtgctccccacgcaacggagggcgcctcctcgtccggagagtcacctcaacacagacgcggggatcagccctccgtgcccccggttggtggtgtcggctgtagagcctttgtggcgagccttcggaacgtccgttggcccccaaggttccggcccaccatcgccgaaaaatatgacgggagcgtcaaccccgccgagtttctccaggtctacacgaccgggatcgaggccgc

SEQ ID NO: 16851 - DNA, 1594 bp, Oryza sativa
ccaccgaggtgaacctgatttccaggtttagccctttgcacatctctctgaacttgtcggagtcgaattgcttaccattgtcagtgataaattcctttggcactccgaaacggcaaacaatgtttttccatacaaatttctgtactgctgccgaagtgattgccccaagcggttcagcttcgatccaacgggagaagtattcgattgctacaattgtaaacttgtacccatttcgtgctaccgggaaagggctgatgatgtctaacccccatctggcgaaaggctagactggtgcgataggttgcagctcataatgggatgctgcttggcttcggctataccgctgacagctttcgtacttcttagcttgctcaacacaaactttcagcacggtgggccaatacaccccctggtgaaacactttggaagcaaccgttcttgcggcttgatgagcaccgcacagccccttgtgtatttctttcgccatttcctcgccttcggcaaaggagatgcagtgaagcaggggttggagcaccccggtgcgatacagctgccctgagaccaacttgtatcttgcggctctgagttgtaggcgcttcgcttctgcttcgtcctccgggagccaaccgttcttgaggtactttatgaacggtgtttgccagtcttcagggtcttcgcccagttctgcctggtcgattgccatgatgtccaggctctctgtgggcacaattggtgtgtacaagacttcaaagatgatgcctggcgaatgtgggcctccacaagcagcggatttcgctagggcgtctgcttccttggtctggcctctaggtaagtgttagaccgttatgccggtgaaacacttttccatagatcgaacaacctccagatacctcttcattccttcttcttttggtcaaaaagattgtcaacatgacttgcctccagcttggagtctgttccgatgagcaagcgtcgaacccccactgctttcgcctttcttaggcccacaagtacagcttcgtattctgccgtgttgttggtcgtgtcgaactgcagccttgcagcgtaccgaatcggcaggccccctggggaagcgacaactgctacggcgctcgcccccttgtgcgaccacgagccgtccgagtacatcacccaaggttgtttggcaggctcgggtttaggggcgaatgctggcgtccattcggccacaaagtcggctaggatttgggacttgatggcagtacgggcgacaaaatgcaggtcgaagggagataactccgccgcccacttgctgagccggccagtaatttccttgccccggagcacttcgcccaaaggatactgtaatggcacagtgactttgtgggcctgaaagtagtgtttaagcttgcgcgaagccatcactagggcgtaagcaagcttttccatttcaatgtatcttattttcgccccttgcaaagcttcggagacgaaatacactggtttctggcctgactctgtctcttggatgaggattgcattgaccgccactggcgaagctgctagatagagtagcagatcgcttcccggtgctgggctgaccaaatcgggtggg

SEQ ID NO: 16852 - DNA, 509 bp, Oryza sativa
cgaacgtgttgacgcgcgagcgctgtcgagaagagtgggtggcggttgcaacaagttccgcaggcttacgcttgcggtccttattgttgttacttccacctcctcccggagccggcgtacccttgtttggcttccaactgggacccgactgctttgatgcggtgacgacgtcttcagctttggcgtactcgttggctttttcaaacataagcttgactgtcctgggaggcttacgcccgaacttgccgaccaattcttcgtggcgaatccctttggtgaatgcggcgatgataacgtcgtcggtgatgtcggagatcttgttacgttgttcagaaaatcgccggatgtaatctcgaagggattctccggacttctgaataacgttgtagaggtcgtattgtgtgccgggacgctcgaaggtgccttggaagttggcgatgaaatggtcgcgtaattcggcccaagatccaattgtaccacggggcaatccatggagccaagatcgggcg

SEQ ID NO: 16853 - DNA, 15087 bp, Oryza sativa
atttgtgatgaattttgtagaagttgtgatgtaattttttaaagattttgttatgtatttagagattgatttgagaatttagagactattcggggatgattgatttgggattttgggatgagatagagtgaatcaatatattaaaaacaatgaagaaaagaatagaataaagtagcagcctgagctagcctctttagtctagaaatggatttttactcccggtttttttcacccgggactaaagatagcgatctttagtcccgaattcatagtcccggttagaaaaccgggactacatgggggttacgaactgggagtaaagcccctttctccaccagtgaaataaaactattccttaaggaacatttgccaactaacaaaatttgctatgttgttttcaaagataaccctattttggtgtgcactggactatgggggcatcctgctaaagctggaggagtgctctgtaattgctatgttgttttcatatgttggcagcggttggtccgagcttgttttctcctgatcactttgcaagtcgagctcagtgtcaggacgaaagttcgtctcgccttgatactcgtccatggacacttggtcatgggactctgcttgctcatcactcgacgcgcactcgttggacgtgcatgttgacggtcattattgatcagtttcgaccgtcaatattactaaaatagaggagaactagtgatgcttgcaatgcatatatttgttagaataataatattccagtagtattaggtatactaaccttttgcagagaatgacaataaagtggaggagaatcgatatcaactcaggcgataaatcaatcggacgatgtcgagaatcagacttatgcatgaataggccaagaactcagaattaacacgtcaaattgggtcccaaaattcacaagtctacataaagtagcaacagaggaggccgccagccgaaaggtgggctggttgggccgggcctaacctccctcgcctccgttggatccaggttttggctggacggttgagatgaagccccaatgatggttggagggtattaccgaccattccaaccgtcacaaccatcatagttcagctgtaaaaggagctcctcttctcacttcactcacacacctcaagcaatagctctctcatttctttcaaatttagtttagtagtatctagctggtggaataggaatagaatagaaatcaggagtccggaagccttcagaagagttcgggtatggttctagtagctttcctcttctcttttgtaagctttgtacttttattataatactcttctatatacatttatggtattgaaataatttccgagtatatgaatgcctactttacattatgttcatgttatactgaatatacggcaagcttctctgggagaagctttggtgcgggtataatgtttgcacatgcaattactctatgtcatgacgataatattagagtagtatctggtagtttagacgtggtgtctagattacgggatatcattattcggggttatatattgcggatgagaggcgggctgctgatggtgacagctcagtacaagtattcctccgcgtcagtatataatcctaagttaattccctggggagggtattcctccgtatttagccccggttgtatggtcatgacgggttgtcgtaaggaactcggcagtcaggggtggcttctcgaagtaccgggagggcatcggatagagggtattagctagtatatcggttaactagaatgtatgtatactatgtatattataagtatatgaatagattttctttctcttttctttccacttagcttagataatatattatgagaataagtagttaatgcttgtgtgtcactctacccttggattatttttaacccctgcttagaatatgattatcacaagtaatatataaattattagtcaagttctctctacatgatcttcccacgggataaaataaatacgataccttagaatactctcgggtgaaatgctacgatgatatatccatgtgcttgcagatgaactctgtaaccataatataccaggagtattttcgcaccattgttgggaattatatttctagtaatgttgttaagaaataccaacaagcatttttggcgccgttgcggggaagattcataatagagattacctgaactaatactttatatttacctctatataatcattttcctttgcaggctaaccttggttgttttcactttttattgtgaaaacagggtagtgcatgactagtttcaacttgccggaaaactttaaagaaaatccagaagctttcttctggagcgtcagtccgcgagtcgctgctccgcagaaaaatctaccgacagagaaaccagtcgtaccagcgccaccaaccttcaagactatggctaacaagactctccgcgagttcgctgctccctttgctgacaatgtggccattgggccgcagatcaacatgggagacgtggattttgacttgaagtccagcctcatcataatggcgcaggctagcccattctgtggcaagcctaatgaggatgccaatgctcatctgcaacagttcctggagatctatagcatgtacaccatcaagggcgtcagtcccaacgccgtcaggctgtggctgtttccgttctcctttctcgggagagcgaagcagtggttctatgccaatcgtgctgctgtcaatacctgggacaaatgctctacggcattcctctcgaaattcttcccgatgggcaaaaccaatgcccttcgtggaaggatttcaagtttctagcagacaagggacgagtctattccggaagcatgggaacgactgcaggagtatgtagccgcctgtcctcatcatgggatggacgactggctgatcctgcagaacttttataatagactcaccccgatgtcccgcgatcacctagacgcggtagctggaggagctttcttctctaaaacggttcaaggagccgttgatttaatagagaagatggtctcaaatatgggttggagcgaggaacgactccagacccgtcagcaaggcatgcacaccgtcaaagagacggaattacttgctgccaagctggacttcctcatgaagcgattggacgaccacaagaaacggccacaaggcaccgtcaaggccttagactctcacgtcacgtgtgaggtctgcggcggcacgggtcattctgggaatgactgcccggaaacctgtgaggaggcgatgtacatgggcaacaacaacgggtaccgtccacaaggaggtcagcggtggagccaaccacatccatattatcaaggaggtaacaacaacggtaacttttctaaccagccctcttcgagggatctagtttttacataggctaaaaccactgatgcgctaagcaaaaagcttgcagccaataacaagatcctagaaaacataaatgtcaaattagatggctttgcttctacttttttcgcgctgtgatgcaccccatctcccaaagtgttgaccctaccgagcactggggatctgggtggaggctataattcaatagtggtgtcattgcccttgcctactttatcttacgtgagcaaagaaagtttaggggacaaggcgaatatgaagttgtatgtaaaaaataaaatcattaaaataattgattcgatagtgtcaaattgatttaacagtccaatatgatttaggtgccattgaaactagtgacacttttagtactcccttcgtcccaaaataaacgcatatatgaggaaactgggtttcctgttcaactttaatcgttcgtcttatttaaaaaaatagattggaatttgtattgatattagattataaaatatgaatagtgttttatgcttgacttatgtttttatttttttaaaaaaataaataagataaacaattaaagctggacacgaaaactcatggctgcgcttattttgggacggatggagtaattaatctactcccttcaacccacaatatagtattctagttacctccaacccacaatatagtattttataactagatgagacatcatctgaaattacatatgtgatgtacccacttcgtcccataaaaaaacaacttagtaccggatatgacgcatcctatcacaatttgaattgatgcccgtgcatatacatagtattaggatgtgtcacatcttatcctaaatttattttttattggacatggaagtatgtgaataggctttaccattctactatggccttgtttagttcccacgtaaaaacatttcactatgtcacatcgaatgtttggacacatgtatgaagtattaaatatagacaaaaataaaaactaattatacagattgcgtgtaaattgcgagacgaatcttctaaacctaattgctccatgatttgacaatgtggtgctacagcaaacattttctaatgacatattaattaggcttaataaattcgtctcgcagtttacagcaaatttgtaatttgttttgttattagtatacgtttaatacttcaaacgtgtgtccgtatatccgatgtgacacactaaaacttttcacccctggatctaaacatagcctatgtatgtagacagatctgtccatatatgtagtactccctccgtccctaaatataagggattttggtttcatatgacataagtctatttagattcgttgtattagtatatgtcacatctcaccaaaatcttttatatttaggaacagagggagtattagattatatcgagttgacatgtgacagagagagtacaatagtggcattttaatgtttactctatctgtcatatatatgatacattctaataatatgaatctatatatatctctggctgtgtttagttcagcgcaaagtttgaattttggttgaaattggagatgatgtgactgaaaaattgtgtgtgtatgacaggttgatgtgatggaaaaggactgaaaatttgttatactagaatgtatcatatccgatccaaggtttttttttaatggagggagtagttcagtaattgaggccatctaaaccagagggtagggtggattgaaatcctctgccttcaaagacacaatgtctttgtcactgacagatagccccatagtttattgggcccacatgccagtgacaaaggtagtgtttagattcagggactaaaaactaattacatgaatgagagctaattcacgtgacaatttttaagcctaattaatccataattaatacatgtttactgtagcatcatatatgctaatcatggattaattaatcccaatagattcgtctcgtaaattagttcagagttatgaaatgagttttatcaatagtctatgtttaatacttctaattagcgtcaaacatcgatgtgaaagagaaacaatttttagtttcatccgaacagccccaaatgcacataaatttgaagttaggctgtgttcgcatgagtgggatggaaacttgttagctccgctcgaaaaatgaagcgatccattagcacgtaattaattaagtattagctaatttttttaaaaaaaatggattattttaatttttcaaagcaactttcgtatataaactttttttaaaaaaaacacaacgtttagcagtttgaaaaacgtgcatgtaaaaaagagaaagaggggttggtaacaagggttgcaaacacaggcttagagtagcctgatccgttcttgtcagtcttccccttccccagctctccatcgaatcgtagcttgttgaaggtggaagatggaggccgcgcttctgagcggattcatcaaggccatcctgccgaggctcttctccctcgtcaacgacaagctcaatctgcacaagggcgtcaagggcgacatcgatttcctcatcaaggagctccgcatgatcgtcggcgccatcgacgacgacctctccgtcgaacatggcgccgccgccgccgccgccgccgtatctccatcgaatcgtagcttgttgaaggtggaagatggaggccgcgcttctgagcggattcatcaaggccatcctgccgaggctcttctccctcgtcaacgacaagctcaatctgcacaagggcgtcaagggcgacatcgatttcctcatcaaggagctccgcatgatcgtcggcgccatcgacgacgacctctccgtcgaacatggcgccgccgccgccgccgccgccgtacagacgctatgcatggaggacctccgcgagctcgcccacggcatcgaggactgcatcgacggcgtcctgtaccgcgccgccagggagcagcggcgctcttcgtcgcttctcccccgcacggtccgggcaaccaagaagttgctacagacaaaccagcatctggcccaggagttgcagcggctgaagaggatggtggaggaggcgaaccagcggaagcagaggtacacggcggcggcgcccggtcaacacggtcaggtctactcatcggctgcggcgcaggtggatgagccgtggccgtcgtgctcatctgcctcagatccgcgcatccacgaggcggacctggtcggcgtcgacgcggaccgggcggagctccttgagcagctggcggagcggcagccggagcagctcaaggtgatcgccatcgtcgggttctgcgggctggggaagaccgccctcgccgcggaggcgtacaaccgagagacccgcggcgggagattcgagaggcacgcgtgggtttgcgccgcgcaccggagtgcacgggaggtgctcggcgaattgctccgcaggattgacgccgcttgccatggggactccgatgctggccagctgtgtgtagatatcagacaacagttggagaagaagaggtgaaaaatctcaactttctgcttgaattgcctgatccatttttcacatgaatttgaggtcaacattttagtcaactcgcctgttcttttgcacaagttcagtgcgactgacactttcaatagcaaagtgaatcatgaacagatactatatcttgctaactgctaggtgttagctgcactaatttagtcatcaaatgcatacagtgcatttctcatgcgctttatcttttacaaatttactataatagaataaaaatggaaaaaacaattcactgcttctaaattgctctaccgtatgaaattatacaaattattcgtttcaatttgttgattactgtggctccagatggggatgtttacaattattctttcttgatctgcctcgtcttgcaggtacttcattgttatcgatgacattcaaacagaagatcagtggaaaagcatcaaatcggcttttccgactgataaggatattggcagcagaatagtggtcacgacgaccatccagtcagtagctaatgcctgctgttctgcgaatgggtatttgcacaaaatgagcaggcttgataagaactgctcaaagcaattgttgtccaagaaagcttgcccagagaggtattcacattacaagcagccagattcagcagcaattttgaagaaatgtgatggccagccacttgctcttgttaccataggtgaattcctgcaagctaatggctggccaacggggcctaactgtgaagatctctgcaatcggctacattatcacctagagaatgataaaacacttgaaaggatgcggcgagtgctggtccgcaactacactagtctacctggccatgctctcaaggcctgcttactatattttggtatgttcccatctgatcatccaatcaggaggaaaagtctgttgaggcgatggctggccgagggatttgtagaaccagtgtcttcatctagtaacctagattccacggctgctttcgatgtgctaatggaccggaacattattgagcccatcaatgtaagcaataatgataaagtcaagacatgccaaacgtacggtatgatgcgtgaattcatatcgcatatgtcaatctctcagaactttgtcacctttttctgtgatgacaagttcctgcccaaatatgttcgtcggctttctctccatggtgacactgttgtgaatggcgataacttcaacggtattgatttatcacttgtacggtctctggtagtctttggggaggcaggtacaactgtattagacttcagcaagtatcaattgctgcgagttttagatcttgaaaaatgtgatgatttgaacgatgatcatctcaaagaaatatgcaatctggtgcttctgaaatatctgagccttgggggtaatatctccaaacttccaaaggatattgccaaattgaaagatttggaggcactcgatgtaaggagatcgaaagtaaagataatgccggtagaagtcttcgggttgccatgcctaattcatctgcttggaaaatttaagctctcagataaagtcaagcagaagactgaagtgcaagagtttctctcgaaaggaaaaagcaacttgcagacgctagcaggatttgctagcaacggaagcgaagggtttctgcatcttatgaggtacatgaataagttgagaaagttgaagatttggtgtacgtcgtctgcaggtagcaccgattggactgatcttagggaggccattcaacagttcattctggatgaaaaggaagcaaatattggtacccgttctttatcgcttcatttcactggatgctctgaagatgcgataaattccttaaaagaaccctgctacctcagctcgttgaaattacatggcaacttcccccaattgcctcagtttgttacatcacttcgtggtctcaaggagctttgcctttcatctactaaatttacaacaggccttcttgaagccttgagtaatttgagctacttgcagtatctcaaactggttgccgatgaacttgagaagttcatcataaaagttcaggggttccccaggctgctatgcctttgtattgtgctacaatgtccaacattcccagtaattgaagaaggagctctgccatttcttgtcacacttcagctgctatgcaaagatctacatggcctttctgacatcaaaattgaatgttttaaacatcttcaggaggtaactcttcattctggagtcactccagctacaagacaggaatgggtaaaggctgctaaggagcatccgaataggccaaaagtattgcttctcaaatctgttgatacagcagaaagtgaacatacagacgttgatagtgtaatggaggcagtcaaaagtgagactacagaatattctattgcaccagagggaccagaacaagtgattgacatgaacaacaaaatgcaacttgaccatggattggaatcctcttctgtgctgaacaaacaaaacaattttgcagaccaatcaagctcaaaagatcaactgcattattctttcaacaatatggggctttcagatgtctctcctgctgtgagtgagctgccgaatggcatggtgccttcttgtacatgacaaggatctagaatcttcacgtggcttcccggtcagttatttggacctgttgctttctgattgtgcattttgtgtttacttgtccttcacacaatcatcgtcatcaaaatacctttgatttcctacactccctgttacctcccttgatgaaatcagggggattcatgggcacagctacatgttctgtctgcattttgtatagtgacgtggcatacctagtacttgttttgtctccatcctgtttggcagagcaacaggttgtaataaatcttggttctaactggctgccctcagaatatgttgtctatagaatccacctgatagggaattcggccgtttgataatcctttatttttaagtctattgtttgtcctgagtatatttatgatggttttggtttgaggagcgcagtgaaatcatgatggaatggcctagtatgggatgatgctttgatggatggaatgatttgacgaatggaatggttttgcactttgtttggttcaaaaaaatgacaacattgaatgtgaacacaaatacaaaatttgttaaaaaaacgaagcatgaggtgcggagtgttatagcaacgagagttcagttccctgttgtatcatcaaagaggaattgaataaaacttataattttctgtgtcgaacacatgattggagagtggaaacaatgttttctccaatattttgttatatcatgattacaagtacaaaaggagatggaatctgtaagaacatttatttcgagatgagaatctctttcataggatcttatttcttgtagctaagaagcataaatgataaggctcatacatctcggttgctccagtgcctctcccaaactgacgaccatgttggaaagggagagatctggtattttaaataggatgttagaaccagaacaatgtcaatgcaattatacatttttagcttgaattatagccataccttgtctacaagggagtatggtgctcctcaactgagcatattgacaatttcccctatagaaggcctgtccttccggttggtctgaacacagctcagtccaatttcaatgcatgtctttacctgctggaggcaatttgtgtctaacgatgggtacttcagtgatatatgcacaatattggtccgatttcggcgtacctataaacaacgacagcacacaaacttatatataacattattctaaaagaactccttagtatgaaaacagtaaatttgttctaaaactggtacagtcattatttttgccttacattctcaatgaagttcttagcaatgatgtcctctctattggggaagtttttctcccctgttgtgatctcgataattagaagacctaaactgtatatatctgattgagtggagatttcacctcgatataaatattccggtgccatgtatcctctgtataatatcagcatcaatagttggaggattatgtgactaatgcaaatgaaattcaccttgtaggaaaactacaaaacaatagacattggaatgtgtttggtgacttacattgctcccatgacattttgtgtgcaaactctggtttgttcttcacccaagagccttgatagaccaaaatctgcaatttttggcaccatgttgtcatccaatagtatgttgctaggtttaatatccaaatgaataataggtctttctgatcctttgtgtaggaaatgcaaaccctcacaaacccccttaattatattgaagcgtgtgtgccaatcaagtcgacttgattcacctgaagaagcaattatggaaaacaaataacattaggattaatcgtattacttactaattgccaaaaaacacaaggaattttcatgagcccacaacctagtgagagcttgatcttcttacctttttgacttattgtatacttcagtagaacctagagtaggctacatcatgctaatatctaaatcttgtaaacattgcaaacagggaaaatgactggaaatatttaggtattgcattatcataccgaaaaggtgtttgtcaaggcttccattagatatatattcatagcacagcagtttttctactgcctctgtaagaatatattttccattatgctccaccaccttcttttgtatttcataacagtagccaattaacttgactatatttctgtggttgaccttcataagactcccaacctcatttttaaattgattgtcatgaatcggtgatgtttcccgaagcttcttcgcagcaatttctgtcccatctttaagcattccctgttaagtcccccatacaaaattgacatcttttctgtgaacttttgaaaatgctgagaataagggcctgttcagattgtagccaaaataaaccttacaaaattttggtaagatggcaatattgccaaaattttggcaggatttcttatgtatttaccaaatttggcaacaaacattcattttttagcaactttgcaaaaaaaaaaatgtgtggctgaaaatggcatcaaagtgaacaggccctaaaactacaaaaatcttaccttatacactattccaaatgcaccttcaccaacttttcgctcatcagagaactcattagtgatttccttcagaaattgtgatgatagctcaggtgtcggtatttccatttctgattattgagcactaacccaataatagaaaactagagtcacaagcaaaataacacaaagctaagaaaacagagaaaaaaattacaattgtttgagacatagaaatatatgatttctcagtattatgtgaaagctgcttctgagtacccttcatgcttcagtagtcagtatggcttttctgatattgttgctagctggtgtttcgtagttcataaatattagtctcacagatattgaacagaaacaacttttgaatgcactagcattgagtagtcagtatggcttttgtgatatattgttgctaactggtgtttcataattcatattactgttattcaaactaacaagctttcaaattcaaataaaaacaagggtttctcacatactgagtcaggatgagctttcctcaaaacacacacacacatggacatacctaaagaagtaaagaacggtgtaatgtttcttagcctttgaacagaagcagcttttgaatgcactaacctggagaagctttgcagctgcagaggtgctagctgctgctcacacaacaaccaaaggacgcagcagggcagaggagatgaacggatttcttctccagggaagagaaggggggggggggggtgtgaatactgggtaagcaggagctgaaatgaagcatcagcagtacaacttggcaatagttgacttgactccaatattagatggatgtgaaatggtgaatatgatatgcctggtgtattttatgagtatacagacaagttgtttagtcaatggtcaatgatggttccattaagaggctgtgtttagttcatcgcaaagtttggattttggttgaaattggagatgatgtgactgaaaagttgtgtgtatgacaggttaatgtgatggaaaaggactgaagtttagatctaaacacagccagagtttagtggcacttaagttttggatatgatgtcctattgtcgtgacagcacatgctacaattactattttttagggggtggggtggggggtggggttgttgttgttgttatcatgttccatatgcgttaatgaattaaaaaggtgccatgttattttttctaccgaaaacctgaaatgtggagccgattttgatgtataaatttatgaaattttgattataaatagtatgatgaactgtactatatgaactaaataaacttctccctttgttcataaatacacaatgtttgatttattttatagttttaaaaatacaactttggccataattatatattagaatatgtttatataaactagtaaattcatgatatctgacactactttttgtgacgacttcacacgtgtaagctgatgatcttcttatcaattggggatcctaccgagtcattagagaagaagaatggggtccaaaatgaaacacaaggaaaaaaaattgatggtataaagtgaaaagattagttaaggtggtgtttggattcagtgacttactttagtctctgtatttagacactaatttagagtattaaatatagactatttataaaactaattacataaatgaaagctaatttgcgagacaaattttttaagcctaattaatccataattagagaatatttactgtagcatcacataggttaatcatggattaattaggctcaatagattcgtctcgcgaattagtccaagattatggatgggttttattaatatactacatttaatatttataattagtgtccaaatatccgatgtgatagggactaaaagttttagtcccatctaaacagggtataagacgtattccaaattaaaactttggtaaccattctgcaatttactttagaacttcctgatgttcgaagttgtaaaagtttgaccaaatcttatcaaacattgaaatatttataatcaaatggagttgcactaagactaagtatgtatttatagtactttctccatcccataatatgacaatctagtattggatcagaaataatatttcatagtacaacgaattcggatatgctttttatctagattcgttcggatatgctttttatctagattcgttgtactatgaagtactccctccgtcctaaaaaaagagaaaccctaggtttcagtgtccaacgtttgactgtccgtcttatatgaattttttttataattagtattttcattgttgttagatgataaaacatgattaatactttatgcgtgacttgtctttttaatttttttcataattttttaaaacaagacggacggtcaaatgttggtcacggaaacccatgtttgtttttttagaacggagggagtatttcattatattagattgctgtactacgggacggtgggagtaggttttaggggtactacgaaaggcttccagttcagcacagttgctagctgacaaatcaaagggttcttgctccatgaagggagatgttgcaagttgcaacagtgggtttcagactgagcagcacagggaagctcacacgctggggacaccacacaccccacgggccatggttttctagtcttcttctgcagggatgtggattccgggtcaatggccaagccaacctgcgagctcctgctcgagagtagccgtagtaatcagttcccaagggaagtcaacggagtcatcgaggcgacgaggtgggattaatttgtttatggcgcgaggcaaggaaacaaagggcgcgaacgcgtgagaatcttgtgctccgatctagtagtagtagtatcagcttgtttgcgaggacccaagcgaggtcaaaggaggggggaggccgccattggagaggctcgctctgcatcgttgccaggtacgtacgggcgcgacgaatgcttgatcttcttggttgcctaaccatcgatttttttctttgttgatttgttttggttggattgatctgtcgcttatattgcgcccgcagtgtgcttgattgagctgctcgtttccatttctgctgaaatggagatgaaactgtaggaaaaaaaaaaaag

SEQ ID NO: 16854 - DNA, 1460 bp, Oryza sativa
caaacaggaaagctgacacaagccatcagggagtttggtgcagcaaggcaggccatccaacttaagactcgtcaatctatcaagcctcacagatgcttttgatgtcatccactttgggagctgccaaccaaaatatcctctgatgtaaagttgttctaagcagtatgaagggcacaactcatcaaaaacctccttgattcgtcgctgctcgtctatagaaatgattccttcctctttcaagaatccatcatctctctgcctatcagtgcactctaaccaccatatggcaagatgtttcttggcaccaagcatggcctttgcagcggaagagctggcagatacattctccaaaccctttatatggagatccctgagctgagaaagaggtcccagctcctccaaactacaccactcatcttttgatgaactgctacccatctgagctggaaacgagtataatgttctcaaacttgtaaggcgaccaaaacccctaggtatactttttatgtttgtgcccataaggttaagagatcttagccgctctagttttataatgctaccaggaagttgttgtatttgttcacagcatgtaatcccaatgtactccaagaatttcatcttgccgatgccatctggcaggctacgtatgtcagtacgggaaaagtacaagtgcctcaagttcttcaattggcatagagaatcaaaagtagcaagttgtgcatatactatactcagaacccttaagtttgagaatttgctgcataaatcattggccttcaacttgatatgagtacttccataaaaaaataacgttctaactgagttttgttcttgccatgcactccaatctaattcattctgtatgcacaaccaacgatatctatttgaatcgaggtcagtgactctaagatgttccatatgaaagggtagtgcttcatctttagccacatgtcgacaaaatgagcgaaccacatcatgcatggtccaattattattgtcgccggcattgtctgtaaaaggttccttatgattaactcattgtaatactcctttcctagttcttccggttcatttgattttccattaacaaaaccttcactaatccatacttcaacaatcaaatgtttattgggtttaccatatttagggaagagtgagcaatacaaaaggcattgcttcaaatgagggtctaggtcatcgtagcttaaatatattgcatggtttatctcttcaggcattccatccactaaccatgaaggacttcttagtacctttccccactcaatttcatttatctctttgtggttcaaaagccctgcaatcgctttgatagctagcggtaaaccaccacatctttctaaaattctaaagccagtactctttagcttctcaatcgcatactcatctttcaaagttgaagcaatctgcaagcggttgaagcccatgatgttaatacatat

SEQ ID NO: 16855 - DNA, 12587 bp, Oryza sativa
ttttgctatataattatagcatttgggtgcaatccaccggtgcagtttgcgcgccatctaaataccttataatctaacaacaaatattatattactatgaatcattctacattctacaaacatgcatagctaaattaaatatatagtatcgaaataaaaatttaaaaaatacatattcaatttgctaaaagaaaaagaaataattcaacaatataggtcgcagcatgatatgtttgaaaacatgtatagctaaacacactacataagcaagagtaactaactgaaatataaatagtctgagccactatataaaaaatcgagtgccttttagtagagaaaatattaagttttttttctaaatgtgctcaaataatccaaacaagctaaatgatcttctatttaatattccacctttataagtttctcaaacacggtctacgattcatgcccgcgcgaatgcgtgggctaccttccttgtttgataaaaagtatattttgctgtgacatattatgatattattttcttctgcccaaagcaaagcttgggtattttgctagtgtgtacagtgtgttacttttaatgaaactgcaaatacatgttaatgttggaaagtgctttcatggatattaattaagaatatattttatgagtaatcaagtcaaaggttaatcttgaagactttaccaatacataataggattttctacagagggaataattaccaaaataaatactctgaggcaggagtaagaaataaatacgaacctgtttcttgagtaacaaccaggcatcttgccgagataatatgtccacgcggtggtacggctgtatggccttcatctctcgggcaactctttcgtctctggtggtgatgagaacccagctgccttgagcagccgagttaactaaagggattcttaatgaattgttccaagcatggacgctccacatatcatccatcaccaaaaagattttctttccagatattgcttctcgaaggattggctgaagcagggacagttcttgatgcccactgtgctcaccaccggcaccagtgatggccgtcctcaccagctcaggatcactgaattcctggttaatgctcagccatattattttgtcgaacttctccttgatgtcctggtggttgaagatgttctgtgcgagggtagttttaccaatacctccaacaccgacgatggcaacgaccctgacgttgctgctgatactcgccgcacttgcctcttcctcctccctcgttagcaactccaccagtctccttgtatcttgctcgatcttattcccgacaacgcctgaccgatcaagctctggtgttgtccggcgtaagccatggccttgagctgtcctgctgcagtcaccgtagcgatcgagcttgatgaagctgaattgctcggcacgctgcttgatgccatcaagccgctggttcagcgccatgatgcggcttccaatgtggtgggcgttcaagggattccgcagggagagtagcgacgggttgttgctgcgcctactgtcctgatccatggctttgagctgacacagctccaggatgtccgtggcatcgtacatggcatccttgagctccttcacccaaccctgcacgtgcagatcggtgatgcgcctccgctccgcgtcggcgaggaactccttgagcccatcaagcctgacgcggaggctgtcgatcttgtcagagataccaagcagcatgcccacctccttcctcgccatcttggcaagcacattgctcaggttggatgccaaggcctccagaaccacagccatcaaggctgaacgagtagtgcttctgcatctcagatttaaccagcttgtcagtttttacatacatatatagcaataaaacagaaaaggtgctctaaaggattgtgtacctggctttaattagtatgcaacttctccgatcctgttcagaaccaagtagattgatgaaatggaatggtggcacagagctcaatatatacacatattgagccatttttaattaatacaatctattttctaaccctactcaatggctttcctaatcctgacagcaatgtggatgcaggacacctcacgcgagcagccacgtattagattatcaagaatcttagtcaacaacgaaaaggggatcaaatttcaagcgaactgattgttgtctccatccatattgtggagatatctaagaatatgccatctcctaacaactaaacaaaactgatttcaaacaaaactgttgacgcaagttaaattgtactgaaataaaccatctctgcactgcactaggaagttgccgcgtcactttccacttccaacaaaataatctcagatgttctgctgtaaacatatctgtttctttaatagaaatgggagggggtaacatctatagttaaaaaaactaaataatctcaggtggctgcatcagcatcaaccttcacttttagattagcttatcacaatgtgttgactcgggacttctcaatatttttggtcacagtttgttggaacattgcaatcagtgttctgctcttctagcccatgaatctcggccacaactacgccataaaattatcatacatgctgtgaagtttgtacatgacacagaaattccaatgtacctatgtcaaataaatctatcaagaaactaatggggtcgctgctctcccttggagaatcagtagatggaaaaactcttctttttttttctttgaacgaaacatacaaactgttatgtggcaagaatatttcctggtattggatttttttttcttcaatatttcctgctattggatttgtctgacagaacatttgatggttgatataagtatcaaatacatgtgcttcattctttgcccaactaaaggtgccttctctgactggtgcgaattattagtgctaagctattaccaacaaaatttcaatcagagaatcacaatggttttgtttcgataatgggaataaaagctcaatgaacaatgatgtttccatgtttcatatattgcttcagtagttcaaatgtgtcaagataggaaatatcgtagatccaacaaaaaaaaaaggtgcagatttcctaggaaataaaaaaatgaaacaaaattgaaaaaaaatacattaccctgccatgacgtcaccgatggagctgctgccgcttcagctacccttggtgcagagcaaggcaacgcggacgcagctcacccccactatccagcacacgctgggatccccaatccaggcctcaggctgctcatctgcattgccccacggccgcagccgttcctgcagtgttgggagagagatggggaataaccccgcacgagttcaccatggagagcaccacactgcggaaatacgaccacctgctgagggatgactatcttatcggcgccgatggccatctccggctgcctctcctgccgaagtggtttttgctgctgcggatctggaggtggaagaagacccaggggcgaaaatgacattctgggcttgttcactttattgctaaaatcgaccttacctaaattcgacatctttctaaattttgatagtgttttaatgagaggaaacttttgaaactatcaaattttggtagaattccattggtaagatcatgtgtagtttgtaaccttaacgaaatttggtaacacaaaaatttggtaggattgaacataacaataaaatgaacatgcctttcatattagtgttccacgttgatgcgtcttatacgtaggtggaacaaaattaaaagagtcttgtctctctagcgacaatttccttaaaaaaatgagcaattctacggtccttgaggaggtaccatgaggtaccaaaaaaattagtgtaaattatgaggtaccatgaggtaccaaatttacaatagaaaaattggtacctcctcaaggaccgtaaaattgctctaaaaaaattattagggacaaatcttataatggcatttggagattggccacttgagttgcaaatagttaaatttcccctcaaatgcaatatatgtcatgaaaaatcatgaagaaaaaaaaaagaagaccatatagcgtagtgacatatatcatctcaccaaatttctattgtataatcaattgagcaatgagaagaaaaattcggatgcatataatatttgtattgcttatatctcggatttgtctctcatattttttagatgttacgttcgagttgagtttagacttgaacatttgaacatttaagatggtatacatttcctagctaaatgatatcaaatgttttaaaagttgtatctaattagttactatgtatttagaggtacaagggagatctgtcaagttctccgggaatggaaacttatacttctattcatacaatatgtgacggtatcacatactatagtatttcttctaggaatcacatattatagtatttcttctaggagtacttcatatgtctttggttcaaagttcaaactagacaattgttcatacgggtgaaaacagatcggacattcgcttcgttcctaatccgtctgaaacaaggatatggtggggcttgtagaaattcggcgaatacgaacccggatacggatatataatatcctgttatgatccaagtagattgacaaaatggtttggtggcatcgagcaaaatatatagacgtatgagaactttctcaattcatacaatgcgcatgaaggacacatcgcgcgaccaggcacgtattatattatcacgagtcttggtcaacaaacaaaaaggatcaaatttcaagcagaactgattttcagttgtctccgtccatattgtagagatatctaacaatatgccatctcctagcaactaaacaaaacagatttcaaacaaaactgttgacgcaagtgaaattgtatagaaataaaccatctccgcactgtactaggaagttgccacatcaatttccacttccgactaaataatatcaggtgttctgctataaacttatttgtatccttaatagaaacgtacgggacggcaacctctctggtcaaaaaaataatctcaggtggctgcatcagcaaacttcactgttagaatagcttatcaacaatgtattgactcaggacatctcaatattttggatcacgggttgttggaacattgcaatcagtgtttttgttcttctaacccatgaagcttggccacaaactatgccatgaaattatcatacatgctgtgaagttcatacatgacaccggaattccaatgtacctatgtcaagtaaatctgtcaagacactagtgttctgaaactatcaaattttggtagaattccattggtaaagatcatggttaatttgttaccttaacgaaatttggtaacacaaaaaattggtaggattgaacgtggcaataaagtgaacatgcccttcatttccgtacgtgttccacattggtgcgtctacgtatcatgccatatatacgtatgttgaacaaagttaaagagccttatctctcttgtggcaaattacagggacaaatttaagaatggcatttggagagtggccacttgagttgcaaaaagttaaattttccctcaaatgcaatacgtgtcaagaaaaattgtaaagaaaaaaaatgaagagcatagagtgtacgtagtgacatatatcatcaaatttctatttcataatcaatttggatgtgaataatacttgtattgcttatatctcggatttgtctctccaatgttttgacattgcattcaagttgaattaagacttgaacatttaggatggtataccgtatacgtttcctagctaaatcaaactaaatgttataaaaattgtatatattgtttctatgtatttagaggaacgagggaagtacctcaagttctctagagatcaaaagttgtacttccgtccatgcagtatgtaacagtatcacatactatagattttcgcctaggagtacttcatagtatgtctttggttcaaaccagacaatttttcatataggtttaaatagatcagatattgtgtcctatccgctccactccgaatctgttcgaaatgaggatatggtggggcctgtagaaatctggtaaatatacaaatgctgatacggatagtttccagtttagatcgaagtaggttgatgaaatggtatggtggcaaagagctaaatacatacacatatgaaagcattttcaatttataaaatcacttttctatgcctactcaatgactagcaatgtgcatgtaggacagctcgtgcaagcaggtacgtattagattatcatgagtcttggacaacaaacaaaaggggatcaaatttcaagaactgattttcagttgtctccatccatattgtggagatatctaccaatataccatctcctagcaactaaacaaaactgatttcaaacaaaaattttgacgcaaatgaaattgtacagaaaaaaaccatctctgcactgcatgcactaggaagttgccacatcacttttcacttccaactaaataatctcaggtgttctgctgtaaaaatatatgtttctttaatagaaacggaagggggcaacctctctagttaataaaaactaaataatctcaggtggctgcatcagcatcaatttttcagttttagattagcttatcaccaatgtattgactctgaacatgtcgatatttagggtcacaggttgttggaacattgtaatcagtgttatgttcttctagcccacgaatcttggccccaaccctatgccatgaaattttcatacaggggttgtgaaatttgtacatgacgcagtaattgcaatgtacctatgtctaaatctatcaagacactaatggggtcgctgagctccctaggagaatcggtagatgtaaaagctattctctctctaacgagcgtaagagctgttctgttgttgcaacgagctttcctgctattggatttatctgatagaatatttgatggttgatatcagtaccatatagatgtacttcctttctttgacaaattaaatgtgcttgagtattgtaatatgctggcttaaacaaatgtaaacatgtctctggctggtgcaaatatttagagctaagctatatatggcctggcgcaacctcaatcacaatggtttcgttccgataatgggaatagctcaatcccaaagatgtttccttgtttcacatggtacaacaatttggcgggggtgggtgcgatacagtgcaataactcgagaattgaacgttcgagtgcaacaacttgataagtaggtgcgttttagtataagaacttgacaatttagtatttgatacataaacttagctaagcatatgctaggtacttaaaatatacaaatccacgctagtatattgtcaaaataagtacttaaaaattaaatatgtataaaaaagtgctccaaataattaagttgccgcataacttgttaacttattgtatcgaaatcgtacatatcttgcaagttgttgcatttatgtgatcacttataaagttctggtactaaattacacctatctgccaagttgttacgttaaaacgctcatttctcaaattcttgcaccaaattacacccatctgctaagttgatgcaccgtaggtgtaatttactctttcagtagtttaaatgtgtcgagagagaaattagcagatccatcagaataggatataaatttcgcagaaaataaacaaaaaagggaataaaggagggagactggccggagcgccgctcccgccgttcgccacgtggcagcgggccatggagtcactcacccctatccagcacacactagaatgctcttggagcgccctaaggccggcctcaggtttgctcatcttcatcgccctccgtggccacggctgtcggtgacatgggaccgggagtatcatgactagaggcttgggcaggagcaatcacccacgaggcctgaccccctcgggggggtcgggcccgagggtgatgtggccgcccccctctttgtcttcccgaggggtcggaccgctcccgtttcggccccgagggctgaggcgccccgaccccttgtaggttttgcgccgcgtgtatgggttaggtgagcgcagcggggctcacctaaccgcatttattgcggtttggacgagcgcgtcacgccgcatgtaacgcagtgcagcgcgctcgtttatccggtctgtgaccagtcacagaccgatcagatcgtgggttaggtggcgacaggcggtctgacgcacgcctcgccccatcccgtcaggatgagagcctccaagcactcatccctagccggggtcggcgtgttagctcctggaggtggcacgttggacccggtcagatatataccagccttcatcctaaccattacaggcaagatattgtatgaagaagggcgaacatgcagattgttaaactgacacgtggtggacaagaatgaccgatttgtgaccggtctgacaatggtcatgtcgtcagcagacagccatgttcccacgtcgcgcctgcttccggcggaagtggaggtaggtatgggccgtcccatcagaaggtcattcggacggcagccatacaaatctccgtccattaatgaagagaagtcaagttggagggaagagaggatgagtccccacacaaaagaaagagagggagagatggtgcatgtggtatccccttgagatataaaaggaggaccttgcccacttagagaaaaaaaaaaagagaagacgatcccagaacgatcgggggctggaggggggatgatctggagagggtttttagaataagagctctctggctctccagctctttgtagcttcttcatacacagatccaccagaacacaggagtagggtattacgcttctcagcggcccgaacctgtatacatcgcccgtgtcttgtgctttttccactctcgcgaactttccacagactaggagcttagaatcttacccagggcccccggccgaactggcaaaggggggcctgcgcggtctcccggtgaggagccccacgctccgtcatctggcgcgccaggtagggggctctgcgagtgatcttctgagctctcgcactctttcgtgtgcgcccagcttttcctgttcagcccaatggccgaacaagcaaaggcgcacaacctctctccgagcgttagcggtgacgatggggagccaaacccacgccgtcgagctcgtactccaccgccccctccacgccaaagtcctaggagggaggaggtgctcgagagggtcgaaggatccgcgacttcgacatccacgggtgatggagaagggcgcccagatggggagcgtcgcctcctcgtctacggcgacggcagcgcgccccagggcgcgctccaagctgcgggcgcgctcttgcgtcacccgcctgtcgtccctgacctggagtctccagcccaacgatgactggacgacgtggccaacttggtcatgacggcacagcggcgcctaggtgctggtggttggtcctccgccaccaagacctctggcgctgctaccaccggctccgtgtcgtcaaggcggagggcgcgacgagcggcggctgttgctcgccattcggctgccactccctcgtcagcgcctccgacccgggaagatcagcgtggggggccagatgcccgcatcgatatcgagcgccggcgtaatggtcggcgtgctccccacgcaacggagggcgcctcctcgtccggagagtcacctcaacacagacgcggggatcagccctccgtgcccccggttggtggtgtcggctgtagagcctttgtggcgagccttcggaacgtccgttggcccccaaggttccggcccaccatcgccgaaaaatatgacgggagcgtcaaccccgccgagtttctccaggtctacacgaccgggatcgaggccgccgggggtgacgacagggtcatggcgaatttctttcccatggccctgaagggacaggcacggggttggctaatgaacttgccacccgcgtccgtccactcttgggaggatttgtgccaacagttcaccataaactttcaaggtacatatccgcgcccaggtgaagaagcggacttacatgcagtccagcgaagggatgatgagtcacttcgctcatatattcagcggttctgtcaagtccgcaacaccataccatgcatccctgcacacgcggtgatctacgcgttcaggaggggtgtgcggcacaaccgcatgcttgaaaagatcgcctccaaagagccccagactaccgcggagctttttcagctcgcggaccgagtggctcgcaaggaggaggcctggacttggaacccctccggttccggtgtggcagcttcggccgcccccgggtccgctgctcggacagggcggcgtgacaggaggaggaagaaaaggtcggcccattccgacgacgagggtcatgtcctcgccgtcgaaggcgtttcgctggccacccgaaaggggaggcctacgagcgacaaaaagaaggaagccgacgctccctgacctcggctacttggaagagcgaaggtggcgcgcggcccttacagccgcgcgctaccagcagagcctgcggcgctaccatcagcgccacgtccgggcccgatcactctgcgtcgatgacctcgtcctacgccgggtccaagcgcgtgctggattgagcaagctctcaccaatgtgggagggtccgtatcgagtgatcggcgtccccaggccgggctccgttcggctggccacgggcgacggcacagagctgcctaacccgtggaacatggaacaccttcgtcgcttctacccctagtgggggtcgggtgtcaggtcttgggctcgggccaaccccgcacccccccgggcgtgcagggttggccgggggcttatcttttttctcttccgtatttcaataaaagcattttcgatttcctaaaggctgtgtctgtgcttttgtttccttttgaagaatcttgacttgaaataggtcactcgtgctcaatcctaccctcgggggctcgggtcggctaaaatcgccaaaaggggcccagaaccgagccgtgccctgggacatggtgaactccgggggggaatcggcaaaaacccacaatcgggtcacccataaccctcggtcaccatgctcccggcctggccagtctcgacatgtggatctccccaggcactagccttgacccgcgtcgtttgaggctgggacctgggcacgagcccttgttcaagccaagacacagaaggaccgtggcacagaccatcctcgtctcatacacagaacaaatgaaattgacacaaaaatttcctctttatttgattgcagattaaatcagcgtataacaagaagggggcccgaaggcctcggaagaagaaggaaaagctattaagattggcggaggcctaggggctcactccgacgcgcccgggtagccggcctcgccgtcgctgtcgtccgcaccgtcgtcaccgcactcctcgtcggagttgaaggcaaacgcgagccaaggggccgctcattattgtcggtcggttttcccttgctgatgcgcgcgatttgcgatcgccgggattctgcccgaagagagagagagcagggaggagaggcccccgagccgaacggcggcccaaggcccccgacggccggagctggccctctgcctgcttgtccgacggtgccaggcgcccccgacccccaggatggccccgaggccactgcgggaaggccgcgcctgtcgccctctgaccccgaggtcgtcggcacagaagccgagtgcgccccgcgtggcctctcggatggagagcgccctgaagatgtggcccctgacgaagaagatcggccccgccgaaaggtgcagcggcccgtctacttcgttagcgaggccctccgggacgctgagacccgataccttcaggcccagaagatgctttacgctatcctgatagcttcgaggaagttgcgccattatttccaggcgcatcgggtcacggtggttacgtcttatcccctcggccaaatcttgtataaccgagagggtactggacgggtggtgaaatgggcaatcgaactcgctgaattcgatttgcgctttgaaccacgccacgcgatcaagagccaggccctcgccgactttgtggcggagtggaccccagctcccgagctcgtctccgcccccgaggccagctcgggcccatcgcagctgcctcacaccgccctctgggtgatgtagttcgacggcacctgtaggaaccggccccacctatcaccaggccttagaagtggcgtcacgcccgaccgcttccctcggggagggcgatcgccctggcataacgccaggggctactgtcggtgacatgggaccgggagtatcatgactagaggcttgggcaggagcaatcacccacgaggcctgaccccctcgggggggtcgggcccgagggtgatgtggccgcccccctctttgtcttcccgaggggtcggaccgctcccgtttcggccccgagggctgaggcgccccgaccccttgtaggttttgcgccgcgtgtatgggttaggtgagcgcagcggggctcacctaaccgcatttattggggtttgga

SEQ ID NO: 16856 - DNA, 9765 bp, Oryza sativa
cgtccattaatgaagagaaatcaagttgaagggaagagagaatgagtccccacacaaaagaaagagagggagagatggtgcatgtggtatccccttgagatataaaaagaggaccttgtctacttaaagaaaaaaaaagagaagacgatcccagaacgatcgggggctggaaggggggatgatctggagagggtttttagaataagagctctctggctctccagctctttgtaacttcttcatacacagattcaccagaacacaggagtagggtattacgcttctcagcggcccgaacctgtatacatcgcccgtgtcttgtgctttttccactctcgcgaactttccacagactaggagcttagaatctcacccagggcccccggccgaactggcaaaggggggcctgcgcggtctcccggtgaggagccccacgctccgtcagcgcggctgccacacttgggtgccagtggtagccacccttcatggacatgatgccgtggtgaaagaggcgagcggatgagactaaaacagcggtggcgggcggttgcctgtagcctgcagcgtagatgtgtttaaactagaatgctctcagcccatagctagcgcagatgtaaaattgattgtcgcaggtggatatttggctccgagggtcatacccgcctagaaaaataaaagtccaatgtcgctaaaaaatatttttctagtagagtgtgacgccacgtcggctgaatagaaaagcaggcttggactccagtggtggcttacccctatccaaacaatcacgcaggatgttgtagcttttcagcggccacatttcgatggtgatttcccttcctagacacagggattgagaaggtcaagcgctttctagtttagcaggcgacccatcaagtttgtggtattttttgataggggagattctttattggtatgaaatcattgttctatatatggaattttccgggagataaataatctggccgacaaagaataaaatgaggaggaaaaaaagaaatagagaaaaattggggagaatggcatgaaatcaaacgattcacagtcctggtggcatattttgacatgtcttgcgaattgagtgacaaatgcgcaaagcatatcatattatcaaatttgttaagaggagtgtgagataggactggaaatggggaatagtcggaggattagtagtatgatccattagtatatggtagtatggtagtcacacatggatcatatcgtggcagtcatcaaattccgcgcgagaggaaatgagcgcggtggcacagcgagcagcaggccttaacgagcaacaggaatacaggatagcgtgaccgatatccccttcaccaagacaccgaggctgagcctgtcagcgtgcaggcctagaagagcatctcactacaacaagcagggctataattatctgaaatttaatactcctccgtcctacgatacaagtgattacatcattttttataagaaaaagatgaagaaaaaaaaatgatatgtgatggtacaaaagatgatgggtgaaacaataaaataatacaaaagttggtaggtagaggaataaaatggtataaaagttgataggtgtggataataaagtactatcttgaaatcctaaaatctcttatattttagaacataataaaggtgaaaatatcttattctatgagatggaaggagtattctgcttctctgattctccaaacaaacctccggttgttgtgttctgtctctggctaatctctgatcttgaattttgctgtctatatttggcatgagggtcaacaatgcgatgaactagtaaaatggcaggatccatgtgtgtataactgaatatacatgacaatttaaccggtgagaggatggtgagttgtggtttgctggtctatggttctatatatgcgtctatcatggtgttctccgccatcaaggatccatgtgcaagtacatggagcggtggcacgaattggtaacgcgatctcgacgggatgggcagcatcgagctcaggacggtaagagggtggcaaagcgctcgcgacgggaagagaggtggcacagcgaaggaggtggataggaaaaaggaagattcgatgataggggctagagtaaaaggcattagcgatgcacggacttgttaagtgggtataatttagtgtatgaacttgtaaaatgctcattttggtgcatgagcttgtctggtacttgcaaattgaggttaaaatggtatgacaagaccgatttttttatgttgaacattataaattataaattaatatatcacgtatgtgcaccatagtagaaaggtatatttgtaaacttagttttcactttatctttctttttgtcttttttttctatctcttgcatcattacttgtttttttatgcaatcattatgtcttattatatgtttatccatcttagacacatgtttacatggagtttaaatcaaggacaaaatcagcaagattaatcttgccgtgcaattctgaccttgtttgcacacaccaaacaagttcgtgcatcaaaatgagcgtaatacaagttcatgtactatattgcatccacctctcacaagttcgtgtaccgctgatgcaatttactctaaggaataaattgccctcactgatgtggtgggtaattttctaaagtagtataacattgacaaaatacccatataaatgaacggttagattacatacatactacctatacccctactcctattactagaatgatgcactcttaaagaactctctagttaatgttgttgtgaatgttcaccatctaaagatagcaagagcacaagctagaaaaaggaagcatttagaatgaagaacttaattttaactaaaccactatctatctatctttatatactaaaagtccattaaacttcctacaaacgcttctaagccgccacgtgttattcctataaacactcctcaatcgccacgtggcattctaatatatcagtggacccactatttttaattatactagattatctttaaaaaaataccacagcccacctccctccctctcccaccggcccacactgcaactacatacgtacgtacgtacacgtagtatatgtacgtttcctcctctaatacttcctctctcctattctctaaaaaaaaacctccctcactccttcctatttaatcctattatattctatagctaacaattttttaatatagaaaaaatataaaagaaatgaaatatcttactgtgcattttcacttaagttggtgaaacctactattttaaacattagatttaaagatgtacataattcaaatcaatgaatccattaaatctatatttaatgaaataaacaattttgaacatagatcgttattgtttgcatggccaccaaagaagaaggaaacataaaaaaaataacaatatctattaattatgccatcttgaatcatttttacataataaagattgattaaatgtcctctataacgctcttaagtcaccatgtctcatgtctcatgttttaagtttagacattcaaagaaaaaaaataaaacatgtaactatgggttttcagttaaatcggtaaatccactgttgttaaccattatatcttgcagctgcaaaaggtcgggtcttgaagataaaaaaaaatggcatttcagaaaataaaaaaaatcaccagtttccacttggatcgtttagaaagactagaaaaacgaagtccctccaccatcaccttccatcacatgagtataataatgctcgcctatttccatgtctcgctcgagctctacgctattcattcctcttcagactcccctccctattatcagctatatactaaatgtgcaacaaccaataattgcagatattgacaagacaataattttaagctatacttataattaaaccgatccatatgcctatattttggcatttaagaaatattgtcaatatctatttttgtcattatacatcagtctagaaacaggagtagagagcaaaataaaaacataaaaaaaatataaattcatgtttcaatcagtgttcttaatgatggacaatgcaacttttgtatggcacccgaatcgccattaaatactttaaaataattaaaaaaacaaaactataaacatgaataactaaaaatatacatttcactcagtacataagaaaaaaaacagctcaaatgtgagtaggccaagccactacataaaaaaatggactaatttgctaggcatgtgttctaaacaaaataagtctactttattgttagatgatgaagatgactataaataattgacggggagattagtaaaattgcaatgctaatgaaaagattatggagtaattgtacttttgaagtgcgataaatgttcttttgtttatataccacccttattgtgtatgaaacgctttgttttacaaccagaaacaccgttagtaattgcaatgcatggcaacataagttacgctttgtttgtaagggtagaaaattaactggattatttatatcataatttaagactaagatatctccaaaattcctacaaacgctcctaaaccacagtgtggcaacctacaaacgcttctaagccaccacgtggcactacagtaaattagaggcattcctaaaaattttgacaaaaaaacaaaacaagtaatcattgattttcattaaatttggtggtaatcccccctcctctccccgccacgtggcctactcaactacttcctctgtttttcctcttttccacctatttcatctcttatttttatgctttattagttagaaaatcaaaaaaaaaattgtgtcgaagaactaagcaaccataacatctaaatcatacaactaatttttatctgcttatatctttaaattatgcatgactaagtttaaagtttaagaccaaatttcattataatgtaatttgggttatattttttgattttttgcgtgtcgttcaagcaactataataataataataataataataataataataataataataataataataataataataataataataataataataataataatatatactggattttatcatcctacataacttcataatgatcaaattatatataaagtcataaaagtaaaatgaaaactatgagtaatattcccaaaatatattagttaggaagcaaaagttattctaaaatgtaagaaaaagcatactaatatttgattcgttgtaacccataaaataatattataatcatctcctatcattcaattcctccatcttctaatttttaactaattaataaaaatgattaataattggaaagaaaaataattataattcttaatttatatctgatttttagtttattttagttattgttttatttatagttaaataaatatataagatccatattagccatattttactgtataaaaataaaaatttgtcatttgatcatagacaccaatcctttgtgtggtaaccaaatagcaaaaacaagataacattataaaaaaatgacaaatgtataatatcacaagtacatcctctgtagcgcacttaagacatcacgtgttacgtcttaaataaaaataaaatcttagaaattgtaagaaaaagattaaaccatcagtttttacttaaataggtggatccattatttttaactaatagatatactttaaaaaaaatctgaaaccgcgccatgtgttacgtcttaaaaattagaaaaaaaaatagaaattctgagagaagtattggattattgtttttcacttaaatcatttagaaaagaaataaaccaccactacacttcaccctcccccgcacatgcacacaacacaatactaccggtccccttttctctcagcttgagctctccccttgaatgttctttatagcgagaaataataaaaaaattaaaatatacatactgctttctaatctagctatttttgtattcataattgaaccaacaatttgaagatccataatacctatatttcgaaatgatataaaataaaacaagaaaaataaaatgtcaataaattgaactatttggttccaaccagaaggactaacttgatggtgcaattaggacatatttattaacaataatagttatttaggattagttgaaaaagccactaaactttcaattaaacaagacaaaacaccttacttttaatttacacttaatttgttagacacgtttttccaacaaaccaaatctaactccataatgaagagatagataattgtttatatggatgtattaaatattatatattttagaagctaacagatagattgaaaaaattatctaagcaatgtcgatgaaaaaaattatggagaaacaatacttttgaaatatggcaggtgtcattcaattgatattccacgtatataagtttttcaaacacaatttataatacatgcccgcgcgaatgcgcaggctacctccctagttgttttaaagggagtaatttactatttaactattcagacacactcaaactctaatttaactctcgcactcaaattaacaacttaatacatatagctatatcacaaccctgatattgtccacatgctaactcacacacacgaacaggcaaactaacacaaccatactaggcacacgttctaccgaggagaaggacttcaatatgagtcatacttagagagacatctcttcatcctctgtttcacccaattccacaactgaatggctcatctgaagctaagcgtcctcttgcctatttggaatcttcttcttcatcaccaacaattaatgttgtgcataaatggggaaatgatcctaagtggaacattattgttattcaacacgcaggtcttgatgcaatgatgccagctgtaagcatggaggaagatgaacccttcctatccgtggtgcggatcctagctagctcctctaggggatgcttctacctacagttgtgccagctcctccttcaagtgatctatctggttttgtcctctgcagatcttgatacacttgtcattaattctcctattcatgagccgctatcagcctatcattacatcagtccattgtccattgcactcaacatcctcacaaagtattgcatactccgtccgtcccaaaatatagcaaccgagaactagattggacatcacctagtacgatgtactggacatgtagattgctatattctgggacggaggaagtagtagagcatgtccagatacggtactaggtgatgtcccatctagttctatattgctatattctgggacggaggaagtagtagaattgttctccgtctctggttccagtaattgttgtactcatcattgtgggccatagatggatcgtaacaataataggtgtccctcaagagctcactatacctatgacaaagttctcggatggccaccaatgccacctcttgatacatatgggcaaaagttccttcctccagtttcgaagatcatgaacaagatgccttaacgatcacttaattgtcgccgtcagacgaacataacagttattgacgatgaatatgacccctctcatttatgtcaggggcaggggtgatgcgtttctacttggggttagcttgaatcctatgtgcagctccgtaactataccaccaacttcgaacaaatggatagtctcattgattgagttaggttaactgaaaatacagaaataactgaaaactagtgaaaataaaaactaaaaccagaaagcgaaagtaaatcaaacaaaattcagaaatatcttttaaagttttcttattttttgaaataaattatttttcagattttaaataatcaatttccggaataaaataaatccttttccagaataaaacattttcagattaaagaaattaaatcttgtccttttcaaactggttgattttttgaaacgatgggtcttactgtacgtacaaaaccaaaaaaaaagttcttttttcaagaacgtgataatactaaaagcaaattaaggatcgtacggtaccaatttctaattaattttttaagaaagcataaacaggacagtaagaagtacattactatttagaaggaaagagtatgcgcggcaccagatttataaaagaaaaatgcaaaattttatttctttagaatattttctcagaaaaagaagaaatcaaagaaatgatgtatatatactattaaagaggaatggagaaaagcggtcctaatttttcaaatctttttggaaaggcttctatatattttcatttggcttaggctaaagccaaggagcctctcatatcaacttttcactcccgaaatttttatgtataatttcaaacacttatatgtatatttaactctcgttcaggaattagtcgagataagtaataaacaatattaacaacaggtataagtgtttaattatgatagatgtggataacctctcaatcgtaagagttctaagcagtggaaggaaaaaactagcataagcgacgactccactatatggacagcttaaccaggaacagcatatggtagcttattataagaggagcatattgtatactcaacaagccacataacaaatataacaaatatccaaatatgcaagtgtatatcatataacaaacgagagtatactagggctaatttgaacaaatagcatttgataatcaattgataatacaaaaatagttgaataattaaggaaaattaaaccagcactacataatctaacctggttgcacgggcccaccgtaaaaccttaccctgttgcacaaacccaaaacgctccataggcggagatatcaattaccagtggcggcgaatctaggatagaaattgaggataggctcaacctcaaagtactaagttcatgaaaactaccgttacactagtttttcaacacatacatgattaaaaaaatgatgaaatagaagtaccttgccaacgggaaatgagtgattgcatatttgcatcaaagcatcaaccatctaaagtgagcagccacctatgcatataataatagcaaaattagtgacaataggaaagtaaaaaaattaactaaaagatttggccaaccactagtctacaaatacctgcaattgaattacgaggcaatgatattctgcgggttttcaatgcttgaaatctattcatgattgcatcatcatcaatttttttgaatatttgaggcctttttggttgatttttactctcatcagttgaaagtttaacaatgttgttttcttctccatcgctaatctatcaataaatcaaactatcaaatagtgaggctcaattctttaaaatcccatcatctagctgctgatgctgcttaaatcaaaagaaataaaagatggaatgacagtgattgactcaccgcgctggcgcgctcggcacttggatttggatcggctggatcgctagcgcttgctgctctgctagttgctgccttgctgctgctttcctatggcctacccagtgcgggagtgcccacgccgcatcggtgccgccgcttgcggccggccttcggccgttcggcggctgcgcccttgctgctcgcttttgccgccgcccgtcgcaactcgcaactcagccgccgccgccgcccggtctcgtcgtcacctggtagggttggggaattggcttgccgaattgggggcgtcaccgcatcaggcgttgcttctgccttcgtctatgggctgggccatagttgagcatttgggcctaatctttttccagcgctgcgctgcgtgccgcttcgtct

SEQ ID NO: 16857 - DNA, 7068 bp, Oryza sativa
aaaatcagagggtaggctagagcctgatggagcctaccccttaaaatcgccactgtcaattaccgattttctgctgttctgtcggtgattttgtttccaacatgagatgcactacgatagtgcagtgatactgagtacgtggttttggtctcatgtttaatcctcaaatcgctcatgattttttttcaaagaaatatttagagaaatgtatttcccttgatcaaatcttctttttttttcaaacgtgcacggcgcgtgagacgagagaatattaggtactaccaaatagtgctatgctaccggtgctgtcaacccttaaaatacatttaaaagtcacaaaaaatatgaaaaatttctgagacgtgcaacaccataacttatagtatcacacaagaaatcaactcaaaattcgctgtaatcgtgaagaaacaaaaaagataaactcgttccgtaaatagtgctcaaacagttcacatcactattcacaacagatttgtcttttttcttcttcacgattacaacgaattttgagtttattttttatgtgatactacaagtcatggtgttgcacatctcagaattttttttcatattttttgtgacttttaaatgtatttttaaaagttggtaacaccggtagcatggtactgtttggtagcacctgatattctctccgcgtgagacagagagaaggggaagaaaaggaggactccgtgcttttaaggtaggaataatcacaaaataaatattatttagcatgcccatttaaacaaggaaaatcaaattaaatacagaaacacatttttaagctttttattttcgaaataaattagttttcagattttaaataatcagtttttggaataaagtaaatccttttccagaataaaacattttcagaataaagaaattaaatatttctttttcaaacttgatgatttttgaaaacaaaggacagtacagtaccaatctttttcatgaacggtataatactaaaggagaggatcgtacagtaccagtttttaatcagttttttagaaagcataaacagcacagtaatagaagtacagtactcctccttttattcgttttagcgttgaaattctgtgccaaaaatatttgccttcttaagttacaaagcaattttaatcactacctaaaaaaccatttttgcatatgctcaagacctatatattttttcaaatggttcaaccgtccgtctattcggaggggcttgtaaaaattgctatttccatgcagttggtgcaccccaagattgaattttcacatgtgggtggttatctcgtcttcatgcgaaaatgaaaatcaaggaaaaaataaatatcccaaaaattccatccactgccgctcgtcatcgccgtcgccgaagcgctgctcctcgtcgtcattgttacagtccgccgccgctcgtcgtcaccgaggcccggcagctcctcgttgccgtcgccgcgcgggaggaggagctggggatccgccgccaccgagctccctaccatcggatccattgccactgcgtttcccaaccgccctttccattgccgtggagctccccacctctcctgctttgcttggccagccgctccctcctagcggtggaggaggacaagctgaggagcctcccgttgctgcccctccccacacctccaccacctcagtcccaccttggatctgtcccgactagatccatggtcgacggatcgatatctgccgcctcccggtcacccccactccttcaccggctgctccgctcttgcgccctgcactcactgccgtcgctcccaccgttgtctgagccggccgtcgccaccaccaacccaagtccgccgtcagggtccaggaggaagtgggagaggagggttggagtggaagagaaaaataagtaggcagagaggacttgaaatgagtggggagagaggccgtggaaaaacgagaggagctcatctggtcaaaataccttatattttgggacagatagagtatgtgtgtgcggaggatatacgatgaagggtattgtagactaatttaaataaagcattttcttaatatttgagaattgtaaaataattgaatatataagcaatagtaaaccaatacttaacaacctaacgcggttgcacaagcccaccgtacaaccagagaaaatatgtattgcaaatgtagtatatagacatgtgagatttgtccatattactacaagtaaaagttttactctaatatttaatcatgagtaaaaattttatggaactaaagttttaatctggtgatgtggacaaatcttaaacaaagtgtccatttttagatcattcgttagtttctgggtttgcgatatatttttcagcacaaccttacctgattgcacaaacccaaaccactccacacccggagtctactccatacccagagatatcacaaaaaataatgtttagctctctcataacactcaccttattaattcgaatagttttactctaaaatcagatatgtgcaaatttacacacaagatacaacttcacgacctgttaccatatgccttacaatatacctccgaaatgaattgtcacaaacctgttagcattacacaacctaacatgagcacacctacgtcagcttatcttgccacttcttagtctagggcctcacatttgatcatgttatatataccacaaagtcaatttccttttctacgtacgctaactcgtgattagtttggtaaatgttttacaacagtagctcgtgaatcggtctttaatttttatgagctagatcatcgaaaccgtcaaaaccgtgtgctcataacccaataattaagcatagatgaagcattaattatctttatgtgaatctagtgtttttaagcatgactaattaagtaaagttaaaataatctagccaaaacattataaagttctaagctagtccaattataataccggttagaaagaataggtgatcaacaatcaaaggggtacgtcacacgcgtgaacttagatatcgtgagtattggtagaagatatcgttagttccaaactaaatcttgtaaactttatgtacacactgttgtctggaacttcaggattgttaacaatggaaaagaattgcacttttgtcaccattattattaggagaggacacacgagaaagagacagggatcgctcccattaccatctactactaggcatcaaacacaactaatacacacagaaatattgaacgattgttaattagagctagccatggacaacgctcgagagagtgaggatgagcattgcctgtacgcgcaggagctcgtgttcgcctacaaccgctccatggtgctgcgagcggcgatccagctgggcctcctcgacgcgctcgccgccggcggcgacgcgctgaccaccgacgagctcgccgggaaaatccaggccacggacggcgtcgcggtggatcggattctccggttcctcgcgtccttcgacgtggtgaggtgctcaacagagacgagccccgacggtggcgcggctctgatccggcgctacacgccggcgccggtgtgccggtggctcaccaagaacaacggcgaggggtcgctggctccattctccatgtttattatcgacgaagaccacctattgccctggtatatacacattattcctataatcctatttacgattgtcaattgaaccaaatggtacatcatatgcgcgaagtgaatttataatttaactggttaggttccctatggtgtaacatctcatcggagtttaagattttgacatgagtgattgtatttacgctaattattttctagtggtaggcagtaacctaccttcatattttctagtagtagacggcaacctaccatcatagaaagagatttgctccggtctaacaaaaagtaccatgaggtactggtacctcgagatactttttgctggatcgaaccaaatctcttataatacatcataagcatatgcatatccatgtaggcaacacatagcggaggcggtggcgagcggcgggccggcgccgtccgagaggacccacgggatgccctaccacgagtacatagggaagaacaagaggctgggcgggctgttcgaccacgccatggcgcagcactcggcgatccgggcccgcaagatgctcgaacgcttcgaaggtttcgatggcatccagcggctcgtcgatgccggtggaggcgacggatccaccctggggatgatcacctagcggtataagcatattaggggcatcaactatgacctgcctcacgtcatctctcaggccccatctcttccaggtatgtgtgatcgagattttgtgttgactacaagcattgatcagtttgcacgacgaactgatctctactattataaaaattgaatatgtttttaccggtattttggtacgtcatctgtgtatgagctgatttttaagtttgtttgcttttggaaatatatatccgtaattgagtcggtttttaatatcgcttacttttgataatacataaggaatcatgtaagaaatctgttttcaaatctaaagaacttttaactagaaaaaaaaaatcaaacgatttacaatatgaaacggaaggagtaactaaataagtgtgcgcaatatgccctggatgttgatcttatattacaggcgtggaacatatagctggagatatgtatgagagtgtgcccaatggagatgcaattcttttgcaggtatgatagtgtacccactctatatataccgcttcttttgatgacctaagtttatgactagcagaatcatttgggttgttatatatagcagggtttgaaatttcggttcaaaatttacaaaatttcgacccccaccggcatgctcaaatctcacttgaaattttcggttttttgcaattttttgtgaatttggtcaaattttattcaaattcattcaaattcagtcaaattttcaaataattttggctcaaaatttcggtaacccctgtcataaaatccaatttcaaaatttcaaacctgatatatagtcatatggaaagaaaatgtttaaccaaatacaatttgtgacgcatgaaattttgagagtacaaatacaataaaacaattgattctagcgttgtacgatgtctcctatatatggctgtgaaattgggacatttggctagtagaaagaaagaacgttccataaagatggaaataatgcagaattaattcatacatgcatatacatatgcagtggatgctccttatgttcagtgacgaggactgcatcaagatactgaagaactgccaccaagctctccctgaaggcgggaaagtgatcattgtggaaggtcttctgccagagaccccaaatactactccagctgcgcaggattcattcaccatggatatgatcttgtttgtcctcttcaaggtagggaagcacaggacagagcaagagtttgcaaagcttgccaaggagtctggctttaccggtaccttccggtcgacctacatattcttgaacttctacgcccttgagttcaataagtagctacacctataaaacagtatggtcttgaataagagttgctagctcgcgtgtgtacttatgtctctctatgatatgtttatattccaatgtatgtccctattgtgtcactatagctaatctaaatgttaatcttcgatataccatctatatctaggtttccggtggactttcgtccgtcaccccctgtccgcttcgtgatcgtgacatcggtttagatcaggattcaccgctggcctcaatgttggtatggactctgaatcaaacacaataaaatcagctagaaggagtccaaggattaaaagttcgagcaaatcacaaagcaatacacaatatccgaccttgattttcgtcttgcccatgacggtggtgcctctgtatggtggcggcagaatcgatagagaagatgatcacatcggtgaaaagaacgtgatggcgttcactgctccgccgccaacgtgtgccgccgttgtcgaggttgttgccacatgtgcctgcctgccaccccacctcaatgcccgtcttctcgtcaccggccgggagaggaagagagtaggggcgccggcaagggaggaggagagaagggcccctgcgcctggacgacatggaggaagcagaggatccaacgacaaagttaaagacgacattggagggaggcgatgccagtggagatggagagagctagagggaaagaggtgtggtccaccttctacctccaagccgggcccgggccccgattcacgcatgcggtaaggattcgttttttcagtcgctaggctgatgatccctagcgcgccaccatgtcgatctgcctccccatgcgtttcctactccaatctataccttcttaaaaattacgtaaggcttccgatagtccgctttgtccgtcatcatcgtttgagtctgagttcgtctttaacaaaaatccccgagcagatcaaccgattgctcccaatccatttgcccccaatttccaaaatacatgaatcacaaaatcactcaattgcaatcccaaaccaaaatcaagaatcctccacaaaatcaacatcccaaatcaaaaataaaatccaaaacctaaccctagccgcctcctgcagtcaccctcctcgtggtcactgtcgccgtcgtcgtcgtcgtctgccgccgtcgttgtcgtcgccatcgtcgtcgtccgctgccgtcgtcgtcatcgccgttggcgtcgtctgccaccgccgtcgtcgttgccgttgccgtcgttgtcatcgccgccttccgccacgaccggctcccgagccagccttccgccgctctcggcagcgtctccgcgccggggatggggccgacgccgccaccgccatcagatccgctgcgggagggaggcgagaggggtcagagggagttgccgccgccggatgcgtccttagccgccaccaccgccgccggatccacccgcggtcgccgtcgccggacccatcgcgcgagggaggcgagagagagggtgagggaaaggacggtcgggaggaagagggggatatggagcggccccgctg

SEQ ID NO: 16858 - DNA, 15656 bp, Oryza sativa
  unsure (1)..(15656): unsure at all n locations
ttttatcatgctaggtaagaaactgagttttcttgttgaaatgatgaatagttgctctgttttatatctcttttatatgggttcacgctagagtactctctcaaagattgaaaaaaagtagccacatattatccgggaacctgaggtaagtgggctgcacttgctgaactaagtctaggttgttacaagatatgagagagtaataagagctgctatgatcccgttctaagtttgacttaaactccggatgttttattttccaaaataataaactttgaagttcctcatttaatataaattcctaccagagccaaaaatattcacattgacaaacattatacattttggttacttgcaattccattgaactttgtcaaattcttgtgacttgtgtagatacttttcatgctctatgattaagatcatacacccacatatatgtacatgctaaactcctacactaggagctagcatttattgattccatttatccacaccaccatcaaaataaattctccatgcttttatgtgctttcttctcctaaaaagaaaatcctttccgagaaaaaagagagaaaagggagggaaagtcatggttatgaaaataataaagttatgctccctcaattatgagcatgatgatggaaaaaaaagagaaaataatgtgtagccatgccctctccttacttataaaagaaggatttttggagaaggaagtaagcacaacggagaagcattttctttatttttccacatttcatttccaccatatatcacacacacacacacactttgcacgatcttgatcttgagtatgtctagtcatctactctagtataagcttttgacttagtaataaatgtgaatacaactatgtcatgtttgatacctaccaagctccacatattaaaccttagagcagaaatcaaaaaggccactttggtgaggaattcatatttttacacttgagtgatcgagagaatcatttgaggaacttgattttcttttgaaaaatcattttaaaacttccggaataaaagttgaataaagattgagtgcttagtgctcaatttactattctatcttttaaccgctcaagacaagataaagtagtgtttcgcaggaatcaggtgtaaaggtaagccacagtgataaaattattcgatctaagagagaatacacataccttgcactggtacatttgaggatatacaatatagtagtagctcctgatcaacaaccaggtctttgttcccttttgtcctttactctgttgacggtcgttatagatcagtttcacccgtcaatattacccaaaataaaggagaactagttatgcttacaatgcatattgtgttagaataaaataaaatccattagtatatggtttacttaccccttgcagagaataagtacaaaatggcggagaatcgacatcaaaatagatgatcaatcaatcggacgatgtcgagaatcagatttatcaatgaatggcccaagaactaaaaaatgacacgaccaattgggccaaaatttacaagtttgaagtaagctataggggaggaggccacctgccaggaactgggctggttgggccaacccaggattcggccgaacaagctgcagcgccgatggatgcagggtttggctggacggctgtgattgatccccaatgacggttggtgggtattactgacctttccaaccgtcattaccaacctatataaacccctcactctctccatttcaagacacacctcaagcaagctctctcatactctctcaagcttagtttagtattctcaagctagtggagtaggaatagaatagaagtctgagttcggaagtcttcggaagagtttgggtatggttctagtagctctcatttcttctttcgtaagacttgtactttatttagccccagttgtatggtcatgacggactatcgtaaagaacttggtagtcaggggtggcttctcgaagtaccaggagggcatcggaaagagggcattagctagttaatcttatagctaggatgtatgtataatatgtatactagaagtataggaatagattcttttctattttctttccacttagctcagataatttaatatgagagtgagtagtcttatccttgtgtgtcactctaccctatgcttatcttaacccctgcttagacataattattacaagtaacatataaatattagcttggttctctctattataatcttcctatgggattaaacaaatacgatacccttggaatactctcgggtgaaatgctacaatagtacatcgtgctcttgcggatgaactctatgaccataatataccagaagtatttttgtgccattgctgagaattatatttctagtaatgtcgttaagaaataccaacagacatcccatataattacaacgccatcttcggccgtgctaccttgaacaaattcgaagctatcgcccaccacaacttcctcgagttcaagatgcctggcccgaccggagtgattgtggtcgaggggatacagccttcggtcgcagaagagggcgaagcggtggcaatatgtagagaagtgtacaatggtcaagtgcaagagggcgaaagagcaacacttgtgctgaagcagtcaccgtatgttaaggtgagcaaggtccaaattgacgaaactgatccaagcaagatgatctccctaaggggtgaccttggtgaagccgaagcaaaaaacatcctggccgtcatcaagagcaacattgatatcttcacatgggggccagatgaagttggaggcgtttcgccatatctcataatgaaccatttggcggtcaagccggacgccaagctaagaaagcagaagctacggaaaatgtcggctgatcgctagggggctgtaaaagcagaagtgtagaagttactcaaggccggcgtaatctaagagattaaccaccctgagtggctggcaaaccctgtgccggtcaggaagtcgaacggcaaatggcaaatgtgcattgacttcactgacctcaacaaggcatgtcccaaggatgatttctcgctctcaagaattgaccagctggttgattcgacagccggctgcgaacacatgagttttttgtatgcatactctgggtaccatcaaatactcatgaatccggacgacagagccaggaccgcattcataactcccaacggcaccttcttccacctcaggatgcctttcggcctgaggaatgagggggcaactttcgcaaggttgatttgcaaagtcctttgctcgcagctggggtgaaatgttgaagcttatgttgacgacattgttgtaaaaagccgaaaagctttcgaccatgtgtccgatctgcaagaaaccttcagcaacttgcgtttggcagggattaagctgaacccggagaaatgtgtttttggtgttagagctggtaagctgttcggatttcttgtgtccgaaagaggcatagaaaccaaccctaaaaaaatcggtactattcagcaaatgcagccaccaaagcgtgtacgaaaaatacaaaagctcccagggcaaattgcggctctcagccgattcctatcaagagcagcccaaagaggtttgccatttttcaaaaccctccaaggggctggcaagttcagttgtacacctgagtgtcaagccaccttcgatgagctcaagtagtatcttcagtgtccacctgcattggttagcccaacggcgggtagcgagcttctgctctatctagcagctttgcccgtcgccgtaagtgcagccctagtgcaagaaaccaaagttggccagaaaccagtgtactttgtgtccgaagccctggaaggggcgaagacaagatatatgaaaatggagaagttagcatatggtttggtaatggcctcaataaagctgaaacattatttccatgcccataaaatcatagtgccttcgcaatacccaataggcgaagtgcttaggggcaaagaaatcactgggcgattgagcaagtgggcatttgagctatctcccttcgacctacactttcttgcaagtctcaagttctggctgacttcttagccgaatggactctagccttcttccccgaacctgagccgatcaaccaaccatgggtaatgtactctgacggcttatggtctcacaaggggtgggagttgccatgatcctaacttcgctaggaggcatgccgatccgctatgctgcccaactgcagttcgacacaacgaacaataccatagagtatgaagctgtgttgatgggcctgaggaaggcgaaagctctaggcgtttggcatttgctgattcgcacgaattccaagctagtggcaagccaggttgataaatcttttgaggtgaaagacgacactatgaaaaaatatttggaggcagttcgctccatggaaaaatacttcactggaataacgttcgaacatttacctagagggcataataaagaggcagatgctctggtggtccacattcacctagggtcttttttgcaccaagtgtgccaaacctcattgaggacatcatggcaatcgaccatgctgagttgggcgaagacccaaaagactggcgaactccgtttgtcaagtacctaaaaaccggttggctacgggatgatgaagccgaagtaaattgcttgcagctccgagcagccaaatacatgctggtctccgaacagttgtattgatctggggttctacacctttgcttcaatgcctctctgctgtcgaaggtgaagatgtagcgaaagagatacaccaaggattgtgcggggcacatcaagtggcgagaactattgcgtccaaagtctttcggcagggcgtatactggccaaccgtcctcaaagtatgtgatgagcagatcaagaagtgcgaaagctatcagcggcatggccgaagtcagtccattccccagtataagctacaaccaatcgcaccagtatggcctttcgctagatgggggcttgatataatcggcctgtttcccactgtccgaaatgggtatcgcttcaccattgtggcagtagagtacttctctagatggatagaagcagaaccgcttagctcaatctcttcaacagcagtacataagtttatttggaaaaatattgtctgtcgattcggtgtacccaaagaattcatcactgacaatggcaagtagttcgattcttaaaaattcagagaaatgtgcgaggggctaaaccttgaaattaagttcgcctcggttacgcacccgtaggcaaacttggcagccgaaagggcgaacggcaaaatccttgacgcactaaagaaaagattggagggggcaccgtagggtatatggccagacaaagtgttatcggttcactaggcccttcggataacgcctacgagacctaccaagattagctccttcatgctcttatacggcgatgaggctatgatgccaagtgagctaggggctaattcgccaagggtaatcttctctgggggtgaagatgggcgtgaagtctcacgcgaactcctagaaggggtgtgagtcaaagcacttgaacacatggcgaaatacggcaatgacactttggcatcctataacaagaaggttcgaccgacnnnnnnnnnnnnnnnnnnnnttgtgctaagaaagaaggcgaaccagatggtcgttggaaaactgaagtcaaagtggaaaggagcatatcttgtcaagcacagatctagaacgggttcttttcagctggcgacattggagggcgaagagctaagccactcctggaatgccgcttcgctcaggcggttctatgtgtaaaacataggtggcacccattcaccagttgtaaatatgtaaatatggtgttgtaagccttcagcacgaaaatacaaaaaaaaggaaaataaaaaaagaaaaaaaaactagatgaagggttattatccattctggaggcccgaaccagtataaaaatccctgtgtgtttcgtctcttgtgtgaatgatgtcttggaaaaaaaaaacctctaaggcaaacacctgcttaacgaaaatgacaggggtgcgaagtgaatcggtcaaagcatcgctcactgaacactaaaattacaacagctcgttttcgatcatgcatcgatcatcgcattaatcggcttacaaaaagcacttagcatttttaaacgtttgctaaagatgagaccgaggtgaaagacgagagttgagaagtcgaacactcatcactaaaaatgaaaaagggtcgaagtaataagccctcaaacaaacgaagcgattaaaaaataacaagaggaccgaaacaggcagacctggatggtcgaagtatattcacatgataaaaaaaatactttacagatagattacaatatccggatcaggacattttcgccttacccctgttacctcagacgaacatggttcgtcatcgctacttattttatatattactctaaggggggaaggaggtgaaatgcacgccaaactataccgacgtcaagcaatagcagcttggcaattggtcatcttgaagtttcgccaaaacatagctacatttttgcggcgttggacatgacaccggtcgtaattttcgaaagatcggccaggatgtcttcgcatccagttcgccactttgacaaccacatagttatttccgttgataaccatttcacggtatacgggcttgcacgaatacctaatctttggtaagcccttaattgtgacaatttactcgtttgcgctttgccagtctttgaaaggaggctgaacgcattctttacgcagtggaacctgcgaagaatgtggaaatacatagcaaatcgccttaagaacaaagtcattcggaaaatttgcaagtttaaggcaagattctggcgaagatttccattccattcacataaacataaatgccatttcggctacataaaagcaaatcgccagcagcaaacaaaagctgaaccaagaaaaatttacatcaaaagaaaagaaggcctcacacctcacgatggtcttgcatatcttcgtctcttagtagttgcagtagtcggtcagggccgcggcctccttcttcgtcttttccaatttggcctttaagaccttattctctaccttcgcctatttaaaggcgtcggcgacaacctcattgtagggatacgcgcaggctatgataacataaatcaaaattttctagcacataaaccaggaaccatataagtattagatcatagatcgttaccactcgacatactgtgtccacattattaatttggtatctctataccatgatccatgagacatgatcatcaattaatacatgtgctgatcattaaacatatttgttccacatatgatatttgatcagggatcctttagaaatagtaacatacaacataaagagtctcatgaaaaaatcacatattcattaaccaataatgagttatctatttcaagaaacaatatcggataaatatgtaaacatagtatgtgatacaatcatctatatgattgcctctagggcatatcactaacagtctcccacttgcatatctaatacccattgccctagtgtgcgcctcatgcttagcctaagggagtggctttgtcaacggatctgcaacgttcaaatccatatgtattttgcatatcttcacatctcctctacccactatctcgtgaatgaggtgataccgccgtaaaatgtgtttggacttttgatgcgatctaggctccttagcttgcgcaatggcaccactattatcgcaatagaggtccatagggctggaagcactagccatcacacccaattgagaaacaaatttgtttatccaaacagcctcctttgctgcttcagaagcggcaatgtattcgggttttgttgtagagtcagcgactatatcttgcttggaactcttccaactcacagcgccaccatttaggcagaacacaaatccagactgcgatctaaaatcatctttgtcggtttggaagcttgcgtccgtgtaaccatttacaacgagctcttcctgtcctccataaactaggaacataaccttagttcttctcaagtactttaggatattctttacagcaatccagtgactcttacctggatctgattggtatcattttgttgcactaagtgcatatgaaacatctggacgtgtacataacatggcatacatgatggatccaattgccgaagcatatggaatcacactcatcttgtttcgctcatcagtcgtttaaggacactgattcttgccaagattaatgccatgtgacatcggtaagaatcatttcttagagtcttacatgttgagcctcttcaacaccttgtcaatgtatgtactctggcttaatccaattagcctatttgatctatctctatagatccttatgcccagaatatatactgcttcccctaagtccttcattgaaaaactatttttcaacgatgtcttaacggattcaagcataggaatatcattcccaatcaacaatatgtcatctacatataggattaaaaaccacctctgccagttgagctcattggtccacatacattagtatgtactagtgccaatagttcacttgccctttcactttgacccgtgaaaggtgcctttgtcattttgccaagtaaacaagattcacatgtctcaaatgattcaaaatcaaaagagtgtagaagtccatctctatgaagcttctccatgcgtttctcatttataagacccaagcgacagtgccaaataaaagtgggattcaaatcattaggacgttgccttttcgcattaatgttatagactgaacatccatcaagattcacaatgtataagccattcatcattggtgcatggaaatagaaaatatcattataatagattgaacaaccattgtccactgatctaaaaccataaccctctgcttgcaaacaagaagcagagataacgttcttacacaaagctggaatgcaataacaattatttaactccaaaactaatcctgacgataaagataatggcatagtgccaaccgcaacaacaacaactcttgctccattgcccacgcgaatgtccacttcgcttcttgctaagctcctacttctttttagcccctgcaacgatttttatatgtgagcaactgacctgctatcaaatacccaagaatcagtagaggaagtagcaagattaatttctataacattaatacctaaggtggaactctttccatcctgctgcatctgcttgaggtgctctaggtatttcctacagttcctcttccagtgacctgtctccttgcaaaagaagcactctgtatccttagcgggccctgtcttttgaaccttggtcttagagttgccagtactcgtgatctcatcagagtttagctttctcttttgaccagtcttcttgttattgggcttgcgcttatgcataaccatcacatggttagagtttttcttaatgctttcctcggcagtctttagcatcccatacaattcggccaaggtcctgtccatgttgttcatgttgaaattcaatatgaatggctcaaagctgggagggagcgactggagaaccaagcttttctagactctcggtgtacccaatcattttgatcacatggggactcactggtttaccttctgcaagcctgcacgcaaacaaggactttgaggtattaaacctctcagctcttgcttggtcctcaaacatgttatgtagtcccatgattatcgtatgagcatccaatgtttcatattgcttctgaagctcaagggacatagtagcaagtatgagacagcttatatcaagataatcattgcatcgcttttcatgatccctacgctgagcagtactagcattgttgggcaagttagctggaaaaggctctttaagcacaaactctttgtgctcttacctgagaacaattatatatatatatatatatatgcaaaattagcaccatgtctacatttaatcttttattaaacaatttaaaaaaagatactcccactatgtgttgtgaaacaaaattccctctagcaagatcctcattttattagtgtctagtgagctttggcatcacagctagacaattatcaaaataggtaagcaacaccttgctaattacatcatatgtgactcttgtgctgttggggtgacatctccatatagcaacccaacctatgccccaaggtccaaaaccgttttgataaccttgttaagtaaaccaataatctccccatatagatgtccgacatctatcctattttatcatgataaaaagtgacactctgctatggcaaacccatcacttataatcacaaccgtaataggtgcaactattagaaaagcataaattataattaatttttccgagggaatctatcctaccatgtcatataaaatatacaacagtaataaagtaagatagataaacatcatatgctagatatagaatcaaattctatttattaatataaaaaccaagcgaaatctaagggcaacgcacatgggggttgaggggggagccgtcccccgcgggtttcagggcagcgtcctgaaaaggtcacggggtacatagatctcatctacgattcgccatatgaaaaccttaatagggtaatcaaattatgctaaaaactaagtcaatctcattggttcatttttctcattggcgtgcagttcgagtggatatcgaactatccgatgaacacaatcttgcttggccgtggtgagtactagacattccagtaaagtcaccaacacatataccgattgatctcatcaacccatgtgcctattggtccattacatgttccgatcatccaagaactcaactactacataatagatctcatctactacgcccgcatatcaactatatgcaatgacctagatcataaactatacaaggcggctctgatagcactgtagggatacgcgcaggctacgatagcataaatcaaaattttctagcgcataaaccaggaaccatgtaagtattagatcatagatcgttaccactcgacgcactgcgcagcggaagaaagcgctaaggaggcgaagcaacccttgcgaagtagcgcgcgtcgatgtagaggaagtagtcgatcgcaccggctcgaccttctcctcctcgagcgttctcctcgccatactcccacgccgatcaacaccgcaaagcagcggcgcctctaccggtatccatacgtatagggacggaatgccacgcgcagatgtgctaccaaccgcgcgcggctagggttttgctcggggaggggagtggcggctacggtttctcacgtgatgcaatacgaccgccagtcacacccctcacgaatatataggatgcatgactcgggactccaaggcccgtaggactcctatttggatccctatccgaattaagctcatattggatctccatccaatccccatattctggcccattaagcgtgcaaccctgtaggttcatgtacaatcggttgtaacccgaaaactccttttcggtccacgtgtcaacagcggcccctagcagaatgtattgacccaccgggcatacataaagatcatatcgactgaatctctagtgtatacaagtatgaacccctttgcctcatgatttcgattaagctcaaggctagatatgtgccatcctctaatagctcaatcattcactcgaacctgtgatagattatataacttgtgattgactcctcaatcacctttggcatggccatgcacttccataatctataacatcgaggggcccagagatatctctccataggaaggacaaatcccatcttgattattcatatcccactacatgtttcatagcatacctgaaaactacttttataactacccaattacggagtagtgtttagcagtccctaagtaagttactacatatgttgggaaccatgacaatctcaggtctaacgattcaacaccaacactaaatgagatcactgatgacataacacatatggctcttgcagtgtcttatgttgggtctatccaacaacatgttccctaacatgtgttcacattattaatttggtatctctataccatgattcatgagacatgatcatcaattaatacatgtgctgatcattaaacatatttgttccacatatgatatttgatcagggatcctttagaaatagtaacatacaacataaagagtctcatgaaacaatcacatattcattaaccaataatgagttatctatttcaaggaacaatgtcggataaatatgtaaatatagtatgtgatacaatcatctctatgattgcctctagggcatatcactaaaactcatgttccaggtctttccgcccaagctcctccattgcctgaaggcggttcttgtaaccatccaggcgagccccgacagattgttcgatgctactttacgccgaaagagcctgcgagcaaaaagggggaaggtggcgaaaatatttagtgcaaaaagaacacttagtaaaaaagcgtgagaatgaaagaatgtgtactcgaagaagtgtgctcttgaccgacgtgcagccctcgtagaactcattgagatccatgaacgggctaggcccacccgccggtgaaacgagttcgttctcccccccccccacgatgaagggcataagctccgccctcaaaatctaaagggacaaaccgggggagggcggtgagggtgtttttagagtttgaactgtcgggggcgcgtttccctttcctnnnnnnnnnnnnnnnnnnnnntgcgcctaaaaagatcaatcttcgcaggcgacgcttatatggcccgcctgcaaagatgcccctatatagtcttcttcctccccgagccctgttcattctccccgacgtttctctctcctaaagtgacttaaatatagggggggaggttttgaacttcaaatcttcgggggatttttctacggtacttagatctactcatttccacactaggtatgcatttttaagcttttagaccttaatttgtgatggatttatgcatccaaaattttgaaggaagagctccatgttttttaattttatttcttgtcatatgtttatgttagatgtatgcgtaatacttgatgcctcttgttgtagtggtttaatgtggtaacataaattctcgttttttaatttttttgctatcatatccaccacctagttctagatctagatctagatcttgtcatgtatagagagagaaaaaaaatttaaatgtctattcattcggtgtaatcaaaaaatagttatagtattttgtaatatgccgatgatttgattttgttagattttcctaatgtactaatttggcatgtctgtgtaaaaaaattgaaataaactatgattttttattactttacacttaacttttagttaattagtttttaatagcgataagtttttcaataaaccctacaaatttggtattaattgtgcaaatattttatgtgtattttttagagatatagaaagtcgggaatggatgtatcattggccgaggtttttatctccatatagaaacgaagtggctaaatttattggtattgccaaggttcacgctgagaagaacaatatgaggaagataatttgtccgtgtgctgactgtaagaatgaaatagcctgggactttgacgatgcttttaaagtgaaggagcacttagtaactcgcggatttatggacaagtacgaaatatggacacgtcatggcgaagaacatgtggacgagcctgaaaatgtagttccgaaacaagttgaagacatggtgcatgacgatggttctgttgaggacaaaatcgacctagaggaaatgttacgtcatgcagaacccgaggtgctgatggggtcggcaagagggctaaataactttgaagctttacagaaggcagcaaaggaagttttgtacgatgagtcgaagggctgtgacagtgatttcacaacactccggtcagttcttgaacttatgaggttaaaggcgagacatggatggtctgataccagtttcgatagtcttttagaactcctgtagaaaatgctaccgaggcctaactcactaccatccaacacatatcaagcaaagaaactcatatgccccctttcacttggtgtggaaaagattcatgcgtgcgtaaatcactgcatactgtacaggaaagagtacgcttctttggatgaatgtccaacatgcggtgcaagccggtacaagtcgaatagcaatactagcctagaaccctctgaagcaactgagggacgacagagaaaaatcccacagcttgtgatgtggtaccttcctgtgaaagaccgcattacacggatatactcaaacccgcgagatgcggaactaatgcgctggcatgaagaagggcgcaagaaggatgggatgattcgacacccggcagatgctcgtcaatggataaactttgatgcgtagtatagagagtttgctaaagacccacagaacattagatttgccctgagtactgatggagttaatccttttggagacatgagcagttcacatagtacttggccagtgcttctcaccatgtataatcttcctacctggctttgtcaaaagcgaaaatacgtactactctgtatcctcatacagggaccccgtcagcctggtattgatatagacgtatttcttgaaccattgttggaagatatggccgatttatggaaagagggattgaaagtgtgggacgagtacttaagggaatacttcacagtgaaggcaatcatcttcgtgaccattaacgattatccaacaatgttttcagtttcaggtcaaattaaaggtaaaacaggatgtgtgatatgcttgaatggaacgcactataggtatctcccgggttccaacaagcttgtgtacatgcggcaccggcggttcctacgcacaaatcacaagtaccgtaagatgaaggcggagtctgatggtactgaagagactgatcctgcaccaaaacctacatcgggagaaaatgtgtgtgcaatgatagagaaaattgtttgcgagtttggaaaaatgactaagaaaccatcaaaggggataaagcgcaagaaacccgagaagaatacgaagggaggggatagtaagaagcaagatgacagttcgaagccagatgataaactccctcccccattcaagaagcattccatattttttaagtacctcctgtactggaaagatctggaggttcggcatgccatagacgtcatgcatctagagaagaatgtgtttgacaacatagttggaacattgttggacatgccgaagaagactaaagatggtatgcaatcaaggatagacctagtcgcgatgggaatcagggaagagttacaccctcaagaaggagaaaagaatggcaaagtatatcttccaccagcctgtttcacactaacacctgaggagaagaagtcattttgcaactcactccgtaatgtcagagtgcccataggtttctcatcaaacatcagtcgactagtttcaatgaaagatttgtcggtatctggttataattcacacgactgccatgtcttgctcaccgtgtttcttgcaattgcaataagagccataaaaccggagcatttaaaggttgctatcacaaggttgtgctactttttcaa

SEQ ID NO: 16859 - DNA, 1294 bp, Oryza sativa
ccatcaactatagtaaattcttggcaaggatatgacattaatggatattcgtttagcacatcgatcaacatattgaactaatacgagctaacaataagggtcgctccaccgagtggataatgaaagaacacaagcgtctcttcatagattggttgcgagacctagacttacctgagggagaaactaccgatgaaataactatgaagcggttggcttgtggtccatcaactacagtaaattcttggcagggatatgacattaatggatattcgtttagcacaagagcccgagataataagacctgtacgcaaaacagcggtgtccgtgtggaggcaattgatgaagccggggaaaaacaatcatacttcgggtttattgaagaaatatgggaaattgactatgggcacacaatgcaattccccatatttaagtgccagtgggtaaaatacccgaacggggtaaatgttgataagttcagtcttactgttgttgaccttgcgagagtgggtcacaaggatgatccttgggtactcgccaatcgcgtggcacaagtgttttatgtgaaaaacccttcaaatttgaacaaagatatagtgctaccagggaaacaaaagatattgggagtggatggggttgaagatgtcgaagattacaaccaatacgatagtatgccactttatagtcagtttgtacagaagattaagaatgtcgagacatctactcagaagaccgtgaagccttacatgcgcacggacggtgtgggcaaaaatgttaaagggtaatgattgttgagtggcatataagcatctaagaagttagtagttatgtaatggtcgtatgtaaggtgatgtgtgatcgtatcgcaaattgacgaacaattgtactcaacattttgcatataatttctaagtactaatttttatgtgcaattaccatttgaattgtgaaaatttagttaaaaaaatttaaagttagtaatatccgaaaagtgtaaatatttttatgtgcaactaccagtttgttaaaaagatcttcgcaggcggaccggccgcatgcgaagatagtaaaagagatcttcgcagcggaccgacccgcttgcgaagataggaaaagagatcttcgcaggcggaccgaccgcgtgcgaagatgatcatcgcaggcggaccgcccacctgccaagatctttgccctatataagggcaagcctgcggcgccaaaatttctaagtccaggcggtaaccctagaaaatttggcgccgtcaggcgaacgaaatttttcaccgccgcacgcttc

SEQ ID NO: 16860 - DNA, 12337 bp, Oryza sativa
atttagcataatagtaagtgctagtgaaatttggaaatctcttcgcatttatatttgttcatacgacatattgttaatacacggtttatttttgtactaattagtttgcactaatttgagtaatttaaaatgtgacgatacactttttttttatattagaggtttgaaacgatggccgatagtactaaagggacttaagagaagggtttaggggagcaggagcagtcccttgctgttatggttgctccggaaccaacggtcccaccggatggtagttccgacagcgacgtaggtgacgaagacgaggagtactcgttgccaagcgatccttgtcaaagcccaagcccgaaaaaaaggaaaaagggcgacggtgaagaaggcgacaaggactacattccccctaaagaaggggtaagtaaacttaatatgtaaaatgttcacagtgatagctattagcccgagctaattcgaaactttcatgcataccttctagtaggaaacggcgccacgacgatcaaaacggcagccgaagaaaaaagttccttcgaaagacaaggacgtaccggcaaacacaaccggcacacagaaaagcgaacggtcagcaaaggcgaagagaaggaagggcgagagaagcgtaaatagaaaggatgaagggttccatgttgttacccatgtttcgcctaaaggagagccgctcgcccctaagacggcacgtgcgaaattcagttcacagtgtggcataatagtaagggagaagatctccatcacggtcaaggactgggatcatgtaacggatggggataaggaagtcctatggaaagagttgaagaaaatcttccagttcccggaaggatcagaggcagcggtgagaaattgtgcactgcaaacaatggccaagtcttggcatggttggaaaaccaccttgaacaagaaatttgtgaagacgggacgcacaccgttttcgacgtatgccaacataacccccaatcagtgggacgactttctgaccttgaagaactccccggaagaaattaaaaggagccaaaagtactcagagttggccaagaagaacaaatttcctcatcgcttaggctccgcgggctacgcaccaaaggtggaacagtggacaaaagaggaggaggaaatgaggaagaaggggcaaccggtaccaatggaggagtggacacagagatcaaggaactgggtaagaggtagaactccgaagatcacggatgagggaaaagtatcgtttgaaaatccggagctgcagagcgtttccgataaaatagaaaatttatccagttcacaaaagaaaggatattttaagcctaaaagggagaaagatgtgctaagtacggcgctgggtactcctgagcatgggggaagggttcgaggtgtgtcgagcaagataagttggaaggaagggttcaaaaatgacccccacaagaaacgtgaagcgtacaaggataaacttagagacgaaggggctgcggagtttgaaaggaaaatgatggatttctgcatcaagcacatgattttgcctcgccccgaaaccaaagaaactgagccagattaccccttcgataacctcaaggagaatacaccctgcagattgcacgttcccattggacgctccggtaaaactcttgaggccgctacagccattgctatccctggtagaacatacaatgaacagttcatacccgatgcgtatgccaaggtgtagccacaagtggtccacgaagggtttgagtcctacgacattgactacccgactgcagatggtatatctgtacttggggatgcgatcgatcttgtaattctctggcacaagaatgacatattctttggattgggcaccgatgccggggaaaaacctgtgttgcctaaaccgggtttgggaaaacctccgaggcctcctaagaggatggtgactgataaggcggatgatccagaactggataaggaaaatccagtgccggaagtgccaccagagattgcattgccggagacagccaaggagattgcaccgccaaagacagccaatggagattgcaccgccggagacagccatggagattcaagtgccggatgtgcccatagagattacagtggcagaaccagaggtggaatttgtggcaccagtcgggtcagacaaagatgaagtaccaggattggaatgggatggtacagagccagagatatttgaagacccttctcctgcgaaagaacccgaggtgccatgagtgattaggagccacgaatccaagtccaaatatgcgaacaaggagaagttcatgctaaccgtcttcagagggggtaaggaacgtgccaagctcagagatgacgacccccagaaggcttctgtgctagccgggccaacatacttcgcaaccgatgattgcccggaaaagtacgaacatgggaaagcactcttgccggaatgggcactgaaagaagcaccatgggagatgagaaggttacataacttctacatggaggccagcaagaaaggcttaggcaatataacagctcgatcaccgccagattgtttcggcgaagaaggttacgtatggctagatttctcagatctccacgccatatatcgtcaggataagatggacgtcaactatgtcagtgtttggtgcatgtgagtacgagttttaattaattagatgaaaaatatgtacaatacaactccatgtgattgttactaacaaacttcttctgtaggatgcaatacatggatgctaagaagaaaaaagaacccatcggcttcttggatccaactcggatctgccaaacacagcataccgttacgctagcaccagggtcagaccagctgaagggcaagaatccgaaagagatagcagaatacaagaagggcttgcacaaggagaaattgattactgtcgcacagtacattggacgagccttcttgtacttttaaaataagagagtcgtcatggccgcttataattttaagtaagtccggtacagttatcttgtatacatatgtcttattttagctgttactaactaataataatgttgttaatatgtagcgatcattatatctgtttactcatccaccctaaagacggaaccgtggtagtcttggatcctctcgattacaatcacaagcaatacaaagaatttctaaccatcttacagtagtaagttattatgactcttgcatttgtatatggatgtattacaaataaatatcctccttactctgaaacggtatgacatccatacagttcataccaatactacaagttcaagggtggagaacagacccgaacacgggagaagctgctagtacgtacctattggccggtaatactccactcactttatatattccaatagtttcactaattgcaaattataactacttttttctatgatatgttcttcagtgtcacaagcaaccgcgaggaacggtcctttgcgggtattatgcgtgcgaattccttaaggttaatggacggtacaggactaacgcggaggatgtaagtctctatactatgtactagacagctcttgatatttttgatactaatatattgattaatttcaatacatgcagttgccaagattagaatgtcgaacaagctttgacgatacaggtatcacaaatgtgcagcgtgatctgtgccacttcatccaccatgagtgctgtcatgtcaaaggagatttcttcgacccagagggtgccctagcggcaagtgacgaattcaaggatcttcaggagtggaacactactatgccataatgtaactagatgacgttatttaaagtgacaatgtaaaacaatattgtaatatatatattttggcaacacttttgatttatgcaatataagtagatttctcagtaccaaatgcttgataatcttccaatatatgtacctgcaagaatttctaataaataatttaaaagtaatttacggccaaattatatttaaatttcaatattttctacatatcttcgcaggcggaagttttcttttttgcaagcggacgattcctattttcgcaggcggaccggactagccaatgtccacctgcgaaaattatcttcgcagacggacggccgccccgcctgcgaagatcgcgatcttcacagtcgttggcttacaggcggacggccgccccgcctgcgaagacccttttcggccgcttgcgataatgcttttcctagtagtgggtattcgtcttttggtgcagatctttgcatcaacaactataccgatggctgggctcgaatcagatgcacctgaaaccaagtatggcctgttgatttggtcttttgcaggttcatgtcgatgaaaacgggctgactcaattcacatgcacggcggggtttgggtgggtggggctatgaaagaaattgggtttttttttgggaaatttcaaaacaagggtgatgattggggggaatttgaaacaagagcattaattggggatggtttatgcaattattttgatgactagatgcaagttatgtatatttctcaacatgtataaactttcaattagaaacttttttctacacctaaacatatactattaaaaacagagccatcagtactttccaaatccaaaacaaagtcgtcaaatctttccgaatcaaacccatccatcggtactttctaaaacaaaaccgttaaattattattcgtagaaagttatttagcacggcaacactatttgcatctgtgtaaaaatcaattcgacacacaaagtttgatcggaacagtgcaaaaattatttattaaaatagataaccttctacggtaacaatatttgtacatatgtataaaattgcaagtagaaagaaatataaaatttctatacacaaacttattttttaatgaagtgaaaaatgtttaaccataaattcagaaacactttatggcaccaatactgtacatgcataaactttcaataaaaagttattaaactttgtaaaaacaatctattatctatgaagtgaaaatattttatccgtaaattaatttatgaacttcctaggataaactttgtttacccacctctcaactttgcgtatcaccagaacaatttactcaagtaactaaaatagtatcggaaaaatgggaagggaggtattctcatgctgcatgaaacggaaaagaaaagaaaatacgtaccgcaaattcttgcgtagcctaaaattctgcatcaccacccgtaaaataacaagcagaccaggagacagtgactaaaaagaaaaatgagaacatagcgtgacactaccttcgcccataaatataaaagttttttttctatggatctacacgacagatttttccgtgcggtcgaatcagattttctcgtgcggaacttcggcccgtctagagcaaatcgtctgcgaaaatcactatttttgcgtgtgggtgcttatgccgcccgcacgggaaaataaaaatccaaaaaaaattcaaaaaatggaaactctaaccctagatccgggcaccccaccgccaccgccgccagatctgggtggggggcagctaccaccgccggtccccgtcgtcgtcgttggcagtggcccccgtttgcccgccgccgcctccccaccgtccacccgccgtgcgcacgccgctcccggtcaccctctgccgcgagcttgctgtcgtgcgcacaccgctcctggtcggcgagccacgccgctcccacccaccgccactcccgccactcgccgtcgagcctgccgctgagagccgcccagaggaggaggagaaggaagcacgcgccactcccggtccgcccaccgccatcgcgagcccgccgccgagagccgcccggaggaggagaaggaggcacacggcgccacggcacaggagaaggagaaggtgagagggagaggaaagtgagaggaggagaggataagtaggaatgagagaggagagaaggggccgggggagagaaagaaggaatttaaaattttttgaataggataggagggaactattatttttatgtgctgatagattaagaggcccgcacacgaaaataggcttattttcgcgtgtgggcctgttacgtgacccgcacacgaaaattgatttttctatgcgggcgacgacctggctccggtccctctatttttccgtgcagtctaacttacgggctgcatggaaataaaataggttggtgtccagaaaaatcaatcatgtatgtagtagtgatctaaattaaacaacggtcggaaaaaatgcataaatatttgtggacgaaagtagtagcaaacaagcgtgctctgaaagattaatcggtgcatctatcacatgggttggcgttcgctcgttaagatttcatgtttgacccgttgtagctcctccgctagcgagccaacacaaagattagtccacaggtaaaacttgactgaggtataggcttggtcgtctagtttcgtcttcagcactaaaacactaaacttatgaaaatagaaaactctagcaaggctcattatcaaccatcgtactcagcaagccacaccaataatacagtcatataagaaaagacaaagaggggtttctggctagttgcataaaggcagttgtaagcatctatagttgaatacagtaaaacaattaattaattatgttaacattaatctccgttgaataacgctacaccatattgaacaggtccaaccaaaccatctaaactacaccaatttattatgttaagttaattaatagtgagactaattacgactaacctcctcgatcgcccgtaactacatacatggctattcaaatagttttacactgaccagaggtgtacaactatacccatagaacacaatgccccatcatatcaccgtgccatgcctaacacgttgccatgcgagtgattatgataagatccttcgcataactcactccaaaccatccacatcacgatgagatttcacccccacccctaaaacaggggggggaggcccccaaatctagaagccgcttagccattaatccgtttctctataagtgaaggttaaatcccaaagcatcacctgataggtccatgtaagccaaaaaaacaggaccatccgatgatgaaaaaaaaaaattaaagagagccgtaggatcatatcagtaaaacaacctgacagagcgttctctcgagctttccaggcttccagcataccaataccacaccagaacctcccttggcttgctcacacatgggacatacagagcaaataaaagaagggaaaatcacatggcagaatactaactttggtatatcagcgaaaaaataatactataacaaataggtagttaaatgtcagattgttctttataaatcattaggtttgtacgattctaatataaatatacataataaaattggaaaatagtaaatttacacatgctataaaacttatgcactaatggaaaatgagtgaaggataagggtaatgctgtagcggagatggcaagaaggcaacgacttatgctacgatgaaggtgatgaaaaatattaataaaattatgtaaacttcattttagatattaatataaggtttggataaaatagcaacaaaagttcgttgtcgtactaatatagttgtcgaaactagatttcggcaataataaaagggggtggctatcaagctgaaaaagtgtatgggtttggagacaaaagatttatacaggttcaggccttcttattcaagaagtaataccctactcctgtccggggatgaatccgccgagtgtattattgattgtatgatttggagaaaatcaacatgtgcccctagaggcacccggaccccccttatatatgggaaagagtccgtgttacaaaagataatctatatccctaacggaatatgcaaatacagatcaaatacagtcgtagccgactaagtctcaaggtatttccttggtgtacaagttgagaaacaaacccgagacacaaataagatattctatctatattcggtatcctatattcagcccaaatatcatcgccgtgtagatatgggatatccataatctccacaatagtttattacatatcaaaataaaaataagtatttttacattccaagtagacctcctaacgattttattctctaaaacattcagaaaattatatataagatgaaaaattcaatatgttcccaatattttttttaattatgtacaatttattggcgactgcaccttttatgttggagtccatgtatttattaataatagtataaaccaataaataatctttctagaaacacagtataaattggtacgtcatctagcagtaaaagaataattagccataaatataagcatccgtaccaagtctagaacttaaatctgggtgtaggttctactataaggaacctaacctattaagatatgctcacatcgcgaccaataaataatattgtaaatgaacactcaaatcatttaataaaatctatttaatttataaatatactctaatcatttaattacaatttgattatttgaagaaaaagtacaaacaaacacttaaaaacatgtaaaggcactcaatatagaggaggttaatatcgcgcgaatgcacatctatatacacttggtttagttgaatgattaggaccaataaaacatggcctggtgtctcgagctcgcagctcgtcaatatgctaatagtaaataatgtgattatcccattagatgagctagtggtaattaagcatggctaagtatatctagctaggtcaacataactaacccaagccagtcaaattattatcgaatgtttcacaaaggatggatatcaagtaggcatggccacaagcaagcaaataggtattgcatattcccatgtaattagcaaaacatgtacaataatcattttaaaaagtaggctcaacatgcacaagggagaatatgtgacttgccttgcttcttcgattaattttctgaacgcttttcattgcggtggtgatcctccgaaatggcggattctacatgctagcacacaaactgaggaaaaaaccaagtaaacagtacatgaaaagtaaacaaacatgtagagctcaatttttgatgaatttcgcaagttgaatggcttaatttggagttcgtatgaattagttatgaattttacaacatttgagccatttaaatcaatttatggtattaaaatgatttatgatgtcatttattaattattcttcaacaggaaaaactaggattatgacgtcacccgggggagtggcgcccacaagtgggccccagctatcgatgactcaagggggaagggcacacgttggaccgagtcctcgcatggccccggacagtgtcccccacgtgttcagcgcagattggccggccacagccaggccaaggcatggcgcataatggaccgggtggccagcgccggcttgactgaaagtggcggttcacgtgaccagatggccgctggcagcaaccatctggcatgccggcgtgcgtaggatacggtggatgaagccggaaaggaagagtgggacctcaccgaacaatcgcgcgggcaacacgacttaggaggcatgacggtggcgagtgcttcccggcggcgcttcgtgggtcgacggcagaaaggggcttccggtggcggttcacgaaggcggaggggaggacaggctccaccatgacatagcgaacaaggtgatagagtttggaagaagaggtgtggcacggtgccacaagagaagatggcccgagatcggtggaaggaggaatctcacaggattgtgacgaagatggcaatccggtggcctttggcaccgatggggaggtaaccgagataggccttgatgaagcgaaaccaacagcacaagatgtgcagcgtttcggcagctagagcggcgttgtgtggcagttggaagaggtggtggctttgggaagatggtgaaagcgttgttccagtggtgttcggggacgatagaagggtggccgagcttcttcttgtcccggaaatgctggcggtggtggagtcatgacatggccaagactggagcggtggcaagcagcggctggaaggcgaagaacggcggcgtagcttgggtgccatggtgagggagtggtgagcaattgagctcggcgacatggaaaaatgagagggggaggttcgacggttctttcaatgggctcagggaggtgggtcatggccatggaggacggcaaccggtgcgaagtagggcgatgatgtgtgtgggaggtggcttaaatgggcagagatttttggggaaagtgggatggagatagggtgggggagtgacggcgacctagtccacgccattggaacagggtgctgggaaacggcgaaaaaggcggcggcgtgtttaacattatggttcggtggttgtaggtcagacataggggatagagctaacaggtgggcccccggccccacctgctggcgagcgagagagggggctggtgatccgactaggctatgggaactagtcgagcggggcggatgggccatgtggaagtgtgcggcctggttgagaggacgggagcgacgcggccgacgggacaggccgagcgagctagtccagtgcaagtgctaacagaggaggaggccagggccgacctagggagaggaagggaggaaggattggttggaaaaaacccaaagctgagggagaggatttttattcgtttttctatttaactgatctctgaaatgaactttgagctttaaaattcgatattgagcaatttaggtcacggagaagattgcaaaaatattcccagccatgattttgaaaggaaattttaagatatcgatcgtgccgcgtgcttgacaagcgtgctgccttagtttggttggacaaaactaatgccacaacttttttttatttgcatgtgcaaccgaactgattgaaaacaaatctgttaggcactgcgactggggcgacgataatgggcgtcagcgatcaccccccatccccctataccggcctctccccctttctcctcccccttcttctcttactactatacaataaattttaaaataataaaaaaacaaagttagaaaattttatgtataaaaatactatataaaaaaatatttgaatttaaatttaaatttgaatcgggtatataaaactttctacttataaactttgggtctataaactttaggtgtataaactttaggtgtatagaaatgctatatataaaaaaattgaatttaaattcaaattcaaatttgaatcgggtatataaacttttgacttataaactttgggtctataaactttaggtgtatagaaatactatatataaaaaattgaattcaaattcaaattaatatttgaattcaaattcaaatttgaatcgggtatatataaacttttgacttgtaaactttgggtctataaactttaggtgtataaactttagatgtatagaaatactatatataaaaaaatatttgaattcaaatttaaatttgaatcggatatataaacttttgacttataaactttgggcctgtaatctttaagtgtataaactttagatgtgtaaacttgaggtgtataaactttaggtgcataaattttctaaaataggaaagtaatgcggtgccaataaataaaagtggagggagaggggattgatcgccgggagcaattgatcgctcgttaggattctcgctgcgactgtatctacaagccaaacagatatgtctcaaaataaatcgatttctaatatctcaaaaaaaaactttaatagtaagggtaaaatatcaaaatacatctcttattaataggaaagtggtatttgtaggtggataaggtaaggggtgtattgaagacaaaaataaaacatctcaatatgtttctgtagagagggtagctcacacaactagaaaaagtgtttttccatgcggcccaatcacattttcacaggcgggcaagccatccgcctgcaactcaacacttacgaaaatacttgattttcgcaggcaagcaactggtccgcctgcgaaaatagcttcgagcgctaaaaaaaatgggcagccaccgccgttttcggcggtagcttcctattcacaatccagttcccacccattccctatccattcccaatccagttctcacccattctccatccaatccagtgaatccaaattcaatagagaaatcaccagttcatccggttcatccaaaatcaccagaatcaattctagcaaagaaaccaaataaaatcattcctaaaatcacggccgccgccttgccgtagttcgccgccaccgccgcacgtccgcgccgcgctgtcgtccgccggcgccgcacggccgtg

SEQ ID NO: 16861 - DNA, 14581 bp, Oryza sativa
  unsure (1)..(14581): unsure at all n locations
tgccgccatccgccaccaccgcctgccgccaccgccggtagccgccgccgcctccggccggcggccggggagaggaggagaggtcaggggagggtagaggccgacgagagaggagaggtgtggaggggaggagaggtgtgaagtggagggacgctggagacttagaaaaaatgtagctatcgcaagtctatttatattccaagtctattttcgcagtttcgcaagcggacagtaaatttcaccccgatttatatttttgtagacggtcatttggttctaaggatcatgtccgcctgtgaaaaaaagaccccccacgtcgggaaaaatgctttttatagtagtgtcacaggctaaacatgaatttattttagacaaatcttaaactttagagatcaacttgtttgaagtctaaaattattctcggggaaaatacatgcgtctacgtgcttgcgtgctaggtgttcgaaaccttcactgtaaaagatacattacttgcatgtagtcagaaaattttcagggttgtaccgtgttcgatgatgatgaattgtttgaacggagttcgaaaaattttggtggatacccacggaccagcaccagcgtggtacacacaggagcggatccagcgttatatgagtggtgtcagctaactcacttgcatgttgtgagttgagggtgacatcatcggcccaaaatcctggatccgctcctgaacaagcatgctctaaaagattaattggcgcatccatcacgtcggtgggcattggcttgttaagatttcatgtttgacccgttgtggctcctccgctagcgagccaaccgagtggattagttttccgtagcccctctttatctcactgaataagtagacgcttctccagctctcgcaagaattgtgaaaaacgaatggtatcctggcgcgcctcttcgcggaggcccatattcatacgtactgaaagtaattagaaatttattacgtgattagagcatctccagcaataggcctgattttagagtccccaaaagttaaatggggctacacctatttttcgagatcccaaataatggctccagctccaacagtaacccccatttgttagcctctatttctttttctcttctattttgatatatactacatatttatttcttgattcacagcagaataattcaaacataaatattaataatacataaaattcaaccatattcaaatccacaattccaaacaccacaattgaaatttaaattcatttttttctcttcatattgctggcagcgcctgtcagatgcaaaaacatcttggctgttctagatattgttgaagtgttccactaatatacttcaggaaaaatcctgagaaaacttgaaaccaaagtttcagtaatttgcacttcaaggaagagactagaagcgtgcaaaccaatgtcgtcttgactgttctaggtatatccgtatatctgttttgactacaaatcaatctgaactaatgaatattgatgtaccagctatgcttggtggacggtctaatatgcaaatcaatatgagccaaagataagcagtttgatcatgtaccacctctgctcggtggtggacgttcgcgacaataggaacatcaacagccactaccacagaaacaatttctatgtacaagacctttggtaggttgtagatggaccataacctgccgcatctggaaaaaatcgagcggcatttttacatatggcttcttaagatgcccatatagaaaaatcgattttcccatacgagtctaagacaggtctgcataattatccgcacgcgaaaaatcggatttttgcgtgcgggtgcgtcactcgcacgtaaaagtagcgatttttccaaaccttttcgcgcgtgcggttgtcccttccgcacgcgaaaacctattttggaccatacgcgaaaatccttttttagtaaagagcaatggtgctgctgccgatgagagcaaggccaagaaactcctgaagagggcgtcgtcgttcacagacagatcgtcgtcgtggtgagcgatggcgggtgcagggtagggatcaaggagctcgattgacaagttcaacggatgacgtcgggtagcgcagcggtcgatcggggtagacgaggacatgacagagggaaagggcaacagtggacagtggaaccaagagcgacatgagaaaagtgcgctggagatttttcatcgtgaaaaaaaaaagagagataggggctgaacctagagcccccacgattgagtactggggggagagatttgggtgtcttcctagggcctcgctggacctcgatttttctctcttcacctcaaaaactctttggaggtttagtttaggtgctctactggagatgctcttagaagatcattattgggttgaggcttagttattttgagtagtatctaaatacccctctgacggagcgtggggctcctcaccgggagaccgcgcgggcccccctttgccggttcggccgggggcgctaggtgaggttctaagcccccgatctgaggattgtcagcgagaagaagcgcacaagacacgggcgacgtagacaggttcgggccgctgagaagcgtaataccctactcctgtgttctggtggatctgtgtgtgaaggagttacaaagagctggagagcaagagagttcaaactctagagaccctcttcctctttttctctcctctccgagctcccctcttctccaagtgggcaaggtcctccttttatatctcaaggggatcccacatgcaccacttctacctactcttcttttgggtggggactcaccctatcttcccaaaaaagaaaaaactgacttgcgccttcgcctggaagctaaatcacagcttgtctttgagtgaggcccagcgtcatcactcgcctaacaccggggatctccctgttactccctcattaatgggcggagatttgccatggctgttgtccgaatgaccctctgatgggatgggccatacctacctccactccgccggaagcaggcgcaacgtgggagcacggttgtctgccgatgacgtgaccggcgtcagaccagtcacaaaccggtcattcttgtctaccacgcgtcagtttagcatgccacacgtcagcccttcttcataaaatgacttccttgtaatggttgcgatgaaacctggtatgaatctagccgggactgacgtgctaactccaggagtcagcacgccggctccggctagggacgagtgcctagaggctctcatcattccgacgggacggggcgaggcgtgcgaaaggccgcctgttgccacctaacccgcgatctgaccggtctgtgaccggtcacacactgtgacctgtcacggaccgaatgagtgtgctgcgctgcattaaatgcagcgtggggcgctcgtccaacccgcaataaacgcggctaggtgagcgccgctgtgctcacctaacccacacacgtggcgccaaacccacaggaggtcggggcgccccagccctcggggccgaaacgggagcggcccgacccctcggggagacagagggaggggcggccacatcaccctcgggcccgacccccccgagggggtcaggccacgtgggtgaccgcggctgccccaaacctctagccaagatacccccggtcccatgtcaccgacagtagcccccggcgttatgccagggcgatcgccttcctcgaggaaagcgctcgggcgtgacgccactccttaagcctggtgacaggcggggccggtctctacaggcgggcaggaatccagtggtcgcaaatcgcgcgcatcggcaagggaaaccgaccgacaataatttgcggctttcttcaagaccgctacattacttaagtagcgcacgaatcgggacgagccggttcgtttcgcctggagatgtgatgatggtgcatcggtcggcgagcgtagttaacgcgcgcacgatatgtcccatctcgactgccacggccgcaaatccgcctcgtgcgccgcaaacgggcgagcgcgattagtggaggcgtggacgcgagagacgatggggcgaggtagtaggcgcggggatcgaggagcccggcatagcgttggcaagggtactaagacaccagggaagggatttgtttccttcctctcgccactcttccccttgcctttgccacttgtgctctgactctccgtttccggcgcctacnccctgccatactcgctcgctctcaagctcctcctccgccggcgtcatggcacggggctccgcaccgctcgagggtagcgtgctgccgccttcccgcatcgtgagcgagaggcaggccgggctgccgcgccgattcatgccggaatctgccaccggccgggaggtggtcgcgctgggcgagggacgcccggcccgcattacccggggcggtccgtcttcttcctctctttcgcaatggcagggctggtcccgccattctcttctttcttcatagatgttctggagctttatgatctccagatggcgcacctcacccccaacgcggtaatgacgttggccatcttcgcgcacctatgcgagatgttcatcggggtgcgcccatctctccggttgttccggtggttcttcaccgtacaaccggtgtcgccaccgtcggtagtcggtggctgctacttccagccgcgggggccggtgctgaaccgctacattccctgcgtccttcgcaagaagtgggacgactggaagagcgactggttctacacccctctcgccgacgaagcacgcctccgacttccgagccagcccccggcgcaagcctccagctggcgggcgccggtagatctgggagacggctacaacgccgttcttgaccgcctggcaggtctgcgatcccaggggctcacgggggccatggtgttcggcgactaccttcgtcgccggatcgcgccgctccagcggtgcgcccggggcgcctgggagtacaccgggcccgaggacatcatgaggacccaccaggggcgtaaatgggactgggaccctgaggatttcaggatggtggtccaacgggtgctgaatctcagctccatggaggcatccctcatcccccaaggggtcctccccctctgctgcgatccagagcgcgccaacatcctgaccatcatgcaggaggtcggggcgtcgggggagcgggccccccgaggccacgatggcgcgggcgggagccgcaggggggaacaacctaccccaggagggggtcgtgcttctgggccccgtgataggggcccggggggcagccgccctgccgacgcccgggggaagaggaaacaggaggataccccctccccatctcctccccgagggggcggggcggtgcgtgccaacagcaggcgcccggagggtgctgtgccgacgtcgcagcccgagggggagcgaaaaaagaagcggctccgcaagatggggggggaccgaaccatgccgaggaaacctcatctccccccaaggtggtcgtttagccgacctcctcgcaggttcgtccccgcgcccactgcggcaagttttcattctcccatctcccaaggcaagttttcactcacccgtttttcgtcttctggtttttcttctgcctcagcgagatcccgtcgcgcccttcccgccattccaagtccggccggtctgaggccgaggagacggcgaccgcggaggcccggaggcggggagttgaccggcgagaagccgcagactgcctccgggaagccgaagaagctgcccaggaggcggtccgggctcgccaggctgaggaagccgcttgggaggaggccagactccgccgggccgaggagtccgtccgggagacggaggcggcgcgcgaacgccgggcggcctgccaagcccccgactcgactccgcccgaggcgacgacgacttccgaggccgcccacgacaaggccgcgggcgcgccgctcgggcccgacccttcgggcgatgcttggggcgagccagcttcggggaacgcccccgagtccggcacgtccatcggcgggccgagccgcgcggcgcccacaccgaggcggctctcccctctgccttccgctgccccactgagcgctgaacccctcctgcaggccttggccgctgcgaacaccacggtgttggacgggttaagcgcccagatggaggtcctgcaggcagagcgggcggaggtcgatgcggcgtgggcgcgcgtcgaagaggggcggcgctcggtggaagccatggtggaggcgggccgcaaggcacaccgccggcacgcctcagagctcgaggcccgtcgtagggacctggcagagatcgccagggaggtgaaggaggagcgggagactgccctcatcgccaccgccgtgttcaacgcggcgcgagacgacctctgcctccaatacgggagccgggcggcggagctagagaagaagctcgacgcgtcccggcagcgcgaagaggcccttgaggctcgcgccacggtgctggaggagcgcgcccgcgccctggacacgaaggaaagggaactggcgggtcgcgaggccgccgtcgccatccgggaggcaacgctggcggcgcacgaggccgcctgcgccgaagaggagtccgcactccgcctccgcgaggacgagctcactgggcgggagcgagctctcgaggaggccgaggccgcgacgcagcggcgggaggagcaggcgcgcctcaatctggaaggcgcccgcgccgagagggccgcactggatcagcgggccgctgaattcgaggcgcgggcgaaggagctggacgcgagagcgcgcagcggcggggcggccgcgggcgatggcgacctagccgcccgcctcgcagccaccgaacacactatcaccgagctgcagggcgcgctggactcgtccgccggggaggtcgaagccctccgcttggcgggcgaggtagggcccggcatgcttcgggacgccgtctcccgtctagaccgtgccgggcggcaggcgggcctctggggcgggcggaccgcgaaatacgccgccaaccaggggggcctcgcccagcgcctctcagagatggccgggaccctccagcggctccccgaggagctcgaggagacgatcaagtcatcctcgagggacctcgcccggggggcggtggagctcgtactggcaagctaccaggccagggaccctgacttctccccgtgggcagcgctggaagagttccctcccggaaccgaggatggcgcacgcgcgagggtccgggacgccgccgaccacatcgtccacagcttcgagggtacggcccctcggctcgcgttcgcgctcgactccgacgaggagggcggtgacgacggtgcggacgacagcgacgacgaggccgacggcccgggggcgtcggagtgagcccccaggcccccgccaatcttaataacttttccttcttcttccgaggccttcgggcccccttcttgtataggctgatttaatttgtaatcaagtaaagaggaaatttctgcgtcaattaagtttgttgtgtgtatgagacgaggatggtctatgccgcggtccttctatgtcttggcttgaacgagggctcgtgcccaggtcccaaccttaagtggcgcgggtcggggctagtgcctggggagatccgcgtgtcgagactggccaggccgggagcgtggtgaccgagggttatggatgacccgattgtgggcctttgccgattcccacccggagatcaccacgccccggggcacggctcggttctgggccccgtttggcgattttagccggctcgggccaccgagggcagggtcgggcacgagcgtgctaattcaagccaagattcttcaaaagaaaacgatggcacagacacaatcctcaggaaatcgaaaatgcttttactgaaatacggaagagaaaaaagataaggatatgcatgtggtagcccccggccaaccctgcacgcccgggggggtacggggttggtccgagcccgaggcatgacacccgacccccactaggggtagaagcgacgaaggtgttcgatgttccacgggttaggcagctccgtgccgtttcccgtggccagccgaacggagcccggctgggggacgccgatcactcgatacggaccctcccacattggtgagagcttgctcagtccagcacgcgtttggacgcggcgtaggacgaggtcgtcgacgcagagtgatcgggcccggacgtgacgctaatggtagcgccgcaggctctgctggtagcgcgcggctcggagggccacgcgccgccttcgctcttccaagtagtcgaggtcgtctcggtgaagctgatcttgatcagcctcgcaatacatggtgacccgaggggaccttagggtgagctcagatgggaggaccgcctccgcgccgtagacaaggaagaaaggcatttccccggttgctcggcttggcgtggttcggttcgcccagagcaccgctggcagctcctcgatccacgagtcgccgtgcctcttgaggatgttgaaggtcttggttttaaggcccttgaggatttccgcgttggcgcgctccacttggccattgcttctggggtgggcgggggaggcgaagcatagcttgatgcccatgtcttcgcagtagtcaccgaagagctcactagtgaactgggtgccgttatccgtaatgatacggttaggcaccccaaaccgagcagtgatgcccctgatgaatttaagcgcggagtgcttatcgatcttgatgactggataagcctcgggccacttagtgaacttgtcgacagcgacatacagatactcgaacccacccggggcccgcctgaacggacctagaatatcgagcccccagatagcaaacggccacgaaagaggtatggtctgcagggcctgggccggctgatgggtttgcttggcgtggaactggcacgccctgcaccgccggaccaggtcaaccgcatcgttgagagccgtcggccaatagaaaccctggcgaaaggccttgccaactaaggtgcgtgaggcgaagtgggctccgcactcgccttcatggatatcggccagaagctcgacaccttgttcccgaggaatgcacttcaggaggactccgttagccgcgcgccgatagagggtcccttccaccagcacgtagcgcttggagatgcgctggacgcgttcactcccttcgcggtcctcgggtagagtcttatctgcgaggtacgcctggatttcagtgatccaagcaatcaatctaggggagctgggagcgctccccttgggtcccgaggcctggactccgacgggcctcgggggccgttcaggcgcgtccgtctcccctagggggtcgggtcgcgccgacggctgggcaagcctttcttcaaaggcgtccgatggggtctgggctcgcgagtaagcgagccttgagagttcgtcggcgaccgcgttatcccgtctgggcacgtgccgaagctctatcccgtcgaaatggcgctccatacgccgcacctagcgcacgtaagcgtccatctgcgggtcagagcaccggtactccttacagacctggttaacgaccaactgggagtcgcctaacatcaggaggcggcggatcctcagtccagctgccactctgagtcccgcaaggagtccctcgtactccgccatattgttggtcgcccgaaagttgagacggaccaggtatctgaggacgtctccgctcggcgaggtcaacgtgacccccgcaccggcgccctgaagagacagggagccgtcgaactgcatcacccagtaggcggtgtgaggcagctgcgaggggcccgagctggcctcggggacggagatgggctcaggggctggggtccactccgccacaaagtcggcgagggcctggctcttgatcgcgtggcgtggttcaaagcacaaatcgaattcagagagttcgattgcccatttcaccacccgtccagtaccctctcggttatgcaagatttggccgagggggtaagacgtgaccaccgtgacccgatgcgcctggaaataatggcgcaacttcctcgaagccattagaatagcgtaaagcatcttctgggcctgagggtatcgggtcttggcgtcccggagggcctcactaacgaagtagacgggccgctgcacctatcggcggggccgatcctcttcgccaggggccgcatctccagggcgctcttcgtccgagaggccacgcggggcgcactcggcttctgtgccgacgacctcggggtcagagggcgacaggcgcggccttcccgcagtggccccggggccatcctgggggtcgggggcgcctagcaccgtcggacaagcaggcggagggccagctccggccatcgggggcctcgggccgccgttcggctcgggggcctctcctgcctgctctctcccaggtcgagtcgacgcagggtggggatgcgcggagtgagggttgtcctcgtcgcgctccacgaccaacgccgcgctgaccacctgcggggttgccgccaggtagagtagcaacggctcatctggctccggggcgaccaggactgggggagaactgaggtacgccttcaactgagtgagggcccgctcagcctcctccctccaggtaaacggcccggagcatttgaggagcttaaataggggcagtgccttctctcccagcctcgatatgaaccgacttagggcggccatgcagccggttgacgcactgcacatccctaagcttgctgggggggtgcatccgctctatagctcgtatcttctcggggttggcctcgatgcctcgggcagagaccaagaacccgagaagcttgcccgcaggcacgccgaacacgcacttatcggggttcagctttatgcgggcggagcggagactttcgaaagtttccgctagatccgagagtaaggtctcttggttgcgcgtcttcacaatcaagtcatcaacataggcctcaacattgcgtcctatctggctacccaaagaaattcgagtagtacgttgaaaagtaggacccgcattctttaacccgaaaggcattgtcgtataacaataagttcctatgggggtaatgaaagcagttttttcctcatcctccctagccatgcgaatctgatgataaccagagtatgcatctagaaaacacaaaaggtcgcaccccgcggtggagtcgacaatctgatctatgcgtggcagggggtaagggtccttaggacatgccttgttaaggtcggtgtagtcgatgcacatccgaagcttgccgttcgccttgggaatgacgaccgggttcgccagccactccggatggatgacctcacggatgaatccggcctccagaagtcgcgtcacctcctcgcggatgaaggcttgacgttccggggcctgccgccgcactttctgccggaccggccttgcgcccggccgcacggcgagacggtgctcaatcacctccctggggaccccgggcatgtccgccggtctccaggcgaagacatcggcgtttgcccgcaggaaggagacgagcgcgtcttcctatttgccgtccagaaaaccaccgattcgtgtggtcttggacgggccgtcgcccatggcaacctccttgaccgggacctcgtcgcacgtgatcatccgctgcctcggggcggctgggacggaggtgctgagcctctcgttgccaccctcgggcttggatgcggcggcgaggtggtccgcgcgctgctccatacaagcaagcgcgcctttgaggtcgccatggacagagatggggccaccggggcccggcatcttcatctggaggtaggcgtagtggaccgccgccatgaacttcaccaacgcgggcctccccaggaccgcgttgtagggcagactgaggtccgccacatcgaagtccacccgctctgtgcggaagttggcggaaccaccgagcggccaggtgtgccccggcgtcacaccgatgatcggctgggacggccggagcaccatccccggggccttgatggcgtcaaaggctgcgggggaaaggatgttgagggctgcacccccgtctatgaggacacgccccaacttcacattgcaaacggtgggggaaaccaccatcgcgatctgtcctccccgggcaacgcacggcgggtggtcggtctagtcgaaggtgagggcaacctccgaccaccgcgcccgccgtgtcgcctcatgggtaggggccgcggccagaagctctcgcttcatggccttgaagctccgacgagaagcgtgagcgcacgctcccccatcgacggtggcgatggtggccccaggctcctagaaccctaggtcatcgtcgccatcgtcgatgtcctcggctggggccttctgcttggcctcacttcgccggttgccggagggaagccgccggggcattgccctcacggcgctcctgcctcctctcctcctcccacttcctcgtccgctcagccaaacttttgaccgcgcggcagtccgcgaggtcgtggagggaggtgttgtgcacggtgcaccacttgccggtcgggtgctccctgctgggagcgccggcctccttctttttgtcgctcgcaggcctcccctttcgggtggcccgcgaagcgccctcgacggcgaggacgtgaccctcgtcgtcggaatgggccgacctcttcttcctcctcctgtcccgtcgccctgaccgagcggcggatccgggggcggccgaagctgccacaccggaaccggtggagttccaggtccaggcctcctccttgcgagccacatggtccgcgagctgaaaaagctccgcggtggtctggggctccttggaggcgatcttttcgagcatgcggttgtgccgcacgcctcccctgaacgcgtagattaccgcgtgtgcggggatgcatggtatggtgttgcggacttgacagaaccgctgaatatacgagcgaagagactcatcgtcccttcgctgtaccgcatgcaagtccgcttcttcacctgggcgcggatatgtgccttggaaattcatggtgaactgctggcacaaatcctcccaagagtggaccgacgcgggcggcaagttcattagccaaccccgcgcctgtcccttcagggccatggggaagaaattcgccatgaccctgtcgtcacccccggcggcctcgatcccggtcgtgtagacctggagaaactcggcggggttgacgcttccgtcatatttttcggtgatggtgggccggaaccttaggggccaacggacgttccgaaggctcgccacaaaggctcgacagccgacaccaccaaacgggggcatggggggctggcccccgcgcccgaaccgaagtggcgctccggacgaggaagcgccttccgttgcgtgggcagcacgacgaccattgcgccggcgctcgatactgaggcgggcatccggccccctacgcacatcttcttgggtcggaggcttgacgagggaatggcagacgaacggcgggtaacggccgccgctcgccgcgccctccgcctcgacgacacggagccggcggtagcagcgccagaggccttggcggcggaggaccgcccaccggcgcctaggcgctgctgcgccgtcatgaccaagtcggccacgtcatccagccaacgtcgggctggagtctctggatcagggacgacgggcgggtgacgcaagagcgcgcccgcagcttggagcgcgccctggggcgtgctgccatcgccgtagacgaggaggcgacgctccccgtctcgccgtccttcttcatcgctcgtgggcggcgaagtcgcggatctttcgacccccttgagcgcctnnctccggctaagacttcggcaagagggggcggtggagtacgagctcgacggcgcgggttctgctccccgtcgtcaccgctagcgctcggagagaggttgtgcgccactgtccgttcggccattgggctgagccggagaagcttgacgcacacgaaagaggacgaggccttagaaaaacacacgcgccccctacctggcgcgccagatgacggagcgtggggctcctcaccgggagaccgcgcgggcccccctttgccggttcggccgggggcgctaggtgaggttctaagcccccgatctgaggattgtcagcgagaagaagcgcacaagacacgggcgacgtagacaggttcgggccgctgagaagcgtaataccctactcctgtgttctggtggatctgtgtgtgaaggagttacaaagagctggagagcaagagagttcaaactctagagaccctcttcctctttttctctcctctccgagctcccctcttctccaagtgggcaaggtcctccttttatatctcaaggggatcccacatgcaccacttctacctactcttcttttgggtggggactcaccctatctttccaaaaaagaaaaaactgacttgcgccttcgcctggaagctaaatcacagcttgtctttgagtgaggcccagcgtcatcactcgcctaacaacggggatcttcctggtactccctcattaatgggcggagatttgccatggctgttgttcgaatgaccctctgatgggataggccatacctac

SEQ ID NO: 16862 - DNA, 16249 bp, Oryza sativa
ctgcattaaatgcggcgtggggcgctcgtccaacccgcaataaacgcggttaggtgagcgccgttgtgctcacctaacccacacacgtggagccaaacccacagggggtcggggcgccccagccctcggggccgaaacgggagcggcccgacccctcggggagacagagggaggggcggccacatcaccctcgggcccgacccccccccccccccgagggggtcaggccacgtgggtgaccgcggctgccccaaacctctagccaagatacccccggtcccatgtcaccgacaccctctatcctagaaaatagctatttttagttatgtgtatgtatagccaaaagtagctatatattgagacatagagaagtatacaagttcgcaatgatattaataattaaggactaattaactgcttaacaagatctaatttctaactttaacgtttgttctatatttatttatacacaatcattatcctccaaaatcaaattataccaaatgacgcttcgaaaatgccaccaagaacattacccagagcgcatagagaagtgtcactttgcagcgaactgtatttactgtgatactaggccaaagaattgtgagaaagggtagtatatctgactattgaattcaagtccatatcatctatcacttgttgcaagttaattaccttgcaaaattgcttatattttaccacctatatatgatggcatcatattcaggagagagatgaaaaatggattaatgtgttatatggattaccgtgttatattaaaacaacaataaattagagagagataatataactaatgagaagaatatattagtatttgaaatggtaatgatgtttgtttttttaattatctctttcaacgcactttcctttggctagttttatgcaattgattagttggtttgaaagcataactaaaattgtggtaccagtaatgtccaagagtcctaagttacaatcattattatatctgaaattcctatgatggtgcaaaataaaaacatccctaaaatgctaaggcaagtttactagggagggaatacaacgaaagtaattaatagaaaaaaggttttgaactgataaaacttttgatttgcggacccagatatgcaagagggtacaaatcatcttattttagataaagttttgtcagtgttctagattccccatatatgtgaactaggctctgcggagcccaccatattctaaatcatgtaaagaatcaagtctcatatgtatggtaaaagtcctgagtacacaaggaaggagtgccggataaggaaagagaaatagagttctattctggtccgactagtatatcacagatcatgtcatgtacgaaatcaagcctcatatgtatggtaaagtctgtacacaagcgagaagtctcggataaagaaagagaaatagaatcctattctagctcgactagtactacatggataatatccatatttgcttccctagttatacttcgacatggggtacgtaactaagggtataaatacaagcttatgcaagcccaatacaagccaagagggatacaaagccacctccaatctcaccaagttcattctcatggaagccaataacagctagccatcgaccatatacctgagctttacgctaatatacatataatggtaaaactggctccggccaacaaaaatagagctattacccatcatcaggggcccgaacatgtataaaaatccttgtctctcttgctctctttataactttgtttgcattctcatatcagcgcatcccaacgtactctaaacaaatcatataggtacggatcctgtgatcggtgcataatccatcgacaagtttgaactctgaaaatcaacttattgtcaaatggagggaatatatatttgaatgcaacaaacaaattatgtttcttttactcttggaatgtcataaaatccccctcccaaaaaaaaagtgaaattagaaaaataccactactatttatgatatcggctacgtgtcactgaaatttagagaaattggaaccgtgccactcagtcgtgttttccatccacttttctgtcatacccgttaattctattcttgccggccacctccggcggcgagcgacggtgtgggaagcggcggaaggaaacggagatgagcaagagcgcaaggaagcgtttgtgcagggtgctcaactgccggaagctgttggacaaggcgtgcatgcacgcggcgcagaacgagctcctcctgctccgtatggtggtgcaggtgctcttcttaaagcacgcgcgtgcggcggcggtggcgggacggcacgctgcggccaccgagctgccgagcaatatcaaggcgctaccgcagtccaagacccaggtcgcgggaggacgacacggaccgcgtggacgagcagcggctccgcgtgctcgccgccggcgcgtcgccgggggacgactggagcgtggagggcctgcggcacacggcgtccaagatcgccacgctgcggatgaagctggaggaggacgaccacgacggcgccggtgatgacgacgaggagttcgtgcggaggcagcaggccgggctggtgcaaggatagaaattgacggagatgacagaaaagtggatggaaaataggacggagtgatacggttttaatttttctaaatttcagtggcacttagctaacattatgaatattagtggtattttttaaatttcgtatatttgtaatggtatgaatccaattaactttttttatgactctcaaattttccattcatcattctgagatgtcatcacaaaaaagtcgtcatccagattcccaagccaacatactactaatcaaatttagtgttcagttatttgaaacagactattgagccgatagttgctgcagactatttacttgattacggttttttgagattgctgacagatgtgctcatagtgaggaagctgttcgacgcaatgatggcaagggaaaggcacggaggacatagcattgagtaagaaagaagaccaagcacatgaaagaagccaggatagcctaggaaagaagaacaagaagcgcatggcagaatgggaggtactcgcagcaaatcgagaaccgcttcaaccctggcgaaacaaaagtcaaggagaggctcccggctaaaagtggcacctagctagtgtacaaaacaagctcgcactccttggccggctgccatgtctttcacccaaagatgaatcgccagatggcccatccaacggaccagcgagtacgagtcatcgagaacaaatatagcggccccccaagtcttcggatgatgaggatgaggatgactatcctaacgccaatcacagagtggcctatatcttatgaggatcaacatcctacatattcttcctcaagggagtaaaaaaggacgaacgcgatgtttgctccatctcccagggacaagtgacaaagcttctctggtcggatcagtgtggggtcacctagtttgagctcagtaccacaaatatctacacacgatcatctcggattttgatcacacacggattgatatccagaacagttttcgattatttatacaagtatgttttacatcaaactagctattagaattattaaaggtgcaaagatccaaactaagacaaccttcttcaaataaaaagattcaaatctactaaaaattccacaggcaatctcgagtgtagactaggcctagaaaaacttgtcaccgttgaagatttcatcactttctaaggcttcttcatagtattggtcttctatatgttaaattatgtaagagtgagaacttatctacccaacaaaacacaatataaccacgtgtataagagatatgaatagaagtatcttaagcatgcaaaaaaaatatattacctacatcatttttcactgctggggaaggccacattagtcccggttcacaaccccttttagtctcgattgtgcaacagggatacacaatccaggactaaagataagtatttaataacgggactaaaaatccatctttagtaccggtcagtaacacgaacgggtactaatgatttttttattttttttaattctttttattgcttgcgatttttttatgtaatacatatttatatagaagtatattatattcacggtagcgctacgtgaagcgctgcgctctacgcaacacggtggcgcgactcacagcgatgaggatctctgaatttttccttttttcctccaccgaccgcgttttttgtttctccccgcacctgccgtctccaggaccagagcacttcctccaacaggtctccacgtggcctccccaattcctttttcttggtcagtaaaaaatttcctgatcaaaatcacggttaggtcatcaaaaaaaaattcctgataaaaaacaggtttcgaccatcagtaaaaaagtgaaatcaggtttccaccatcagttaaaaaaaaatgagaacggccctgcagtaaaaattttactccccgagcacaattatacgagtacttgttaaggttagtaatatttttactctagtatatttataaatccctttctcaaggtggtcatagtagtatatttataaatcatcgccaatggatacaacccacctcaaggaaggaatggtcatggcggcggctccggaactatgccaccgctcgacgccaacagctggaccacgacacgcgatgccgctctccgccatcaccaacgactccgtgccatccttgagatttggcgattgcgtctactgtagatataaaaaaaggactgaaaaagagaaaaaatggttggatacggtgggatggctggccggagacggtataaatactactccctccatcctaaaatataacaacttttaggtttcaggatttgtcttaaaatataacaacttctccaccaacattctcttcccaaccactcacaaccctccaccatttacttttcccacctacctccactactcatccaatcacaaccctccaccattcacttctatctactttcttagggcctattcactttgatgtcattttcaactgtatcaaattttgataaagttgccaaaaaagtggctacatttagtttgctgctaaatttttgtaactatataagaaatcctgccaaaattttggtaacttattaaaattttagcaactatgccaaaattttggcaatgccaaaatttggtaaggttttttttcatcaaagtgaacaggcccttaataaccgtgtcaaactctaaaacattttatattctgggacggataaagtaacattttattatggtaaaaaattactacctttatcgtttgggtggacaaggacgcacagtgaccagagtcaagtgggattcgtatagcagtaaaaaaattactagcacgttagccggaccctgaggtgttacaaaccgcccgtcgctccaccgccgctgccgccgccggaacgagatcctctgacttagctcgttctaagtcagaggcgcacagtacgctgatgtgggtatttttaaccatccgatccgcagcgaacggacgagattgattgctacagtactttcctgaacagtaaccgtgaccggtatgttgctacagtactatatcggaggcactacagcgcatgactcagattactgtgcgcctctgacttagaacgtgtttaagtcagaggagccggttcatccgccgccaaatcccggatgggaagcactcccctctcccggcttctcccgaatgagtaaaaaagtatggatcatattatctgtagaatattagttatgtcagtaacaaaattgttttattaatcctttgtattattttaccttttattaatattttgtattcttttctccacattcatccggtagtagttcagtacaaataaaatttactgaacaatatacgtcactggatattttttttactgaaggatagttatacggtaactgaacagaaccatctgtatgccgaacaaaaaattgctgtgatagttaaaaatttactcctcaagtgttggtcgttcgatccatataggtgggaagcgggactctatgtgatagtaaaaaaattacccagataaatgaggagtgggtgggtgttgtgaggtgagctatttagttaaacagcacgtacgtagagtagttctatgctgtcgaaaggacaactgcgcacgtcgaaggacgtggttactcaatagtgttggaaacagtagatgtattaatttaatatttttcttaggatcccgcttatatgtccctagggggctatttataattctattacaggttcccccattagggtttaggttttataggggaatttacatggttgtctttatgaaagggacatttacatgggtacacagtgtaatttggatatatgggcctctaataggctaatgggcgaacattggcctaatggcaaacgggcctgatggttcgactggccccttgggcctccttgaagttggacttgttgtgacgaagtctccttccttcggcgtacacccttcgccatttactcttcgcccaaaatgcctttggtctcgcgggataccagcgcaactgttcggctttcgccgtctttgcttcatagtcttcgccatgagggcttcgcccaaatggacttgacgccttgagcttgaatcctcgctggttacatggtttcggcaggcctggtcggggggtctcacgacataccgccaacaagccccacacaggcaagggtgagataggagcttcggccgagatcgtgcaaaccatgtggtatggtaggaggcgccccccctttcgaccgacgctcctgccgaaacctatattggagtcctgcagaaaatgcgtataccttgtgcgtatgtatttttacggttagtgattattcttagttttcgccttttgcaaacggcgaagccatccttatttcttcctgtgggccgcaatgaacagcgacgggcttcccttcgtgggcctagcactgtgcggctcaatgaatgggaatttaccatttcgcctacccttgtgacacgtggcagcttacgatttggtgggaaggcgaatcgacgcctgggtgggttatatattcccccccccccccgttttcaccgccgcacccccgtcattttcaccgtgagctttctctttctccgcctctcacttcacagcgctcttgagtcaatagaccattccactgttcccctcttcgccaccgcccacacttttcgccatggcccctcgcaagccaaacccagcctccgcgataggccctgatcccagcaagatagatgacgacaccaccgcctatcttgggacttcgctcgtggacgaggatgagttggcgaagatggttacctccggcttgttggcggaaaatcaggccttcgccccgggaaaggctgtggtgccgaagcccagcgacaaccggacggtggtattcgccgtgttcttcgaggcgggacttcgttttccgtgcaacgtgctgtggctagagatcctttgcctttttcaggtggagctcccccaactgagcccatcggctctcgtccggatcgccatctttcactgggcgtgtcggaccgctaggttcgaaccgagagcggggctgttcgacgctattttttatgccaccgtaaattcgaaaacggtggtcacgcccgcagggatgaaaaagatagcgttcgggagcgtaaacttcaacgttcgtcccaagcactccgatctttggccggtcaacgccgccatgtccaagtgggaccgccactggatgtcgaagtggttctatcactccatccttttcgaggccgggtccgagtcagcgaaagctctccgatggcatcgcagggcgatcgcaccgaaccaaaagcccaaggtcaccgtcgacggcgccatagaagctcggtttgccttgcttcgcaaggtctgctcccgtcttagctgctgtgacctggtgaaagagttttgcatgcttcggatcttccctctctcctagacgtggcaagtcgaggtgagcccagacgaagaggtcgatggcttgacgagactcatcatgccagaaggggcgaacagtgagtctttgatttcctacatttatccgtgcttcgctctttcgtcctgttcggtgcttaatatgataacacgcttcgtttttgcagcgttaactcttgcccaggccgacactgaagctcggaagatgattggcgatgtgtcggtcgccgaatacagccagctgcttatgcggcaggcggccggccgggcgaaccggttgtacgacggcgaacttcctccccgggcgaagcccttcaaggccgatggggatgaagggacttctagaaaatggatgcgcgggcaagtcaaacttgctcctcggaagcaaaaggcccctgccgccaccgactctgacgccgatgactaagacactgccgacgacaatgatggcgaaggggaaggggaggatgaggaggaggtagaggttgcggtctaaacggccgtggacgtgcccaccgacaactgcactgagacgcacggctacaccccaactccaagccccgaccatgccgaaatcggggtggagtcgaacagctcccccctccgcctcaaggatttggagggggcgaagacgctggtctcgattgcagcggccagggtggcgaaggggggttcagttaagaagacctccaaaaagaaagggctcgtcgatgtcgctcgcatctttagcgatgatgagtcctcggatgggacccctacttcgcccgctagtcggagtctgggtctttcgaccgctcctggtgctgcggcagacgcgggcgaaacgggcggtagcactgcagccgggacttcagcttctgctgaccgggttgtgaagtccgcggccaggcttttcggaagccctgtgcgcaaaccggtggcttcgccgctcgccatccaaaaggggaagaaaacggtcgccgaaacatcggtttcagactattctcttgcggcgccccgcttcgcccctgctgatttcgagacttgagcggatctcatccccttcatcgagggggtaagcaatcttgtttctccggctggcagcccaagcctgttcaccgagttgaacgagttcgacgaaggctgttccgccatcaagagcttggcagtccgggtacgtcgttcgtttttccttctttttactcgtcgtttttcgacaacttatgttaacgatcaccctcttttcttttgaactagattcttgtggcccattgttctactgagtgaaccatacgggctcgccttgacggcttcaaataccgtcttcgagctaaagacgacgaattaggccgcaagaacctggagatggagggcctcgccaacacgctcaaggagacgaaggctgggaacaaacggctccaagttgaggtcgagaaggggagcgaggcaaaggccgagatcaagcgtctcaaggccgaactcaaaaaggagaaagaacattccgccgctcttaccgactactataatctcaccgagccgaagatcgaggctcttcgtgaagaggtcagcaagttagaggcgaccgctgagagagacgcacagcggttcgcgcaggaaatggcgaaagccactgaatccgccaagaccgcttgctgtacacttcgccttgccctcactgacatggggggcaaaggtgcgaggagtccctagcgaagatgcctccgcttttgacttctcggagtggactcaacaggccggccttgcggtctctgattgcgtcaccgcgtacggcgattgttgtgcacgtgtgtcggcggctttcaccatgggactgctgcaacagttcgggagcgagcacatcgccgagtttccaaattttgcgaagggggactgggaggtcagttctcaggatgtttcgcctgcactccatgcctggcgtaagtagttctggcaaaaggatggccgatctactgccaaggcgcgtctgcttgagcacttggcgaaggcagaggcagcggatcaggccgaagagcctgcggccaaagagtgtggaggagatgcaggagccagggtggacatcggccaagatcacccagaggtgtgaggccctccgcccgctttttagattttgtagatttcttttggcattttccgtggagggcgaacaatgtaaatttggccaatggccctcctcctttcatattgtagccgaaaacggcgtttttaatatatgaaatagatgtcccaagcttagctaactattatgcttgatgcctttggtacatattcttgcatcgtttcgcatacgaaatggagggttacgcttttcttccactctatgtgttttttctagttttaactttgcactttgccatttgccctttctatactgtcttagcagggtcttcgccgaaaattgtgttcggccctcctttgggaattggcgaagtaaaaatgaaaagtttgtggcggtgaagggtttgccgaaggtccggtgtccatttcggcctgtttaccgcgagatggtcataaacggcaatagttacaaggttttaaaagttgccggctggatgcggacgcaccccgggtggaccctggacgactacgactgtgtccatgtggaacgtcgagaggatatgattcgcttttggcgaaaccattagaggaccgatcgtcaggaagcgattgcccagcgtcgttatagtatagtttgtgtttcgcccccttctcctcttagggtagtgtataatgttagtagtgatgacgagccaagtttgccaaatcacaccttagggagtggtgggtgttttgggggcgaagatgtatttttttgtaagctaggctgtaaagcccgttattttctttcacctgtaccatgttgtatggcatgtattcttcgatatcttttgaagttaataaagatgtgttttgtttcctttccgctattgttcgcatagtcacctttcgtgctttcgttaggtcgaaacatgtcggcccccttgcatatattagcgaaataggtctactgacttttcagttttcgacttccgctttcgatctgtggtattctgtgcagaaagaagcgtttgtgttttcacatagatcgagtataacggtgttcggttatttattccccgaaacaagctgtcgtggtttcaacgttcgacgagcgatgcttcggccgattcatttcgcccccctggcgttttcgctgatcaggcgtttgccttggggtttttccacgaattatcattcacacaagtaaaaaaggcgaaagacacaagaattttatactggttcgggcgtccaggatagataatagccctacatccagttttctttttttttccttttcctcttttttttgtatttttgtgccgtagggcttacataacaagagatgccaaaaggcctatacaatagtatttacatttttacaagttggcaaatggggtgccaccccttctagacatagaaacgcttaagagaagcagcgttccagcagtggtcgaactcttcaccttccaatgtcgccaagcgaaaagagcccgtcctggacctgtgcttgatgaggtatggcccttcccattttgattcaagctttccgaccgccactgggttcgccttcttccttaggacgagatggccaggcaatagcttcgccagtcgaacttttttgttgtaagttgtcgaggtgcttgtggcgtatttacgcatgtgttccagtgcttcgactctcaccccttcgaggagttcgagcgacacctcgcgcccatcttcgcctctagagaacattacccttcgcgaattagcccctatctctgttggggtcattgcttcgtcaccatagagaagcatgaacggcctgaacttggttggccttgtgggtgtcgtccgaagggcccagagaatggatagcatttcgtctggccatttacccttcgccgccccctcaagccttttcttgagcgcctccaggatcttgtcgtttgtacgttcggccgtcccattcgactgtgggtgcgccaccgaggtgaacctgatttccaggtttagccctttgcacatctctctgaacttgtcggagtcgaattgcttaccattgtcagtgataaattcctttggcactccgaaacggcaaacaatgtttttccatacaaatttctgtactgctgccgaagtgattgccccaagcggttcagcttcgatccaacgggagaagtattcgattgctacaattgtaaacttgtacccatttcgtgctaccgggaaagggctgatgatgtctaacccccatctggcgaaaggctagactggtgcgataggttgcagctcataatgggatgctgcttggcttcggctataccgctgacagctttcgtacttcttagcttgctcaacacaaactttcagcacggtgggccaatacaccccctggtgaaacactttggaagcaaccgttcttgcggcttgatgagcaccgcacagccccttgtgtatttctttcgccatttcctcgccttcggcaaaggagatgcagtgaagcaggggttggagcaccccggtgcgatacagctgccctgagaccaacttgtatcttgcggctctgagttgtaggcgcttcgcttctgcttcgtcctccgggagccaaccgttcttgaggtactttatgaacggtgtttgccagtcttcagggtcttcgcccagttctgcctggtcgattgccatgatgtccaggctctctgtgggcacaattggtgtgtacaagacttcaaagatgatgcctggcgaatgtgggcctccacaagcagcggatttcgctagggcgtctgcttccttgttctggcctctaggtaagtgttagaccgttatgccggtgaaacacttttccatagatcgaacaacctccagatacctcttcattccttcttcttttggttcaaaagatttgtcaacatgacttgcctccagcttggagtctgttcggatgagcaagcgtcgaacccccactgctttcgcctttcttaggcccaacagtacagcttcgtattctgccgtgttgttggtcgtgtcgaactgcagccttgcagcgtaccgaatcggcacgccccctggcggagcgacaactgctacggcgctcgcccccttgtgcgaccacgagccgtccgagtacatcacccaaggttgtttggcaggctcgggtttaggggcgaatgctggcgtccattcggccacaaagtcggctaggatttgggacttgatggcagtacgggcgacaaaatgcaggtcgaagggagataactccgccgcccacttgctgagccggccagtaatttccttgccccggagcacttcgcccaaaggatactgtaatggcacagtgactttgtgggcctgaaagtagtgtttaagcttgcgcgaagccatcactagggcgtaagcaagcttttccatttcaatgtatcttattttcgccccttgcaaagcttcggagacgaaatacactggtttctggcctgactctgtctcttggatgaggattgcattgaccgccactggcgaagctgctagatagagtagcagatcgcttcccggtgctgggctgaccaaatcgggtgggctttgcagatattgcttcagctcgtcgaacgctgcttggcattcgggtgtccagctaaactttcccgcgccccggagggtcttgaagaagggcaaacctctttcggctgctgttgagaggaatcgacagagcgccgcaattcggcctgcgagcttttgtacttcgcgtacgctcgataggggcttcatttgctgaatggcatcgattttctcggggttcgcctcgatacccctttcagaaacaagaaaacccaacaacttgcccgcgcgaacaccaaaaacacacttctcagggtttagcttcatacccgccgtgcgtaagttgtcgaaggtcttctataagtcggacacatggttgaaagccttgcggctttttacgatgatatcgtccacataggcctctacatttcaccccaactgcttgtaaaggaccttgcacaccagcttggcgaaggttgctccggtgttcctcagaccgaaaggcatcctgaggtggcaaaaagtgccgaacggcgtgatgaagactgtcttggggatgtcggccggattcatgtggatctggtgatagccggagtacgcatccaaaaagctcatgagttcgcagccagctgtcgaatcaacaagctggtcgatccgcgacaggggggagtcgtctttcaggcacaccttgttgaggtctgtgaaatcgacgcacaagcgccatttgccgttcgacttccacaccaatatggggttcgccaaccactcggggtggtcgatctctcggaccaccccggccttgatcagcttttgcacttcggcttttgctgcctcttggagatcagcggacatcttgcgcagcttctgtttccttggcctggcatccggcttgacagccagatgatgcatgatgaggtccgtcgaaacacctcccacttcgtcggggccccaggcgaagatgtcaatgttctttttgagcaccttcaggatgttctcggcttccctttcacccaggtcgccccctagcagaacaaattttgtgggatcgacgtcgtcgatctgcatcttgaccaccttgccatggggggcaggcttcggcatgtgctttgcacggtcgtgcggttcggcctcaacattgtgcactgccctgttaattgcggccaaatcgccctttgatgtagccgaaggttgaagccccttgatcatgatcacgcctgccggaccaggcatcttgagtttgaggtagttgtggtgggagatggcttcgaacttgtttaaggttgcgcggccaaagatggcgttgtagttgtatgggatgtcgacgatgtcaaagagtatttgctcttcgcgcctattctcatctgtgccgaaagccaccgccagctgtacttggcccaggacttgaactgcttcgccgccgaaaccacgaagggaggttggtgcttgagtgagggctagggttggcaaccccattttggcataagcttcggcgaagatgacattggccgaactgcctccgtcgaccaggatttgccgaacttcaaagccagctacctcggccgagatcaccaagggttcttgatgcgggaatagcactccttcggcatcttccggtccgaaagaaatttgctgattcaagtaccgtggagccccatcgctcgccgaagcgatgttgtgcaccgttcgcagctgcatcttcttttgtcattttgacggttgagctggcggatcggctcttgtaatcacttggattactctgtgcatgtcttggcgctgttcggccgggggtgcttgttcttgaacagcctcgcgaggtgcttcgacaggtgctccttgttgtgacattggatcttgagcattgccgcgttgccaaatgtttcggcattgttcggtggtgtgcgaagagcatccatgataggcgcagtagaggtcttttctaaccttcttgcgaacaggctggtgatggctgcttgcttgttgggcgtcgaactccttgcggagggcttgtacttcttcaacggccatcactgccttgcccgcactggggtgggattggacgactcttgattcccctgctcagcggtagccccttttcgcccccctgccttgttcggcaccagctgtggatacggcgtggtgaagggcaaagtcatggcttgcgcatgaggttgggtcacagcattcggttgcccggctccgaacggcgatgcttggggggccgccatggattggtcgaatgtaggctgggtccatgccatggtgacctggttcggcgcttgattcgttccgaagcctggtgtcgttgcctgtggtcgaatggttggtgattgagtggcagtatttgggtcgaactgcagtccttgagtccacgacaaagcccctggattgggctggttcgacggtagccaactaggtgcaccttgactcatattcccttctggctgggccgaaagagttgcacttgaggtattgtggggttggttgagttgctggaggaaagcttgaaactgcgcttgcaaggctgaggtcccttccgtccttgcttgtggcgcctgaacaggtaccgatgggtgtgcttgggcagcgaccggccgaacttgtgcttgtacgtgaggggtccggtgcgtggttgcggccgaaggctgcccggtgaaccatgttggtacttgcatgacttgctgcgatgagg

SEQ ID NO: 16863 - DNA, 695 bp, Oryza sativa
agctcgtattagttcaatatgttgatcgatgtgctaaacgaatatccattaatgtcatatccttgccaagaatttactatagttgatggaccacaagccaaccgcttcatagttatttcatcggtagtttctccctcaggtaagtctaggtctcgcaaccaatctatgaagagacgcttgtgttctttcattatccactcggtggagcgacccttattgttagctcgtattagttcgatatgttgatcgatgtacggctcgacgatagcaaactgatgaagcacgctgaagtgaccttcttggaatgatttgtgatcatgggtgacgaatctcttctttcctatcgttcccctgccactcaatctgcccacgtgttggggcacaggtactccaattgcatatccatccttgagataatcgatacagcactcgacaacctcttcagtactataaccctcaaccattgatccctctggatgtcattgatccctctggatgtgcacgatttcggacgtaacccttcagaaccgccatgtaacgcttgtatgaccacatttgatggaggtacaatgggccaagcgcaaccatctgcggcacaatgtgaacattgaagtgctccatcatatcaaaaaatgacggagggaaacacatctcaagttggcactgggtctcatgtgcgaatgtacggagatttc

SEQ ID NO: 16864 - DNA, 6327 bp, Oryza sativa
ccgctgaacttttatataggtcggaatcaatcaggaccgtctataagatgggacggctccaacttctcccgcattgggccgggcgccgttcccagccgcccacactattgggccgcgtgtaatctcacagaataagttcactttatgtccctaaagttatccctgaatctgttcctaggccgcacacaccattgggccacgtgtaatctcctcacagaataagttcactttatgtccctaaagttgtccctgaatttgttcccaggcctcctacactattggtcacctcatgggccgcgtgcacgctccgcatggaataagttcacttgaggtcccttaagttgaactttttttatttcattaggaatagattttcttaaagagctcatatcatctaaaactaaaccctaatcatttaatattttaatatttggtataatttatgtttacccgttgcaatgtacgggggtattttttttagtatacatatatgtgatcacggtctctgtttggatagacactaaaaaaaaattgtctagacgagcaaaactgatcacggattttctgcccgcctttacacaaacgactggaaatcgacatttccacaggtgccctgcgtgatcatttccttgttcactgacagccatggaaatcactactgataggcattaaagtgtatagtacctccttgtcaaaatgtatgaggccgttaattttatgcagaccattcaacaagtaataacaaaaataaatgatatttaggcacggggccgggaagcacaacgggggtggcaccactggacgtcggcgtccacggcgctccggcttacctcgggcgaaacagaggcgaggccggtggagagggggcggctgcgaggcttggcgcggctccagtcgacggggaggtgcggccggaactcgccggtgcggtggagagaggaggtggcgcgggaagacgtttgggagggctcggcttgctgggaggaggcaaaaggggaagaacgggaggggcggcgccattttataggccgagaggaggagggaacggccggagggagctcgccggccggccatccatggcggccaatcaaggaggattaaatccggcgaatttaatccgaattaagaggggaaatcaagggggaattgatgatgaggaggagaggaaccgattttcgcaatcactttggaggagaaaccactggggagggagatcaagaggcggccgcgcttctgttcagccgtgagaagaacaggcgacggctcggctggaggaggaagacgacccagcggctgggccagctgggccacgcggaggattagaaacagactttatccgcggagagtgaggaaggttgggccgagcaagggaggcgaggagatgggctaaggagaaggaaaaaggcccacgagggagggagagagagagagagaggaggaaggggaggaggggggcgctgatacgcgatcagccgcgcgcgcgcggtcagtcgctccccctctagtctcttctctgtatctactatacttatgtatatactacatatacacacatatatacatatgtatatatgtgtgtatatatatatatttataaatatatttttaatatataaaaaatatatacacatatatacaaactttgtatccgatgtatacgaattttatatacatatgtattaaaaaattaaaaaaataagaaattacatcacgtatacaaagtttgtatacacgtatgtaaagtttgtatacgcgtatataaactttgcatacgcgtatacaaactttgcatacgtacgaatacaaactagcttggtatacatacgaatacaaactttgtattcatacatcttaaaaaaaactaaaaaaacagaagagaaaccgaaaaaaaaagaaaaactaaactgaaccgaaaccaaaaaaagggaaaaaaaaaagggcaaaccgaacagaaacggaaaacatggaaaaaacaaaaaaaaacagaaaactcgctctcccgtgcggcgcgtccgccgccccctctcctcgcgcgacacgtgtccagtcatgcggggaggggcgcgcgcgagtaatagccttctcgaggggaggaggacaataagacttctgccatgggctgagagagagggaggactttgggccgaaaatgacccaaagggagagaggatttatttttaggttttctatttttagttaactctgaaattggtttttgttgcttaataaatatttttgctgctctgaaaatttgagtaaaaattgagggctcctctttgaccatggagaatttaagaaaaatactccaggccacatttgaatttttcttgtacgcattttaatgtttgccatttcctttttgaattttaattaatttattatttcttttagagaatgatttttaaaacgggatgaatttatcaggttgtgacattaaaggagtccgactacttgaagacctcatttatcactccgttcggtgcgtactgctacatcatgatgccttttggcctgaagaacgctgaagctatgttaccaacgcataattaagagatgtttgcagtcacagctcgagcgcaatgtggagccatatatcgatgatgttgtcatcatcaagacctagcaaaaggtcaacttgattgctgacctggaagaaaccttccaaaacatacgtgcctttaggatgaagttgaacccgtagaagtaccgtcagggaagctgcttggtttcatggtgtcgtatcgcggcatcgaggccaacctggagaagatcaacgctatacgcgatataaaaccaccgaccactcggaaggatgtcaaaaactcaccgagtgcttggcggttctcagttgatttatttccaaggtggagaacgaggcatgcccttcttcaagttgctaaagaagacaaacgatttctaatggacgcccgaaacccaacgagcttttgaagattttagatttcaatagtttcctcacaatatatttctcgtgctggcttcacctcatccataggagcctttgctactttatgcattggcgagaataggagcgagacattcaaaaagctcaaaggcctatttatttcatcggtgaagttttggccgaccgcaaaatgtggtatccacaagtctagaagttattgtatggagtgctgatcacggtcaggaagcaagcacattattttcaaagtcacttggtcactatggtcacgtcttttccactcggtgacgttcttcacaatcgtgaagctttcggcaaattacaaagtgggctctagagataatggcattcgatatagccttcaaagcccgaacatcaattaagtcacaggtcttagcagattttgttgccgagtgaatggaaattcaagaagggacaccaatggagaagctggagtactggactatgtattttgatgagtctccatctctggcgtgctccaaatccatcccctttcccccatactagcccgtccagtttggccatcttgtgacagcaaagcaccgctgcaagaggaccgatgcttggaaaggaaatcgccgcagccttcaacgcccatctcatggcgctaccatcatcattgcaacatgctacgtggttgctttgccgtcgcctacccgtcctcccaccacggtggcctcgccgccacgccactctagccttgccgtcctcctaccatgccaagctcgctgccacaccactgtaggctgcgcaccatgcttgacgaccacgagcctccgtgccaccctcgctgaccgcacttgtccccgcgttgccgacgcctcctctatcgacctttgcgcctccgtgatgtgggctccagccgcacaggcggtgcctccgaccacgccagtccactgtgccacttgctgcttctgcctcacacaggcctcacgttgccgtggcctcaccgtgttggtcttctcggcagtccgcgccacgccggccatgccgcctcgccgccagcccgcctccacgctacgctggttgtccgccgacacatcctctcccggcaacactccctgcgccgggcacccactgccttgcgcaacagccagatccaaccaagagagggttggatccgggtgtgaaggtgttagatccgcccctccaatggccatggtgactgtcgccgtgcattgcctactcttcctgtgccaagaggggtttctgccgaagatgtggccttggctccaccttcctagctcaccaccggctttttcgtcagtgagctccggcggtggctaggtagaggaggggcagcgcgggtggctagggttccatccctgagccgcccacacatgggcgacgcagaggaaaaagtctggttccgtctcagaaatattgcgtcaatttccggatgtgaccaaacgcctatgtaaatgacttatgtgctgcctggaaaaatgtttccattaagtagtgagtataatttctaaaattactgatattagagtgcatgacatgaacgattatacgatatctttatctttatctttacctacttaaaaaacaaaatctgcttcaaacaaaaaaaattatttctccgttggtcctcctggtccgacgacttctcctgctcgagtcgtccatggcgccacacgggcaccatgtcgccaccacatcgacctatctttccatgtgttttctcctctaattaattgcaaaaatcgattgttcactcctccctcatcctttcctttgtgattttctttttcaattcggatttaattcactagatttaatctcggtttaacggttatcaatgatggttagacagctatcttcccccggttgttcctatcccaagttttgcggattcactccgattttggaaaaaacggaaagaggagatcgagtggatccaaagctctcaatcaattttgggagatcatagatttgatagggatgattggctccggtaccatacaggcacataactgtctactggaagttaagagagacaggctatgaagggaggtaggtaggagacgccttttcaattttaaagtatagcgatactaatgttttaatttaattattcatcagctcataatagctattttattactggaaaaaagtttttacccgttgcaacgcacatttatttttttttctagtaataataaaaatacaaaactgccggcagggcaaatgcgctacacagtaagataaattttagcatgacctttttttgccatgtttttattgtcatcaacactttatttaaattttccatacaataaacgagtatatatatctcatacggtccaacagtaactaggtgacgatgaggggcacagccttgagaggggtagccataacaaggatatcgttgcttgtgtaccgctcggtgacgtccacctcctcagccgacatgcctttgggcaggtgccactcgaacgcatgcagcaatgacgcgactgtaaatggcacgacgagctctaccattggcaaagcagggcacagccttcggccagacccaagcggaataaacttggcctgcttcccccacaagtccagctccgtcttgcccaagaaacggtccggcaagaagtcgtccggtctctcccatgcggtagagtcacgcattatcgcccatgagttgaagatcaccgtcgtgcccttggacacggcgtagccgccgatcctcacgccgtcctcgaccaccaggtgcggcaacaggaggggtgccacagggtgcagccgcatcgactccttcactgcggcctggaggtacggaaggttcaccacatcggcctccgtgatcgtcccattgcctccaagtgcggccttcatctctgctcgcgtggtggccatcacattagggttgcgcagcagttctgccatggcccactccaccgtgatcttggtcgtctcggtccctgctgcaaggatgtcaaacaaaaggattttcacgtcacggcgagagagcttgccggtggacatgagcacaaggagagagtccagcacatccttgcactggtcgtcggtgccctgggctaaacggcagtcaattatgctgtccaggatatggaggactcgactcatgtgtatggccgtccagtggcgaatgccttgcaaatctagcggccggagcagcgggaagaaatcggacgcgttcggcttcgcaagtattgcaacgatatcctccataagatcccttaaattggggtgggcatcgacggagagaagcacgttcgccaggaggtcgaacatgccatggtacaggacctggccgatatcaacctcctgcccagcgcggcgacggaagctgtccaccatgtcgaaacaccttacgctcgcgggcgctgcgcgccacgccg

SEQ ID NO: 16865 - DNA, 3435 bp, Oryza sativa
gcgagaagacgtgcgttaccgagatcctgcgcagggtcttccatagaggatcgtagctcggcagccaaaccattgatcgttccgcgtgcgcgagcgcacgtctcgtgtccgggaccgtgcgcgccgcaaggcgccgatcgtgcttggcgaatgcttcccacgcagcgtcgcgcgaggagatgaacacggtggtgacgaggccaagcttgagcgtcatcacggggccatgggcgtgagccaggcttgcgagtttgtggtggaggttgccgccgcgcaggtcgagtaggttaccgactatgggcagcgtcctggggccaggcggccgctgcccatcaccccttctgtttgttcccacgtaacagagtagtaggacagcaagtgatatccccagaaaccacaacccacttgccattttgtgcgttgcagacttgtagttaatttgaaaccataagaatggtacccgccctatatatatagttatatacctcgagctttccaaggccagtttcgtccgttcctcaaccttccgctatcaccgtgggagattttttttgtcactatggccccgttcttttctccgacaaaagttagatattcgtggcacacttttcaaactgctaaacggtgcgtttcatgtaaaacttaattaatcataagttaatagcacctcattttacgtaaaacacttaattttcatcttcatttacatgagtttcaaacaccaccaatagctaacattcagccccctcctcccacttgtcagatatggatccaacagtagaattcgctcttagggctcctttggaacaaagcaaaaatagaggatttttataggattgaaatcctatgcaaaataatggaatgagcattatatttgagattcctacaaaattccaatagaatggcttgattcataggaattttggaggatttctaacacgaggttagaccacatggaaaacttttcttaggtctatctttctccttaaatcttatacttttccaatgaagcgtacaaacaaataagtttcacaaaattcctgcattttgaaattcctagttatcaattaaacatgccaactctcaattcctacgttttcatgtttctatgttttttaattcatgtgttccaaaggagccctttatttggtgtggttttgcttgatgttacattttaaaatacaaagatgtatcaatattcgagtatgcaatttgatttaagagaaattatattatttggcaccggcatgcgctcaattaattttcaaactagttatcaaccctgtataccgcacgggccaatgattatacaaaacatttatctattttttacaattataacattcaaataaagtttaatttatttgatcactatttttaattatattttcatttcagtgttatataattacgctccaatttcaggacagtgatttcaatgcatgctattgacttcaacagaaaaaactatgcgtgcaatgtcatgagtagatctatactgaaacaatgaaggaccgtctatattagtccttctggataatatcgctaccaagatgctataattataacaaacaattctagatagatttttatcataagagtggaaagtgtggacgctttttcgtggccaacataagatcactaacaatttgtggtgtaaacaacagagtcgccaaattcgatagatcaaaacctgctagcaaagccgatttcaagattaattcactttcgtggaattacacgactaatttacaagcaaattagcaaagaagataaatatcgtacttacgtgacgacgaacgagtagtttccgagcaaactaccaaagcataatcttctcggtttcgtggagaagcacgattatttttcagcgcaaaaggcaaagattaactaaattctaggattgctagaactcagccatgaaaacgaaatagaaaataacaggaaagtaaagaacgggaaaatagtatattgacaattgtttggggtccccattaaccgtacatccgcatatacatatatagatatatatatatatatatatatatatatatatatatatatatatatatatatatatatatagaaagtaatgaaagggccacgtaatctgaaaaacaatggccatcggatgaatgtttggataaaagatgaccatccgatcatagatatccatgcagcaaaagaaaatacttttagcgtcttctagcgtctcccctttgacacatgaataaaagaggcacttccctccggtttcttctagcgtctcccctttgacacatggcaaggaaaaaagagtccacaacatgaaaaatacactataggatattgatttgcatggaaaatgactacactactgtttgatctcgtgctgattaattaaatttgagaagtgaaataagtaaaacaaacatacatgaattggtgttgtgtaaaaaaaataaagatattgctgtagtagtatgtaatttatgggctacttcgcagtagtaacatttaggggcaagacagcaagaccactataattgtaaaaaaaaaatttaagatctttaacaaagatgcatctcatggtcgcacaaatgcacaactttgagtggctaatatgtaatggaaacctataaaaatactgtaggatgtaaaaatagacgtataaattaaatttgtacatgtcataccaagtaaaacttttactcctaaattaaaccataagtaaaagtttcagttaggatgacgtagataaatctcaaacatccatttttcatcctacaatagataaacaaagtcaagaatgatgtcccatgcatttacacaacaattttttatctaagggtttgtgtttaagaggaggagaacagagaagatcgaaaaaaaatacacaaaacgagttgtactattacgcatgattaattgagtattttttaaaaaagatttaaaaatgaattaatacaattttttaataaaattttctatagaacttcttttgaaaaaaaatacatcatttagcagttcgaaaaacgtgcgcacgaataacaatgaagattttctcccaaatcactattgccgaacacagccatgtttttattcaaatagaagttactgaaggattttcaatttgaaattcttgtggaaaaaacttctaaattattatatttttcaatccaaattgcaattaatcttatgatgtattaattagttaatcctaaattgcatttgatatgttctttctggtttattgagaccaacattgagctgggctgcaaaggaaattaatatggaattatgaatgtgccttttttcgctatttcaataatatgatttatagtagaacgatgttaaaagaaaactagtatatatatatatatatatatgtatatgtatatgtatatgtatatgtatatatatgtatatatatatggatatatatgtatatatatg

SEQ ID NO: 16866 - DNA, 1755 bp, Oryza sativa
catccagttgatccgtcgaaaccgtgccgagtggttggaggatgacgccgacttccctgaagctaggcgaaatcggtgttgaagccgacttccgcctaggcctacgggatggagacgctgtcgtgatggagatggccgccaaatcgtcggggagcttcatcaggattggtgggtaagccccatcatcttgatctggtgtcgttggagaagatgcgatcttgcccgagtggtttgaagccgactcgattgagatggtcttgaagtaactttcagccgcgtttgggagtccaaacgggactgaaatccggttctctcccgactggtttgactccgagtcaaggagagagatcttgccgaagttgttggtgacgaagtcgaggctgccgaaccgaaacgtctgcccgggtgggaagacgaggtcgtcgatgccggagacggaacccattgcactgatcggcgaaaagcttgacgctacccctacctggcgcgccaactgtcgaaactagatttcggcaataataaaagggggtggctatcaagctggaaaagtgtatgggtttggagacaaaagatttatacaggttcaggccttcttattcaagaagtaataccctactcctgtccggggatgaatccgccgagtgtattattgattgtatgatttggagaaaatcaacatgtgcccctagaggcacccggaccccccttatatatgggaaagagtccgtgttacaaaagataatctatatccctaacggaatatgcaaatacagatcaaatacagtcgtagccgactaagtctcaaggtatttccttggtgtacaagttgagaaacaaacccgagacacaaataagatattctatctatattcggtatcctatattcagcccaaatatcatcgccgtgtagatatgggatatccataatctccacagtagcccccgagacctttgcagtcaaccatcatagccttctcaaagataataatctgagtgcttcaaacctttcatgccaagatctgccgagtagcgaagacgaagactgtaaagggcgaaaagataaagaatatggtgcatcgaatagatgcacctaattaggtgtagcccccaactatgtgattagttaacaaactaaacatatagttgagaacaaaataatagcacaatcatgcatcatatgacaaaagcatacgcggcgcctaaagaggcattctagccgactgctttttagccataataaaagaaatccgagtggttaacactataaaaggttcacgaatgaacacacttgacaggcatccgaataaaaaactctaaagattacccaccaagtattataaaaattatggtaatgaataagtctaatagcctaggctatgactatttaccataatgaaaacaggcatataacataccaaggaaatgactatggtaaaaacaagtcattccaagttaacccagacagcttttgtagcctaataaagctgacaaaaacagtataacacctttctgtcgggcaccttttaatttgcattgcaataattccaaagaattatatgaccgcataaaaaggattttatcagcattgggcaacactattgtgcgcataaattgccaaagcaaaaaatgcctaagtccctaaggaacacaatgggccacgctgttaaaaatactgagctgaggtactgttcaggcctaagcccatttgcacctccgatacccttaacaagaaatcccgagatccaagcgtcactt

SEQ ID NO: 16867 - DNA, 9019 bp, Oryza sativa
cgttctccctgtcaaggaaatcatcgggtggcggccagcatgcggtgaggcttttccgacccccgatacaaacgaggttgtggtcttctctcatttcttctatggcggcttcgctcttctaacctcgaaatttttccgcgggatattaaacttctacggaatcagcttgcatcacctaaacccaaattccatagtccacatcgccaatttcatccatgtttgtgaagcctttttgggaattaaaccccacttcgctctgtttcgccgaatcttctttctcaaaccccaaccgaacaagaataaaccatgtgtagtcggaggggccggatttcagctgaggggaactctgagccagaagtacttctcgatgcccttcaagacttcaaacaaagggtggcatgcaaactggttttatgttcagaatcctgagcctgctcttcccgagtactcttgtcttcctccggtgtaccaagatacttggaactctcttccgattggggatgaagcagcccaagccttggagttgatggatcgcatgctaaaactcaaagaacaaggcttacaaggagagcagattactcggcacttcatcaaatgccgattggcaccaattaaagaaagatcccgcacagcattcgagttcgacggcaagcatgatcctaatcgtgaagaaccagactctctggattttaaaatcatgaaggagagaatgtataaaatcttctcaaatgctattgtcgtcagctactcacatcagctgccagttgtgccatataacgcattcaatccgcctccgcaggtatgtatctgaaaccttcaacccatgaccaaaacataatctcgtcttcatgttgagttaactaaccgtggaggcatctcattcaggaatatgcattgatgaagtctgaccccccaatcactcagcgccggtctcctcgtcagcacaccgttcagggaggtggagggccaacaatcagatcagacccgcaacctcaaacctccaatccaactggacagacaggttctcgcaagaggaaactggtgcttgacaacgatgaaggcgatgacgacaacaagtctggggacaagggctcgcctaataaactcccaaagcgtaccatgcccaggaaaaaacttgctaaccgcccaacgccaaagattagaacatcttccaggtataaacctcttggtaccatttcacttcggcacgcttctctcatgaaaataatactgaatattaaaagaatactttgcaggaaaccatccgacatagatccaactggaaaggatcctgatccggctgtgacagggccaagttcatccaaagatcctgagccgactgccgaaagccagccagctagcgcccatgcttcgggtgataaggccgatccgagtgaccagccgccgactggaaaccagtcggcagcagctgaaactgcaacaacccaagagcccccgactggaaaccagtcggatgtaggtcccgatcaagaaatccccgaagttgaagcgcagacgacaacttctcaaggaccagaggctggtaacgactcgatgattgggtctccaaataaagaacaaggatcacgtcacgctcagctaggaacatcctcaggtaacccatcctctcaagtgatgccgatttgaacaacttcagcttattcgtctaatgtcttggaaatacatcaggaacaccaggcgatgacgaagaagcaattcctcgcataaaggcggctgatgactctcgtcctcctatcttgctcaaatggtgggacgagaactcacaagtcgccggcatcgtcataaatcgtcaaaaagaagatgaggaagtgtgccagctgaagaaggcacttggagaggccactcgcatcgtgaatgtaaatcttccgggtgactgtctttaataactttgttctctctttagcagaactaaaccatgaaccatcatgcagagaatccatcttcgcaatgaggccaagactacaactttggaaaagctggttcctcatttgggaactcttaaagcagttagggaccagctacatgaggccaaggagctcgccaaaaagtcagagaaggaattaagggaccgaattgcccagctccaggattcaaacttcgagctgagtggtgcatcaaaaggtaatctctagatctgtcccattaatttatgctgtcgtaactgtatcctcaaccatctggattgcaaacagcgcaagccgccaggatggctcaaatggaaaaacagattgaagccttgaaaaaagacaaagcagaactggctgcacaaagggactcggccttgaaggaagttgaaggtactgccagctgacaatctgaacttctctctgttaaatgcggcagattcttatcataaatgtgttttgtagaccgcaaaatcaaatctcaagctcaatttgacgtcctggttggtaagatcaagagacttgaaggagcaagagatgaagtcgccaatgtcgcaacaccactcgtccaagccatgttcctcaataacagtggtccgagcgcactcgacgcaaccgaaatattcgacaagctgagagttgctccggatgtatatttcaagaatatcaagaaagctggaagtatgggagctagcatggcattggcgatgaccaaatccttgtacccaaggattgaaattgacgccattgatggctttgcagacgggacaagcgaagaagctgcccttgatcttatcagcaatgctcaaaacgcggctgacaagattgcaggtgacgttgtagatcaattccgcaataccgaccttcagccaagtagtaataactctgatgatgaaaagactgattctgactgagtgtaaatgtagaaaatggaggctcaacttgtacaatactggtgtatttatgctgtgtttgataattctagccaagtcgttgatttcttaaaagcttttatcaagctttgttgagcctaaaacccaaagaagctattaaaaactttcagtcctcgcagactaagtagaaaaaccaaacaaggcaatgatagaccaagtaagcaaattgaattgataagtaatcaaactccattattatgatgatagcccccgactgacaacttcaagaagaaaacttgatgttgacagtcaagatagggaagtacaatgataagcttaagcataaaaacgacgaagatgttcaatgttccaagagttatcgacgagtgtaccgtcttcgcgcttgagtcgataggaacctggtcgggtgacttcagagatgataaatggcccttcccatagaggagataacttgtgccgatctcgtgtagtttgaattttcctcaaaaccaggtcgccgactagaaaggcacgggatcgaacattgcgattatgataacgccgcaacccttgtaagtatcgagccgaccgaatcaaagctgcttcgcggacttcttccaatcggtgcaagtcatccactcggtcctcttcgtagcgttcttcacggaaattttgaaagcgcaaagactcgaattcaacttcactcggcaacattgcttctgccccatagacaaggaaaaaaggtgactggcctgtggcccgactgggtgtagttcgcaaagaccaaagtactgatggcagctgtttcacccatttgccggcatagggttttagccggtcaaaaacacgcgctttaatcccttgtagtatcatgccattggctcgctccacctgtccattgctcatggggtgccactgaggcatagcaaatcttaattccaaagtcttcacaaaagtctttaaaaactccgccagtgaattgtctgccattatcagtgatgatccgattgggcactccgaatctatgcacaatgttgatgaagaagtctcgagcgttatctgctgtgatcgtgacaaccggtttagcttcaatccacttggagaatttgtcaatggccacaaagaggtgcgtgtaaccgccgactgcctttttaaacgggccgaccatgtcgagcccccaaaccgcaaacggccaagacagtgggatggtctgcaactcttgagctggtagatgaatttgtctggcgaaaaattggcaaccttcgcacgtgcgcacaattttgtcggcgtcggacactgcagtaggccaaaagaaaccctgccggtaagctttgccgacaatggtgcgcgcggcagcatgatttccgcatatcccagaatgtatgtctttcagcaattgtctcccttcctctaaagatacgcagcgttgcagaatccctgaagggctttttttgtacaactcagcttcatgcataacataaagtttgctccgccttgaaatccgctcggcttcatctttgtcttgggggagttcttgagaagtcaaaaatcgtatgaggggttctcgccagtcggcttcaaccatagctatgtcatgagtgcccgcaacttgagtagtatctttgtgaggtactgtcggcgtataaaggtgttcgacgaaaacatcagagggtgccgcctcgcgcttggatccaaagttggcaagtctgtcggcggcctcattattgtgtcgaagaacatgactgagctcgagtccatcgaacttgtcttccaatttgcgtacctcttgtcgatatgccatcatattgtcgtcaaggcaggaccactctttcataacttggttgacgaccagctgtgaatcgcctcgaactattagacgctttatccctagggaaatcgcaatcctcagtccatgaaggagcgcctcatactcggcgacgttgtgggatgccgaaaaatgtatccaaagcacatagcttaatctttctccagttagggaaattaaaaccactcctgctccagtacccgaaagtcgttttgatccgtcaaaatgcatggtccagtgctccatcttctccgcgggggtatcctcctggcactcggtccattcggcgacaaaatcagctaacgcttgggacttgattgaaattcggggcttgaatgatatgtccaaagacatcaactccaaagcccacttagcaatccgtccgtttgcttcgcggttgtgcagtatatcaccgagtggaaatgatgtgaccaccgttaccgagtgaccttgaaagtagtgagatagcttcctggtagtaattagaataccatataacagcttctgaacctgagggtacctcgttttggagtcggctaggacctcgctgacaaagtaaatcggtcgctggactttctggacatggccctcttcctcgtgctcaacgaccaggactgtgctaacaacctgggaggtggcagatacatacagcaacaacggctcctgcggatgtggtgaagctaagactggcggctcggtgaggagtttcttgaaatcttcgaaggccttctgtgcttcgggtccccactggaaatcatctgttttcttcagtagcttaaagaagggcatcccccgctcgccaagtcttgaaacgaatcggctgagcgccgccatgcatccagtcagcttctgaacatctttctgggtacttggcggtttcatgttgaggatagcagtaactttctccgggttggcttgtatgcccctatgagacaccataaaaccaagcagcttccctgacggtactccgaaggtgcacttttcagggtttaatttcatcctgaaagcgcggatgctcgcgaaggtttcttctagatccaagatcaaatcatccttttgcttggtcttgacgactacatcatccacataggcttcaacgttgcggccgatctgtgttgagaagcatctctgaatcatacgttgataagttgctcctgcgttttttagttcgaacggcatggtgacgtagcagtatgctccaaagggcgtgatgaatgaagtcttcaagcagtcggattccttcagtcggatctgatgataccccgagtagcaatccaaaaaactgagaagctcacagccggcggtcgagtcgactacctggtcaatgcgaggcaacccaaaaggatctttagggcaagacttgttgaggtcagtataatcaacacacatgcgccattgccccgttttctttcgaactagaaccgggtttgccagccagtcgggatgaaggacttctttaatgaagcctgctgctaacagcttggttaattcctccttgatcgcgtccttcctgtcttgtgcgaatcggcggagtcgttgtttgattggcttggcatcttctttgacatgtaaggagtgctcaatcacctctctaggaataccgggcatatcagatggtttccacgcaaagatatctttattgttctgaagaaaggtgatgagcgcgctttcctatttacaatctaactcggcgcctattacagcagttttagtagaatcagaaggatctaggggaatctttttagtcttggcttcgctttctccactctttgagatcttggtagcgggcacttctccttcgctcgtcgtggctgcagccagtcggatatcctctcgggcagacgccatctcgcgggtttgagccatgtcgcaactctccttgtcgcatgtgacggcttgcttgatgtcgctccgtagggataggactcctcggggaccaggcatcttcatcatcatgtaagtgtagtgcgggacggccatgaacttggctaacgccgggcgtccgagtatggcatggtatgctgtctcgaaatcggcgacttcaaagctgatattctcggtgcggaagttttcccgagtgccaaaagtgaccgggagggtgatctggccgagtggagttgcggataatcctggaattactccgtgaaaaggcgcattgcttggttttagctcggagcgaggaatctgcatatcatccaaggtcttggcgaagaggatattgagtgcactgccaccgtcaatgagggttctgcgaagcttgacattacggaccactgggtctagtaccagggggtaccgccccgggtggaccactcggtcaggatgatccgagcggtcaaacttgattgcaatctctgaccatcgaagatattggggcgtgtcgggctgaacagcattgatctcccgttcggtcaacttttgcttccttttagactcataagccagggggccgccgaagatatggttgagctccttgcggtggtcttgaaatcctgccggggtgtcgccgtcgtccttcttccttgacgtgctttgttcttcgtcagagttcttccgtgtagtcttggtgtattgctccgcaaactgcttgtagacgaaacaatctttggccacgtggttggagttaggatggtgcgggcattgggagttcatgatcttgtcgaacgtgttgacgcgcgagcgctgtcgagaagagtgggtggcggttgcaacaagttccgcaggcttacgcttgcggtccttattgttgttacttccacctcctcccggagccggcgtacccttgtttggcttccaactgggacccgactgctttgatgcggtgacgacgtcttcagctttggcgtactcgttggctttttcaaacataagcttgactgtcctgggaggcttacgcccgaacttgccgaccaattcttcgtggcgaatccctttggtgaatgcggcgatgataacgtcgtcggtgatgtcggagatcttgttacgttgttcagaaaatcggcggatgtaatctcgaagggattctccggacttctgaataacgttgtagaggtcgtattgtgtgccgggacgctcgaaggtgcctcggaaggtggcgatgaagtggtcgcgtaattcggcccaagatccaattgtaccacggggcaatccatggagccaagatcgggcggaatccgctaaagccactggtaaatagttcgccatggccttgttgtctcctcctgctgcgcggattgcgagaccgtagacggtaagccacgattctaggttagtggtaccgtcgtacttctctattccagtcggcttgaagccggctggccaatccactcgacgcaggtcgtcggtgaaggctgctactctgtcaaggtcgtcgtcgtggcggtccggcgaatgatgatggcctcgagctgctcggcgctgtatgattgtgtcgcgaagatcgacggggcggcgacgaggtggtgagtgaggccgttccactcggcgctccctatgatggtcgggaggtgagtgaacggaccgctcgtcgtgacccctgctcctgcgattggatcctgcgccggtgatgctgaggcttggataacggtagtcatgagatcggaagtgggggactcggctgccagtcggcgtgtggacgctttcggagttaactgggaccgaagccgcaatcatggtcttcgtctggttcaagatgttgacgacgtgatcagattgattgagctcgttttccttgaggagggtgtcgaggagggtgatcgcggcaaccgcattctgttgaggggtgcggaaaaccggtgtcccttcaacatcttgttggccgataagatcacgcgctcggcgccctgcttccaaagctcgctgccgtcgatcttcagcctccttcgcggtccgctcacgctcctgctgctcacgccgtagccgttcttgttcttgtgcttgatgctcctcctccagtcggcgacgctcagtctcgcgacgtgcttcggtctcccgggcttggcgttgctcctccgtctcgttgttggccatgaagacgccgaagaagagaggggtgtagttgtcatctaggctttcgtcgaagtcgtcgagatccgggtcgttgtagcgagagctaaactcatcgtactccacgatgtcggtggggcgcgagtcgacagtgggagagctgtagtagccatccagttgatccgtcgaaaccgtgccgagtggttggaggatgacgccgacttccctgaagctaggcgaaatcggtgttgaagccgacttccgcctaggcctacgggatggagacgctgtcgtgatggagatggccgccaaatcgtcggggagcttcatcaggattggtgggtaagccccatcatcttgatctggtgtcg

SEQ ID NO: 16868 - DNA, 557 bp, Oryza sativa
gcacgacatggtggacagcttccgtcgccgcgctgggcaggaggttgatatcggccaggtcctgtaccatggcatgttcgacctcctggcgaacgtgcttctctccgtcgatgcccaccccaatttaagggatcttatggaggatatcgttgcaatacttgcgaagccgaacgcgtccgatttcttcccgctgctccggccgctagatttgcaaggcattcgccactggacggccatacacatgagtcgagtcctccatatcctggacagcataattgactgccgtttagcccagggcaccgacgaccagtgcaaggatgtgctggactctctccttgtgctcatgtccaccggcaagctctctcgccgtgacgtgaaaatccttttcgttgacatccttgcagcagggaccgagacgaccaagatcacggtggagtgggccatggcagaactgctgcgccaccctaatgtgatggccaccactcgagcaaagatgaaggccacacttggaggccatgggacgatcacggaggccgatgtggtgaccttccgtacct

SEQ ID NO: 16869 - DNA, 1811 bp, Oryza sativa
agatgggaagcatccatattgttcttctgccatatcaccttcgacccttgttttaataccagatagcttaattccaacccatcgactattatgttttcaaatattaatgtctcctagatcttcttatctgtttgcaggtgtatccgaacttatcaatgtagatgcatggcgggtacctttatgggtttcatccaacaatccttatcttgatctgtaaaaggggtatccaaactcctatccccaactactatctcgttggctttttaacccaacacagtttaattggttttcttttccatcaacaggttggttattaactcgaggttagaatatagttcctctgacatgagaccctaggtctcctatgtcagtaaacaattatacacatgatcacatatccgcatctttcaaaagaatcctcatggaacttgtctgtattacacatttctcccttattacacgaatacgaggcactgccgtaaacaaaaagggaaggtgcttatcatcggtacattgtatcctcaacatgaatcatccataaacatagtaagctcactgtttacagacatgaatatatttatgaatttcatgattgctgcaaactttcgattacaccatgataagtagcggactgaaaaccacaaacatggctgctcattttgattctggagagatatagctggcattgttctagtgactgcatccttgattggttctgtgatgatgtgataggactgcataatgctatcattcacaggagaagcttccttctgattgttggttgcagcggatgacggtcttctgcttggtatcgccctccggaggttgattgcccttggctcggcctggagtaggtcggggagagacacaactccttccatctacgacaattctttgctgaggctgtcgttgcagagaatggttgctaagatttattgccgagtcaggtgcagcaggtggagcattggtgcattgtttctgctatgggttctgattaacacgaggccttacgggtacggcgtttgctccagtgaccacaatacgattggaatgtctgcttcgtgtaaattggcgaaaatgtggaggtcggggacagtttttggagtaatgcccttctccactgcagttgtgacaaacaataactttcttacactcgggttcttcatcttgtacttgatttctcagctgctgtattggagcttctaaaggtacaacgcagatactggcatctgtcttgtcagctggtggctggggctgaaattgagcattgacaccttgtggtagtgcactcattggaattggagctgttgcaacgcgggctataggactgcttcgggatgcatggatgaccattcgttgaggagcaagcttctgattgcagggagttgcgtggactgacgtgccggcagctatgtttctcggttttgggcacttgtcggcgaaatgacccattccttgacaattgaagcaacagatatcttcccggactcggcattttcttttctcattttgattcctctgtcctggcactggagttaggctgaaactgtaatcttggcgaggattggtgttgccttgatgcttctctccgttgaaaccggcgggttggttagccatcttcttcgtcagcagaaaactgaattgacaatcttttggtacatgatcagttccttcacaaaagaaacaagtgatcctgctcgttggacacctgtcgggtggatggtcttcctcacaatgaacgcatgtagtggcacacgagctggcaacatgaccgatttctccacaacgagagcatgccttacgttccattt

SEQ ID NO: 16870 - DNA, 1233 bp, Oryza sativa
ggtcttcctctgattgtgagtatatcagaatgtcatcaatgaaaaccacaacaaacttatccaagtattccattaaccctttgttcattaagttcataaaaaaggcagggtgctttggttagaccgaacgacatcaccgtgaattcatacagcccgtatcgcgtggtgaacgcggtcttagggatatcttcctcacggatacgtaattgggtgatatccggaacgaagatcaatcttggagaatacagtggcacctttaagctgatcgaacagatcatcgatccggggaagagggtacttgtttttgatggtgacttcattgagagctctgtagtcaacgcacatcctcttcgttttgtttttcttctccacaaaaatcacaggagcaccccaaggggaagtactcggacgtatataccctttttcttttaactcttccaactgtttcttgacttcggccagctcatttgctgccatacggtagggtcgcttgtgcagaggagtggttcctggagcaagatctatccggaactcaatctctcgcttgggcaagccgagcaatgtacccaagttagtgttttaatccttaaaacctgcttaacaactaaaatgtggaatggttggcctgggttggcttgggacgagctgggacccagggtcgggttgccagttcggtccgaatcatcataggccttgggttaaggcaggttcgtgtgggttcacgggcttgattaataacattgtatagttctaggatcgcgtttacaaaatagctttgagcaactaaacgtctttaaatgctgtttactgcaaccctaacccttattataactcccttgtactcccttgcatttatcctgcatttgtgggtgtgtcttgttgagtacggtggttgtactcagtcttgctcaattttttttcccaagcccagaagaggagctccttgaagatgaaggttttggtgtctagctcgtgcctgccgtcaagcgcctgtggtcgtcgccctagtcttccgctgtttctcgtttgtctttgtgtgtgctgggccttcgtcgcccatgtaataagttaactatttacgcttccgcttgttaaactctgaattgtatcaacttttggtgtaccttgcctcctgggacaaggattaatgcacgcacgtcaggaacgcccgttgggttatttccggacgtgacaagttggtatcagagccacccttgaccctaggacgagccg

SEQ ID NO: 16871 - DNA, 5482 bp, Oryza sativa
ccaagcccagaagaggagctccttgaagatgaaggttttggtgtctagctcgtgcctgccgtcaagcgcctgtggtcgtcgccctagtcttccgctggttctcgtttgtctttgtgtgtgctgggccttcgtcgcccatgtaataagttaactatttacgcttccgcttgttaaactctgaattgtatcaacttttggtgtaccttgcctcctgggacaaggattaatgcacgcacgtcaggaacgcccgttgggttatttccggacgtgacacaacgtcaccttcagccatatgagtgaggtgattgacggctacgacaagctgctcgccatgctccacaaggcgaccaagaggctcaacgatcagaagcttgtgaggatcgctgagttgcaggataagaacgctcgccccaagaaggaggttgccaggcttcagggacgtccaccgcctggaggagcccgcatccgcaccatgtcgaggaagtcgaccatagctctactgcgcatccagcttacacccaggaacccgccgctgcctccacctccagcacctcccgtagctccagctccagcccttgttccaatgccagctctagagtccgccctctcctttgtgccaaattcagcctacaagggtccagcaggtggcagtggaggatggttgccagcatctcccagtggtggtcgtgtgatcatcagcagttccagctcagaggcaggcagcggtgacacctatgagcaggagtactccaggagccgctcagagggatcggacgacgagcaggaggacgccttcgactccacctaccgcaggagccgttccgagcattaggctcgctttccctagtttatcgactgcttagtagttgtttgttagtttgtgtgtttagggttgttcgcttgtgggttagtcgatggtcgatatcatgtacctatgatatggctgtcctaataaggatttgcttgctgttttaagtgttttaattcatatcagaacaattgcagtctaaattcctatataataaagcttagttcctaagcatctgtttttcttcttttctatcccctccgtctgttcttccttcagatggtcaacaccaggaatggcggtcgtgcagctggtaacagaagcaacagcgaagaacgcatcgatggtgggcaccccaatagcgcctgcggcaatggtccgccaccgctccccgagaacccgatgctcgcacaagtgatggcccatcagacccagatgatgatggccatgatgcacagatgcagcagcagcccctccagatgcaccagaggatgcagcagcaggccgatcagcagcaacaacagtttggtccccctcccccttagtccaagctgcttgaatttatgcgcgtcaggccacccaccttctctagtactaccaaccccatggaggcaaatgactagctccatgccatagaaaagaagctcaaccttctacagtgcaatgatcaggagaaggttgccttcgccacacaccagctctagggtcctgctcagcttggtgggacaaccacatggctacccgtccgccaggcacagatgtcacttgggcggagttctatcgcagcttcaagaaggcgcaggtgccagacgggctcgtggcacagaagaagagagaattccgggcactcaaccagggcagcaagacagtgacttagtacctgcacgagttcaaccgcctagcgtgatacgcaccggaagatgtccgcactgacgcagagaaacaagagaagttcctggtaggcttggatgacgagctcaccaaccagctgatctccagggattacgcggactttgagaagctggtagacaaggcaatccgacaggaggatcagcgcaacaagatggatagaaagaggaaggccgctcagttcagggcccatcagggaggtcaccagaggccacgcttcactcccggacagcagggtggacctaccaccatgattgtccgacagcaccaccccaacccttccggcaacttccaccagggtgctagtggcagccaaaaccatcagggaggtcagcccaaccatagtgcagctccacgcccgccaatggcaccagcacagccagctccatcagctcaagccaagaaggagaccagagcaaagccagggccctgctacaactgtggcaagcacggccactttgctgacaagtgcccaaagccaaggcgtgccgggccaaggttttttcaagcccggcgtcaaccatgcgtccgcagaggaggcacaagcagcaccagaggtcgtactgggtacgtttcctgttaactcaatccctgctacagtaattttcgattctggtgcaacacattcgttcatttccaagaagtttgtggggacacatgggttgagaaaagaagagcttagcacacccatgagggttcataccccaggaaatagctcgacttctgtcagttatagccctttagtgctaatagaaatccaaagatcacaatttcttgccaacctcatccttcttgaatccaaagacctagatgtcattcttgggatggactgacttaccaagttcaagggtgtcattgattgtgcaaatcgtacgatcaccttgatcaatgagaagggagaaacagtggtgtacaagtctctcgcctcaccaaagcaaggagcctcactgaatcagattgaggtggaaaattcagtgaacgcaaaggagaagagttcgaggaaattggaagatattcctattgtctgcgagtatccagaagtgttccccgaggacctcactaccatgccacccaagagagagattgagttccggattgatttggcaccggtaaccgctccaatctacaagagaccgtatagaatggcggccaacgagctagcagaggtcaagaagtaggtagacgaacagctgcagaaaggatacatccgaccgagtacttcaccttggggtgctccggttatttattttgagaagaaggacaagacgaagaaaatgtgcgtcgcttatcgcgcactcaatgagttcacaatcaagaacaagtatcccttgctgagtattgatgatctgtttgatcaattgaaaggagctaaagtgttttccaagatagacctgcgatcaggccatcaccagttgagaattcgggaagaggatatttccaagacagccttcactactcggtatgggttgtttgagtgcactattgtcctttggactcaccaatgcaccggccttcttcatgaacctgatgaacaaagtgttcatggaatttttggacaagtttgttgtggtattcattgatgacatccttgtttattccaagtccgaagaagatcatgaacaacatcttcgtctggtactcgagaagttgcaagagcaccagctttatgccaagttcagcaagtgtgacttctggttgtcggaagtcaaattccttggtcacgtcattactgttcaaggtgtggcagtggacccgtcgaatgtggagttggttacaaagtggaccccacctaagacagtgacccagattcggagtttccatggacttgctggttattaccgtcagttcattgaaaatttctccaggattgccaggcctatgactcagttgcttaagaaagacgagaaattcaagtggacagctgtaacaccctgaaaattcgacaaataaaatgaaacccgaaattgagtactttcaaaaacttctaaataagtttgcatcatgccgatgttatttcttttgttgtgcatcatgatggatgttatggtcgttattgcttgccaaaccataaaacgtcacaattgaaaattaagctaaagctatacaactacataacaattataaaaataagatatttattatgaaccctgtaaatatttatgcacaacacaataaagccatacaaagagaaggttaattagtaatttaatttataggtcacattagaatattccaattaattttagaaatattaaagccaccgagttatataggatgaatttaggatgatataaagtaaagccaatttcatttgggaaatgatgaataatcaaataaacaaatatttaaataaaatatttgaattccccaaaccaaaaagtataggttacatctcaattcaaattccaatcccattcacttttgcagtttagcccctccctattctcgtttttcctgtttttccttctctctcttccactcggttactgttcatgggccaccaaccgttcgatctgggattagcccagaccgaactcttcccaacccagcgccgctcctcccggtcgctactaagccgcgcacgcaccttcccaacctgtgcgaagcattttgtgtgaccgtgcgccgcactgcgtcgcgccacgcccgcgtggtcccaccgcccgaccgagccaccgggttcccgcgaaagctgcgctgccttgagcaatggcatcatctcatcccatcgcgagtcgcatcgaagttgagggataatggccgccacgtcgcccggcgtcactgtagaaaataggcctgcacctccctatcggcggccgttaccactgcccgtcgccgccaatcatgttgccatcgcatcgccatctcgtcgcccctagctgagaccgctggataaagcggtgcccctttctccagctagcgatccctctcctgcgatactaccgcgtaggcaatcatgtcgcgcctgtacattgaactggaacctaggtgagatcgaacctaggccgagtcatcgattatgcttatccataagggatcgccttcctctcactggtataagctcacccctagctcgtcctcatccaaaatcaacccctcatttgcttcccttctccccaaagctcttgctccatctcagagaaacgaaatcatgctgccgccgggtgtcgaacacttggtgggcgagggctgccccgccgccacaaggcctctcagcctgagttggtgcggggtgtgaaggtaaggtgcttgcgcttctgatgccgccgtgaaggagccaggagccgctggacgaggaggaccgggagtcgagtacctacaagcgtcgtcgatcgccgtcgtcgatcgtcgtcggtgaggcctcccctcctccctttttctctctctcccgtgccgctaagccgttgcctagccgcctagccgcgccgccgccgcgtcgccgccatcggccgctcgccgttggtcgcgcctccggtcatcgcccctagcgccgagccgccgtgcgccatggctgccgggccggcttaagctgcccgcgcgtgtgcccttgctgtgcgccgcatctgccgtccgagggtagatcggggccgtccatcgccgccggcatggcagcccacgtgtccgccacgtcggcgccacgtggtgctcccttcccctctcctgtggactcggtccaatgtgggccgccttgtcgcgaccggaaaaattgccttttcccgaacgctagtgtattaatccccgtcccaggaaaagccggggtacacc

SEQ ID NO: 16872 - DNA, 1713 bp, Oryza sativa
gattgagcccctagcaataggatctagaccgggtgtgccacacgcataggggtgagaccacccgtgtactagtctagtgccatggcatctcgactaacgggcaccgacccgtgtagccttcatttgcctagacatctcgattaccgagccgcagctcgtgtagccttcatttgcctcagagatatccatcgtcgcaacgacttcatccatctctatccgtgtccttttgttcaggactagactgagcaccgagttaagccttacccattagacatgtggttagtacggtagtgctttgcaacagaggcccgaaaaccggtccttatagtggccgaggtgctactagcaaaaccctgcacctcgagcccagcctaaaaccattttgggagttttgaatagaggggggaggtgtgtgttcaattccatcacaagccaaccattccacagtgtccaaatgatatgagaattcccaaagtctaaagttataaaaccatctagtgttgcctaattaatcagtgaagcatctacctaaattcatactagtggaaccattattagagtacccactagttggggttttgttttgctagggtaagcaaggtgataaaaacaataacaatgataaggctataacaaggattaataggaagtgctaaataaaacagtgataacgcgggaatttaaataaagcggtaatgcaataatttaaatcaaaataattttataaactgggattcaatatgctcaagggtgatgtgacttgccttgctcagagagaacggccttctgaaccttcggcgacgaccgcgaaccacgcttcgagaaccttcggaacgacagaagctacgcgaagcacacaagcaaagctacaagcctataaagaagcaataacaatacataaaaagaaagcacacggttctttaggttacaacaaacattaggagacttgaacgggtcgattcggggttcgtatgaccaacatatgatcatccgaagtttaatgctgttacatggagatttacggattattgtgattaggttttgcaattataaaacatgtataagtgctagcctggaaaagactggaagactacgctgttgacatgtggaccccacatgtcaacctaagggaccacagtagaccgagtacacagagacgttccacgggtcgaaggaagcggatcccgtgtgtcaaccgaggcaagcggtcgacaaatggactccactagacaccacacgggctgcacacgtggaaaccacgcggctaccgagcgggcacactaacacggacactacacgcacaagcgaacgactaccgacaccagtacacgggtaccggggtcgacaaccgcacaacgggcacgggcgacaccgaaaggactaggatggggcagcgagaggacggacccttaccaccacgtgacgaggcgtgggaacgacaaagacaaacgagcgcggcggagacggctcggagacgacggaggcgaacggcgagggagcgacttcggcggcgatccttggacgaaggcgagacgcggccggcgcaacgcttggcgacacggaggcgaggacgaagatgacggggctggagcggctcgcttgatgaaccacgggcggcgaacgcgatcggctttacggagggacgaacgccacgacgacccggaacgacgggaggacgacgacgacgacgaccgggaacgacgggaggacgac

SEQ ID NO: 16873 - DNA, 2917 bp, Oryza sativa
aggacggacccttaccaccacgtgacgaggcgtgggaaccacaaaaacaaacgagcgcggcggaaaccgctcggagacgaccgaggcgaacggcgagggagcgacttctgcggcgatccttggaccaaggcgagacgcggccggcgcaacgcttggcgacaccgaggcgaggacgaagatgacggggctgcagcggctcgcttgatgaaccacgggcggcgaacgcgatcggctttacggagggacgaacgccacgacgaccgggaacgacgggaggacgacgacgacgacgaccgggaacgacgggaggacgacgatgacgatgaccggggccggcgaggaggcgacgtgggcagccggcagcggctgcacggagacgaggacggcgtggaacacgctgctgcgatgccgacgatggaggcggcgccgcgagacgatgagccggcgaggatgaacggtgaagacgacgacgaacaccggcggtgttcgggtggaggggaggcgaggccgagggcgaccttgccgctgtgatgccggaggtggagatggcgacgtcggccagcgcacgggcacggcggaaggggctgccgaaggcgacgtcgacgaggagaaaggagaggccggcgcggcggcggtggtgttccgccgaaaccgaggagcagccggaggagaggacgacgctgcgacggcgacggaggagacggcgacgtcggtcggcgtaccggcgacgaacagcagccgaccgaagatggtgtagtggtggcgacgccactggacgccggcgggggcgcgtctccggcaatttccacacgaatcgaaggcggcgccggggaagagaggcggctgcgatgccggggaaggcgacggcacggcgcacgcacgtgcgcggcacgggcgggagggcgccgctcggcttgggcccggaggcggcccaggaggagatgagggagaggcaggcccgggagagagaggggagggaagggagctgggccgggagggggagggaagaggtgggccgggaggaggagggaagaggtgggccgggaggaggaggagaggcccgggagaggagggaaagagagggaggagagggagactttgggctgggcttggcccaaaggaggaaggaggattattcccaagtttttctttttaataaactttaatcatagttgttgttgcttaataaatatttccggtgctctgaaaattcaagtaaaatttaagggctccttttagaccaaggagaatttaccaaaaattctccgtgccacattcgaaattttcttgtacgtattttagtgtttgccaatttcttttcgaattttaattaattctattattccttttagaaaatgatttttatttcgggatgaatttatcaggacgtgacagcaatgccactggacgctggcggggatgcgtttccggtggtccccgcgcgaaacggaggacacgccggggaagaaaaggtagctgcgaggctgaagacggcgacggcacggccggccggcgcacggctgaggcagctggaggtggctggtggcacgggagagagaggaggacggcagggaggcatgatgcggccacgggggagctcgggaaagaggctaaaacgagagaacggaaggagggggttccattttataggcgcggggagggatccggcggccatggaaggtggccgaaaaaaggcgtgggcgttccgagtgatggagggcgccattcaagggggaattaggggggaaataaagaggaaggaaaggggattaattcccccaatcaatttcggaatccaagtttgaatcgcgcggatttgagagaggaagaagctagggtttcacgggagagagaggagaggaggccgccggctggagatcggggacgcgcctgacaggcgggacccacgtgggaggcacgcggtcaacgcacggcaatggtgcgcacgcgcgcgcacgtgcgtggcacgggtgactctaggctaaaacctgtagttttgaagcaagggatgagcgcgaaagcgggaggcgcggctcagcttgggccgggtgaagccaaggcgtcccaggaggagaagaggagggagctgggccgaggggaggggaggcccgggagaagagggaaaagggagggaggggagagggacttcggccgcaggccgagggggaggaggggaactttgggctagactgggccgaaaggaggaaggaggattgtgtttagttgttattgcttaataaattattccgttgctctgaaaatttaagtaaaatttgagggctccttttaggacaaagagaatttaacaaaaattatccgggctacattggaatttttctcgtacgtattttagtgtttgccatttttttcgaattttaattaattctattattccttttagagaatgatttttaattcaggatgaatttatcaggacgtgacattcaatcacctccctgggaactcccggcatgtatgacggttgccaagcgaacacgtctgcattgtcgcggagaaaggtgatgagcgcgggttcctatttgtcatccagtgtagcccctatcctgaccatcttgtcggagttggaacttgacaacaggattatcttgatggtaccgtctggctttgctttcttgctgggcttgctcactttcttggggtgctcagttgtggcgggtgggttagagtatgctcgaccatgtcgaggctccgcttgtcacattgtactgccaacttagcattgccctggatagtgattgtcccttttggtactggcattttgaatacctgataagcgtagtgagatgctgccataaacttcacgagtgcagttctcccaatgatgtcattgtatgcggtgtcaaactccacgacatcaaaggtgatttgctctgttcggaagttattggcctgccga

SEQ ID NO: 16874 - DNA, 2945 bp, Oryza sativa
cttttccgttggtcgtgtagacgctgcagcttcggaagatccgctcttcgtggaagttgaagccgacgcttgggaaagcgagcaaggcaagacacatcatcttgatcatattgaatcctagtttataaaattatgttgatttaaattattgcattatcgctttatttaaattcccgcgttatcactgttttatttagccatgcctatttatctttgttatgaccatatcattattgttattgttatgattattaccttgttcaccctagacaaacaaaacctcaactagtggacactctactcatgacaccactagtttaattttaggtagatgcttcgcaatttaattaagtaacattaggtggttttacaactttagactttggggatactcatatcacctggacactttggaattgttggtttattgtggaattggcttcacaccgctccttctattcaaaattccccaaaatggttttaggctgggctcggggtgcatggttttgatggtagcacctcggccatataaggaccggtcttcgggcctctgttgcaaagcactaccgtacttccacatgtctagtgggtaaggcttagtttgtggctcagtctagtcataaacaaaagtacacggattggagatggatgaagtcgggggtcgatggacattctccagggcaaatgaaggctacacgagctgcggcccggtagtcgagatgtcaaatggcagagggttggtgccctgctgctaggggctcagtcctgcctgcctgtcccgggggttccggccgtaggcgggattgggtcggtactcttgtctatggctaggatgggttggaaactatgtcacgtcttccgtctgtataccgtggtggtatgtggcacgtggttgcacgtgagaaagatgtgtcttgtgggtaaagatgtacacctctgatcagagtataatctattcgaatagccgcgccctcggttatgggcaagccgagcaatgtacccaagttagtgttttaattcttaaaacctgcttaacaactaaaatgtggaatggttggcctgggttggcttgggacgagctgggacccagggtcgggttgccagttcggtctgaatcatcgtaggccttgggttaaggcaggttcgtgagggttcacggccttgattaataatactgtgtagctctaggatcgtctttataaaatggctttgggcaactaagtgacttttcgatgctgtttactgcaaaacttaacccctatattattatccccttgtactcccttgcattaattatgcatctccggtgtggcttgctgagtactgtggttgtactcattcttgctcaatctttccccccttcagtaagagaagctttggagatgatgtcttgggtggagtcctggcttataccccagttgagcgcctgtgaagatggagccgtaggcccgctagtccgctgctgtttatttttgattgtcaggccttaagcgcctttgtaataatgtaaatattatcgatataataaagatgtgtcttttatatcatgtttgtttggtgtaccccggcttttcctgggacggggattaatacactagcgttcgggaaaaggcaattttcccggtcgcgacaagctggtatcagagccatctcgactgtaggataagccaagtggataaaacctaaggacatattttataaataaaactatttgcgaaagttccttttttctccttcccctaatgctttttgcaaaaggtttactcccttcttccttcttcggatttcaactagtactagatggtcaggtcagtgaagaagaagacatcgtcagttgtttgccgaagctccggaagactgcaggatctgcgagcgaagtggaggaagcagtgaagccagctgtgaagcaggagtgaagatcttgagaacccgtcgcagaacctaagccaccctctagggtagagtcattagtcgtgtgtttccttgcttgtgtgtgtagcgcgtggtttgcatcagtgggtggtgatgtaaccatgctaggttgtttgcttaatcaacttgcagaataagcctaacatacatcataacagcaaaagacttagatctgttaaggtcctatccttagtttctaatctgtctctccccttcgttttccctctctccctctccaaacctttgcaacagatggctgacaatgagaaaggcaataaggtcaggagtcaggacattggtacctcaagctcccgagtgaatgaagcacaagacaccagttgtgcggcagtggtccaacacctgattaaccagaacaaattgcttatagagatactacagcagcatcggatgccaattttgaacccgagtcagatgcaacctcaggtgcagttggaggcagtccaagcactcacaccacaagtcagcgcaccgccaacatcccagaaggcccctcatgccatgccacatgttgacccaaaagaagcaagtatcatctgttttatgtgtgatgagcaagggcactacgcaaggaactgtcctcagcagaaaagaaaagcaccaatgcgaaccgaaggtgaagttcgtaagatgatcattaccagcacagaatggcctccaccaggaatgacaagacgtcagagaagaaacaccttccgaggtgcaccacagttgacagagcatcttttagctaatggaggtagagtgtctgatagtgaagattcagatcaagtctcctcagaagatgaagatgagaaatctccccaaggtttcaaccaggataaaatggaacgtaaggcatgctctcgttgtggagaaatcggacatgttgccagctcgtgtgcctctacatgcgttcattgtgaggaagaccatccacccgacaggtgtccaacgagcaggatcacttgtttattttgtgaaggaactgatcatgtaccaaaagatgtcaattc

SEQ ID NO: 16875 - DNA, 2393 bp, Oryza sativa
agaaaagaaaatgccgagtccggaaagatatctgttgcttcaattgtcaaggaatgggtcatttcgccgacaagtgcccaaaaccgagaaacatagctgccagcacgtcagtccacgcaactccctgcaatcagaagcttgctcctcagcgaactgtcatccacacatcccgaagcagtcctatagcccgcgttgcaacagctccaactccagcgagtgcattaccgcaaggtgtcaatgctcaatttcagccccagccatcagttgacaagacagaggccagtatcggcattgtacctttggatgttccagcacagcagccaagaaatcaagtacaagatgaagaacccgagcgtaagaaagctattgtctgttacaattgcagtacctgttaagcctagcgctagtcagaagcaaccataatactcttatatccgtgttcaaatacttttgttttatagttgttccccgtcaatcatgtaataatagagaaacatgagataaggaatgagtttggccagtttatgaagggtccatattaagattgcaagtgttgtgtgatgtgtacatctggttgatgattaaggagacctagggcctcatttccgtaagctcataatctattatgaatcaaataacctagcgattgatggcgaagaaaatcaagtaatcaaccaaagagacatttgtttggactgagagtttcagatgtgccttcttcggatcaaaggcatgcacccgttgtggagaaactggacacgttgctagcatgtgtctcacactctgcactcactatgaagaagaccattcaccaggggagtgtcccactcgcaaggtgacatgttttctgtgcgaaggtacaaaccatgtgcccaaggattgccaactcagtgtgttgttgaccaagaccgcagaaatccaacgaacaaccctacaattgtctcatcagctagtcagctccaacagcaacctcgacgatatcatccacagcaccaatgctcctcctgctccacctaactctgcaataaatcatggcaataatatcttcagcaccaaccattctctgcaccgacagcctcagcaaagaattgtcgtcgatggaagaagttgtgtctctccccgacctactccaggccgagcaaagggcaatcaacctcaggagggcgataccaagcagaagaccgttattcgcttcaaccagcaatcagaaggaagcttctcctgtgaatgatagcaatatgcagtcctatcacatcatcacagaaccaatcaaggatgatgcagtcactagaacaatgccagctatacctcttcagaatcagaatgagtagccatgtttgtgattttcagttcgctacttatcaccgtaatcgaaagtttgcagcaatcctgtaataaataaatatattcatgtctataaacagtgagcttgctatgcttatggatgattcatgttgaggatgcaatgtaccgatgttaagcaccttccctttttgattaaggcagtgcctcgtattcttgtaatatgggagaaatgtgtaataaaaacaagttctatgaggactctttcagaagatgctgatatgggattaggtgtataattgtttactgtcaaaggagacctagggtctcatttcagaggaactatgttctaacctcgagttaataaccaacctgttgatggaaaagaaaaccaattaaactgtgttgggttaaaaagccaatgagacagtagttggggataggagtttggatacgccttttacagatcaagataaggattgttggatgaaacccataagggtacccgccatgcatctacattgataagttcggatacacctgcaaacagttaagaagatctaggagacatcaatatttgggaacataatagtcgatggttggtaattagtctatccggtatcagaaaagggtcgaaggtgatatggcagaagaacaatatggatgctccccatctcgaggaagcactaaagatgatcatcggcaattaaaccctagtggcatagatacagatagcaagcaatgtatttccctgaaggtagtcagtgcagctttttgacgaaccacatcaaggtttcactgaaaggcagcaagccaaagggcctcatcgtccccagaagcgtccgcaatccccattaaagaataccacctgttagagataagccgaaaggtgatcgataaaagagattggcaaagatgttctccagcatgaaagaagtaggccgaaaggtgatgtataaacagaaacatgctctgcatcgctcaaggaagacccctgatagtaatcgccccgcaacagtcaccttgtcattaagtaagcaagatgacctaggtaaaagtgtttctatgaaggcaaggagtgaaatcttcaa

SEQ ID NO: 16876 - DNA, 1924 bp, Oryza sativa
ggatttttctttttataaaaccatttcaactttgtttatttcttttccattattatttgtgctctgaaaattccactaaaatttatttacacattttaggcttttaggaaatatacaaaaatcctccaagcctcatttgacttttatctttgcacattttaattgttggaggctttcacatgaattttaattattctttgcacaatttcgaggatgaattttagagtcgttttgggacgcgacatcggttatctgcataacttttctgccgggactgtgccacctttagattatcccgaatggttctgactttagcttcagcttctctcaggatgtcagtcccgaacacttggctttccccaacttggtcccacaaaagcggtgtccggcatttgcgcccatacaacgcttcataaggtgccatttgtatgctggcttgatagctgttattgtaggagaactcagcataggggagactcttatcccaggtcttcccgaaatctaggacacatgcgcgaagcatatcttccaggatctgatttagacgctcggtctgtccatctgtctgcgggtgatacgcggtgctgaagtttaatcgggtacccagctcttcttggagcttcttccaaaagtgagagggtgaattggcttcccctatcagatacgattttcttgggaacgccatggagactcacgatcctagcgaagtagagctcggctagttcgttccctccataggtggtctttacgggaatgaaccgtgctaccttgggtagtcgatccactactacccatatagaatcatatacgccttgggtttttggaagtccggtgatgaaatccatcccaatttcatcccatttccattctggtacttggagtggttggagaagtccggccggtatttggtgctctgccttgacacgctggcacacatcacaaagggccacgaactctgcaatttcccgcttcatactgacccaccagtatttctccttcaagtctaagtacatcttcgtactgccagggtggatggaataaggactttcgtgagcttcctgaagtatcaactgtttaagttctctattatctggaacgcatacccgatttccgttccatagggttccgtgttcatcctctgtgaaaccaacagctttaccctgtttcatattcttgaggagtccatgcatatccggatcattcttctgagcctcgcgaatttgatcgagcaaggtgggcttggcttccaacgcagccaaaaatccgcgactaactatgcttaggttcagggcttccatctgttgattaagttcgggtggaatgcctcggacgttaagagtgttgcaatggcttttccgacttagagcgtcggcaaccacgttggccttaccaggatgatagtgaattcccacatcataatccttgatgagttctaaccatctcctttgccgaagattcagatctgactgggtgaagatgtatttcaaactcttatgatcagtatatatttcacagcgattaccaatgagatagtgccgccagatttttagagcatgaaccaccgctgctaactccaagtcatgggtagggtagttgccttcatgaggacgtagctgacgtgaggcataggctaccacatgaccatcctgcatgagcacgcaccccaatccttggcacgaagcgtcacaatacaccatgaaatccttgcgagtatctggcaagactaacactagcgaggaaaccagcttttctttgagagtttgaaacgccttctcgcattgcgggctccacacaaatttctcttctttctttaacaactgtgtcatgggttgagcgattttggagaagttctcgatgaatcttcggtagtatcccggcaaacctaagaaactgcggacttgaatgactgtcttgggttgcttcc

SEQ ID NO: 16877 - DNA, 2122 bp, Oryza sativa
tttcgtgagctttcttaaagtatcagctgtttaagttctctgtatcgggaaacgcaaaccgtatttccgttccatagagttccgtgttcatcctctgtgaaaccagcggctttaccctgtttcatattcttgaggagtccatgcatgtccggatcattcttctgagcctcacggatttggtcgagcaaggtaggcttggcttctaacgcagccaagaatccccgaccaactatgcttaggttcagggcttccatctgttgattaagttcgggtggaatgccacggacgttaagagtattgcaatagctcttccgacttagagcgtcggcaaccacgttggccttaccgggatgatagtgaattcccacatcataatccttgatgagttctaaccatctcctttgccgaagattcagatctgactgggtgaagatgtatttcaaactcttatgatcagtatatatttcacagcgattcccaatgagatagtgccgccagatttttagagcatgaaccactgcggctaactccaagtcatgtgtagggtagttgccttcatgaggtcgtagttggcgtgaggcataggctaccacatgaccgtcctgcatgagcacgcaccccaatccttggcgcgaagcatcacaatacaccatgaaatccttgcgagtatccggcaagattaacactggcgaggaaaccagcttttccttgagagtttggaacgccttctcgcattgcgggctccacacgaatttctcctctttcttcaacaactgtgtcatgggtcgagcgattttggagaagttctcgataaatctccggtagtatcccgccaaacctaagaaactgcgaatttgagtgactgtcttgggttgcttccattcagtgacggcggtcactgtttcggggtccacagcaactcctttagcagatatcacgtgccccaagaatttgacttcggacaaccagaaatcacacttgctaagcttggcatacaattgatgttcccgcaactttcccaacaccagacggagatggtgctgatggtcttcttctgattgtgagtatatcagaatgtcatcaatgaaaaccacaacaaacttatccaagtattccatgaacactttgttcattaggttcatgaagaaggcaggagcattggtcagaccgaacgacatcaccgtgaattcatacagcccatatcgcgtggtgaatgcggtcttcggaatatcttcttcacggatacgtaattggtgatatccggaacgaagatcaatcttggagaatacagtggcacctttaagctgatcgaacagatcatcgatccggggaagagggtacttgttcttgatggtgacttcattgagagctctgtagtcaacgcacatcctcttcgttttgtctttcttctccacaaaaatcacaggagcaccccaaggggaagtactcggacgtatataccccttttctttcaactcttccaactgtttcttgacttcggccagttcatttgctgccatacggtagggtcgcttgtacagaggggtggttcctggagcaagatctatccggaactcaatctctcgcttgggcggcataccaggtagttcttccggaaacacgtctccgaactctctgactatggggatttctgacagtcctatctgatgaagttctgaacttctgacagaggttgggggtgcaaagaaaacaaccggttgttccggccctcggtacagagtgacagtgcgtctcgcgcaatccactactccttggaattgagccaaccaattcatcccaaggatcacatccaagttcttggtatctagcagaatcagatccgagggaaaaggaatcccctggatttctatagggacggcagggctataatactttgctgtcataacccctccaggggtggtgatgagcagagggtttctaagcctttctacccccaactgatttctccccacgaatggcacggatataaacgagtgggaagctccagaggtcaacaaaatggtagcagggatggaatgaatgaggaacgtaccaacgatgacgtctggagttgtcagcacgtcttgggcagtcacgtggttcacacgacccggaatgacgt

SEQ ID NO: 16878 - DNA, 7849 bp, Oryza sativa
aggaaaggggggggaaagaagactttttaggatttttctttttataaaaccatttcaactttgtttatttcttttccattattatttgtgctctgaaaattccactaaaatttatttacacattttaggcttttaggaaatatacaaaaatcctccaagcctcatttgacttttatctttgcacattttaattgttggaggctttcacatgaattttaattattctttgcacaatttcgaggatgaattttagagtcgttttgggacgcgacaaacctaccccccttaaacggaatctcgaccccgagattcggaggaactggcgaagagatcgggatgggctgccttcagctcgtcttcacgctcccaagtagcttcttcttcggcgtggttgctccactggaccttgcaaaaacggatcactcggttcctggtcctgcgctccatggtgtccaggattttcactggcctctccacgtaggtcaagtcttcgcgaacttcaatttgctctgagtcggcctgctcggatggcactcgaagacatttcttgagttgcgacacatggaacacatcatgcacgttacccaaggaggcgggcaactccagctggtaggcgacttctccgcgtcgagcaatgatacggaagggacccacataccgaggtgcgagcttcccttttgtctgaaacctgtgtacacctcgcaatggcgtgacccgaagatatacaaaatcacccactgcgaattccaggtcacggcgacggttatctgcataacttttctgccgggactgtgccacctttaaattatcccgaatgattctgactttagcttcagcttctctcaggatgtcagtcccgaacacttggctttctccaacttggtcccacaatagcggtgtccggcatttgcgcccgtacaacgcttcataaggtgccatttgtatgctggcttgatagctgttgttgtaggaaaactcggcataggggaggctcttatcccaggtcttcccgaaatctagtacacatgcgcggagcatatcttctaggatctggtttagacgctcggtctgtccatctgtctgcgggtgatacgcggtgctgaaattcaatcgagtgcccagctcttcttggagcttcttccagaagtgagaggtgaattggcttcccctatcagatacgattttcttgggaatgccatggagactcacgatcctagcgaaatagagttccgctagtttgttccctccataggtggtcttcacaggaataaatcgagctacctttgttagtcgatccacaattacccatatagaatcatatccaccttgggtttttggaagtccagtgatgaaatccatcccaatttcatcccatttccattctggcacttggagaggttggagaagtccggccggtcgctggtgttctgccttgacacgctggcacacatcacatagggccacaaactctgcaatttcccgcttcatgctgacccaccagtatttctccttcaaatctaagtacagctttgtactgcccgggtggattgaataaggactttcgtgagcttcctgaagtatcagctgtttaagttctctgttatcgggaacgcacacccgctttccgttccatagagttccgtgttcatcctctgtgaaaccagcggctttaccctgtttcatattcttgaggagtccatgcatgtccggatcattcttctgagcctcgcggatttggtcgagcaaggtaggcttggcttctaacgcagccaagaatccacgaccaactatgcttaggttcagggcttccatctgttgattaagttcgggtggaatgcctcggacgttaagagtattgcaatggcttttccgacttagagcgtcggcaaccacgttggccttaccaggatgatagtgaattcccacatcataatccttgatgagttctaaccatctcctttgccgaagattcagatctgactgggtgaagatgtatttcaaactcttatgatcagtatatatttcacagcgattcccaatgagatagtgccgccagatttttagagcatgaaccactgcggctaactccaaatcatgtgtagggtagttgccttcatgaggccgtagctgacgtgaggcataggctaccacatgaccatcctgcatgagcacgcaccccaatccttggcgcgaagcatcacaatacaccatgaaatccttgcgagtatccggcaagattaacactggcgaggaaaccagctttttcttgagagtttggaacgccttctcgcattgcgggctccacacaaatttctcttctttcttcaacaactgtgtcatgggtcgagcgattttggagaagttctcgatgaatctccggtagtatcccgccaaacctaagaaactgcggacttgagtgactgtcttgggttgcttccaatcggtgacggcggtcactgtttcggggtccacagcaactcctttagcagatatcacgtgccccaagaatttgacttcggacaaccagaactcacacttgctaagcttggcatacaattgatgttcccgcaactttcccaacaccagacggagatggtgctgatggtcttcctctgattgtgagtatatcagaatgtcatcaatgaaaaccacaacaaacttatccaagtattccatgaacactttgttcattaagttcatgaagaaggcaggtgcattggttagaccgaacgacatcaccgtgaattcatacagcccgtatcgcgtggtgaatgcggtcttcggaatatcttcttcacggatacgtaattggtgatatccggaacgaagatcaatcttggagaatacagtggcacctttaagctgatcgaacagatcatcgatccggggaagagggtacttgtttttgatggtgacttcattgagagctctgtagtcaacgcacatcctcttcgttttgtctttcttctccacaaaaatcacaggagcaccccaaggggaagtactcggacgtatataccccttttctttcaactcttccaactgtttcttgaattccgccaggttctgatttgctgccatacggtagggtcgcttgtgcagaggagtggttcctggagcaagatctatccggaactcaatctctcgcttgggcggcataccaggtagttcttccggaaacacgtctccgaactctctgacaatggggatttctgacagtcctatctgatgaagttctgaacttctgacagaggttgggggtgcaaagaaaacaaccggttgttccggccctcggtacagagtgacagtgcgtctcgcgcaatccactactccttggaattgagccaaccaattcatcccaagaatcacatccaagttcttggtatctagcagaatcagatccgaggaaaaaggaatcccctgaatttctatagggacggcagggctataatactttgctgtcataacccctccaggggtggtgatgagcagagggtttctaagcctttctacccccaactgatttttccccacgaatggcacagatataaacgagtgggaagctccagagtcgaacaaaattgtagcagggatggaatggatgaggaacgtaccaacgatgacgtccggagttgtcagcacgtcctcggccgtcacgtggttcacacgaccccgaatgacgtccttcccaccgttgttggggcggggaggcgcttggccttgctgacgccttggcttcgggcatttatccgcaaagtgcccgggctcgaagcagttgaagcacagacgctgctgaccttgagcgtccctgcggccttgaacgggctgcacagttggcgtaggaggacggggtgcacgagtcccttgttgattctgctgctgctgcggctgtgggacgcgcaccacgaattgaggtcggggcgcggagcgagattgctgctgctgttgttgctgctgtgaggaggatccccctggatagggattggtgtagcggaccctttggttagcaccctgttgattgcggaagttcgccaagcggcgcttgtgcgactccagttccttgtgcttggcttccaagcggatgctcttgtccaccagacgttggaaatctggatagtccccggagactagacggacggacagctcagggtccatacctgccaagaacttctcttgcttcttctcatcttcccgcacatcctccggggcgtaccgggccaggttgttgaactcatgcaaatactccatcacggagcggttgccttgcttcaactctcggaattcccttttctttagagccatgactccggcgggcacatgggttctccggaaggcggcggtgaagtgggcccaagtaataggctgtccctctggctgcgtagcctggaagtggtcccaccatagagatgcgggcccctgcagctggtgggcggcgaagatgactttctcctcatcgctgcactgcacagtgtctagctttttccccacggcatgcaaccaatccaacgcatccacagggttgttggagctagagaaggtaggtgggcggatacggaggaactcggcgagtttagagtgttgtggaggtggtggtggagcattctgctgtggcggattttggaggtggtggaggaaagcagtcatcatgttggcctgctgggcgaggatttgggtgagaatggcgttggtgtctggtggtggtggtggaggtggattgccttgggggttggggttgctgccttcgggttggttgccttcaccggtgctaacatttctcctggtcgtcaccatctgaaaaccccacacagaaccagcagacagggagagctaacgattaaaactaaccacccacgactactataaatcttgaatttattactgacattaaattggttcattaagttcaagttgcttaggcaaataaaaacaagacaggctccgacatagttatgccacacaccggcataaccatgccccacacaactcaagaagacaaacgaggaaaaacacacgcgcaagcctactaactactcgactaccgctgcgacgggccaggacggaaggcgagcaacagcgcatcctccgtgctaccaacgccggaggcttccccctcctgaggaaccacgggcgcaggctcggcacgaggggtctcgacgaagcaggtccacgccaaggactgacgaacaagctcgggcctggaggtgctcttgcgggcggtgatcttctggctgcggcagacgcggcggcgcttggggcggctgtcctctccttgggcgagcttgagctggtgcagctgcgactccaacgcgtcgaggtccttcttgagctgcaggttctcctgacgcagctccagaatcttcatgttgttctccaccatgccacgacgcaccatctgatggaagtcgatacgagccgcgtcgtatgcctccaccatgcgtgccagatgcacgacggtagcgtcatcctccgagctagcatctcagaaggtggcgtagtcacgggctcctccgcgacgagggtggtagcgatagggcgagtgctgcaactcgtccgggtagcgctggtgaagggtgccgatggcgaggaaagcggcgttctggcaagcggcgggaaaggaatctccacccgcggtgactgccagcgaagtccgctcgggagagccggagaggatcactgcggtgacctcccaaccagcgtggggctctgcatcctcaccctcctgctccgggagcggcctggcctggtagtccactccatgtggatatcccaagaccacgcacatgccccgcagctccaaaacgaagccagtcatgtccaaaccacgacgggtgacgctgccggccatctacaaacaaaaacaaagagaaaagcaacattttgaaggtcaggttttgatgataaatgaagcagcaagacagagagagactagacaattttcacaaataatcaaagatttttatttttgaaaatattgctaaggcttgggatctacggctcgtcctagggtcaagggaggctctgataccaacttgtcacgaccggaaatcacccaacaggcgttcctgacgtgcgtgtattattccttgtcccaggaggcaaggtacaccaaaagttgatacaattcagagtttaacaagcggaagcgtaaatataatcattacacgggcagcgaaggcccagcacacaaagacaacgaaaaacagcggaagactagggcgacgaccacaggcgcttgacggcaggcacgagctagacaccaaagccttcatcttcaaggagctcctcatctgtgcttgggaaaaattgagcaagactgagtacaaccaccgtactcaacaagacacacccacaaatgcagagtaaatgcaagggagtacaaagggaattataatataaggggttaaggttgcggtaaacagcatttaagggcatttagttactcaaagctattttgccaacgcgatcctagaactaaacagtgttattaatcaaggccgtgaacccacacgaacctgccttaacccaaggcctacgatgatccggaccgaactggcaacccgaccctgggtcccagctcgtcccaagccaacccaggccaaccattccacattttagttgtttaagcaggttttaagaattaaaacactaacttgggtacattgctcggcttgcccataaccgagggcgcggctattcgaatagattatactctgatcagaggtgtacatctttacccacaagacacatctttctcacgtgcaaccacgtgccacataccaccacggtatacagacgaaagacgtgacatagtttccaacccatcctagccatagacaagagtaccgacccaatcccgcctacggccggaacccccgggacaggcaggcaggactgagcccctagcagcagggcaccaaccctctgccatttgacatctcgactaccgggccgcagctcgtgtagccttcatttgccctggagaatgtccatcgacccccgacttcatccatctccaatccgtgtacttttgtttatgactagactgagccacaaactaagccttacccactagacatgtggtagtacggtagtgctttgcaacagaggcccgaagaccggtccttatacggccgaggagctactgtcaaaaccatgctccccgagcccagcctaaaaccattttggggaattttgaatagggggagcggggtgaatccaattccacaattaaccaacaattccagagtgtccaggtgatatgagagtttcccaagtctaaagttataaaaccacctaatgttgcctaattaaattgcgaagcatctacctaaagttaaactagtggtgtcatgagtagagtccactagttgaggttttgtttgtctagggtgaacaaggtagtagtaataacaataacaataataaaatggtcataacaaaggtaaataggcatggctaaataaaacagtggtaacgcgggaatttaaacaaagcgataatgcaataatttaaatcaacatagttttataaactgggattcaatatgatcaagatgatgtgtcttgccttgctcgtcttcccaaacgtcggcttcaacttccacgaagagcggatcttccgaagctgcagcgtctacacgaccaacggaaaagaaaaggcttaaccactaaataactccacataacagcagaaacaaagcacaaaaatgggttctttacatcttaaggaaaaattagggacttgaacggtccaattccgagttcaaatggccaaggtatggccatttgaagcttatctgctctttaaatggatatttagaatttcttcatttaatttttaattaaaaacc

SEQ ID NO: 16879 - DNA, 4228 bp, Oryza sativa
gcacagatataaacgaagtggaaggctccagagtcgaacaaaattgtagcagggatggaatggatgagaaccgtaccaacgatgacgtctggagttgtcagcacgtcctcggccgtcacgtggttcacacgaccccgaatgacatccttgccaccgttgttggggcggggaggcgcttggccttgctgacgccttggcttcgggcatttatccgcaaagtgcccgggctcgaagcagttgaagcacagacgctgctgaccttgagcgtccctgcggacttgaacaggctgcacagttggcgtaggaggacggggtgcacgagtccctggttgattctgctgctgctgcggctgtgggacgcgcaccacgaattgaggtcggggcgcggagcgagattgctgctgctgttgttgctgctgtgaggaggatccccctgggtagggattggtgtagcggaccctttgattagcaccctgttgattgcggaagttcgccaagcggcgcttgtgcgactccagctccttgtgcttggcctccaagcggatgctcttgtccaccagacgttggaagtccgggtagtccccagagactagacgaacggacagctcagggtccattcccgccagaaacttctcttgcttctcctcatcttcccgcacatcctccggagcgtaccgggccagattgttgaactcatgcaaatactccatcacggagcggttgccttgcttcaactctcggaactccctcttcttaagagccacgactccggcgggcacatgggttctccggaaagcggcggtgaagcgagcccaagtaatcggttgcccttctggctgcgtagcctggaagtggtcccaccataaagatgcgggcccctgcagctggtgggcggcaaagatgactttctcttcatcactgcactgcacagtgtccagcttcttccccacggcatgcaaccaatccaacgcatccatggggttgttggagctcgagaaggtaggtgggcggatgcggaggaactcggcgagtttagagtgttgtggaggtggtggtggagcattctgttgtggcggattttggaggtggtggaggaaagcagtcatcatgttggcttgctgggcgaggatttgggtgagaatggcgttggtgtctggtggtggtggtggtggcggagggggaggtggaggtgggttgccctggtggttgtggttgctgccttcgggttggttgccatcaccggtaacagcggttctcctggtcgtcaccatctgaaaaccccacacagaaccagcaaacagaaagagctaacaattaaaactaaccacccacgactaccataattcttgaatttattactgctattaaattggttcattaaagttcaggttgcttaagcaaataaaataaagacaggctccgacacagttatgccacacaccggcataaccatgccccacacgactcaaaaagacaaacgagaaagaacacacgcgcaagcctactaactgctcgtctaccgctgcgacgggccaggacggaaggtgagcaacagcgcatcctccgtgctaccaacgccggaggcttccccctcctggggaaccacgggcgcaggctcggcacgaggggtctcgacgaagcaagtccacgccagggactgacgaaccagctcgggcctggaggtgctcttgcgggcagtgatcttctggctgcggcagacgcggcgacgcttggggcggcagtcctctccctgggcgatcttgagctgctgcagctgcgcctccaccgcgtcgaggtccttcttgagctgcaggttctcttgacgcagctccaggatcttcatgttgttctcgaccatcccacggtgcaccatctggtggaagtcgatacgagccgcgtcgtacgcctccaccatgcctgccaggtgcacgatggtagcgtcattctccgagctagcatcccggaaggtggcgtagtcgcgggctcctccgcgacgagggtggtagcggtagggcgagtgctgcaactcgtccgggtagcgctggcgaagagtgccgatggcgaggagagcggcgttctggcaagcggcggggaaggaatctccacccgcggtgactgccagcgaagtccgctcgggagagccggagaggatcactgtagtgacctcccaaccagcgtggggctctgcatcctcaccctcctgctccgggagcggcctggcctggtaatccactccatgtggataccccaggaccacgcacatgccccgcagctccaagacgaaaccagtcatgtccaaaccacgacgggtgacgctgccggccatctacaaacaaaacaaaaaaaacaacatttcaaaggtcagatttttggcgataaatgaagcagcaagacagagagagactagacaattttcacaaataatcaaagatttttatttttgaaaatattgctaaggcttgggatctacggctcgtcctagggtcaaatgtggctctgataccaacttgtcacgaccggaaataacccaacgggcgttccttacgtgcgtgcattaatccttgtcccaggaggcaaggtacaccaacagttgatacaaatcagagtttaacaagcggaagcgtaaatatatttattacacgggcagcgaaggcccagcacacaaagacaaacgggaaacaacggaagactagggcgacgaccacaggcgcttgacggcaggcacgagctagacaccaaagccttcatctccaaggagctcctcttctggacttgggaaaaattgagcaagactgagtacaaccaccgtactcaacaagacacacccacaaatgcagaataaatgcaagggagtacaagggaatttataataagggttagcgttgcagtaaacagcatttaaagacgtttagttgctcaaagctattttgtaaacgcgatcctagaactatacaatgttattaatcaaggccgtgaacccacacgaacctgccttaacccaaggcctatgatgattcagaccgaactggcaacccgaccctgggtcccagctcgtcctaagccaacccaggccaaccattccacattttagttgttaagcaggttttaagaattaaaacactaacttgggtacattgctcggcttgcccataaccgagggcgcggctattcgaatagattatactctgatcagaggtgtacatctttacccacaagacacatcttcctcacgtgcaaccacgtgccacataccaccacggtatacagacggaagacgtgacatagtttccaacccatcctagccatagacaagagtaccgacccaatcccgcctacggccggaacccccgggacaggcaggcaggactgagcccctagcagcagggcaccaaccctctgccatgacatctcgactaccgggccgcagctcgtgtagccttcatttgccctggagaatgtccatcgacccccgacttcatccatctccaatccgtgtacttttgtttataaccagactgagccacaaactaagccttacccactagacatgtggaagtacggtagtgctttgcaacagaggcccgaagaccggtccttatatggccgaggtgctactatcaaaaccatgcaccccgagcccagcctaaaaccattttggggattttgaatagagggggaggtgtgaagccaattccacaataaaccaacaattccaaagtgtccaggtgatgagaatatcccaaagtctagagttgtaaaaccacctaatgttacctaattaaacagcgaagcatctacctaaaatcatactagtggtaccatgagtagagtatccactagttggggttttgtttaatctagggtgaacaaggtaataataacaataacaataataataaggtcataacaaaggtaaataggcatggctaaataaaacagtgataacgcgggaatttaaataaagcgacaatgcaataatttaaatcaaaataattttataaactgggattcaatatgttcaaggatgatgtgacttgccttgctcgctttcccaaatgccggcttcaacttccacgaagagcggatcttccgaagctgcagcgtctacacgaccaacggaaaagaaaaggctttaactctaataaactccatataacaagcagaaacaaagcacaaaaatgggttcttggcttcttaagaaaaaattaaagacttgaacggtccaatt

SEQ ID NO: 16880 - DNA, 1813 bp, Oryza sativa
ccggcgagctctccgtcccgagccggccgccgtcgctgacgtcatgccgacgtcgtcatccagggctgacgtcattatccttagggctgacgtcatcgttcccttttcttttcctttttccttttctctaatagtttaaatctttggaaaatcatatctaaataaccgtagatccgttttaggtggttcaagtttctaaatttttctaaaataaagatctacatattaaaattgtccatgaattgaattaaatttatttaattctttttaaatgggctttaattagattcaatcttgtaaaattcataataaattcatttgaagtcagaatgaggccgttcaagtctcataattcatctaaaattatgatctacatgtttgtttactttttatgtactgtttatttggtttttattagtctttttcttcgttttgcgtgttagcttgtcgtttctgtcgttgcgaaggttcgtgagtgcgtcggaagtgatcaagaagattaattgaagactgattattgcaaggcaagtcacacagatcctaaacacaatcctttgagcatgttgatcctatatttaaattctctatttatttcaactgtgcatttattttcgaatgtcactgggtggtgtgaacctattcctttgttatggccaatttgaattgaatatcctattccttgataccttgggtaataaattgattagcttgaaccttatgtattggtttggttcagctaaaagttatatatatataattgcttagcaatgcttagaaacattagctcactaatgggatgaatcatatatactacattattatttatggttatatttaatggtagctcacgatggttaatcgtgttatgataattaattggtaattaaaatatgattaaggtgggttgtgagcacatggttttgaaggtcgtgctcatggcaattaaggaccggttcgcgagctactgttgtgaaacatttaccgtaccaaccacaagccagcatgggcaacggctttatctcttgtatagcatgattcattatagtgtgccagactgtgaagtggcgagaagtccatgggggtcgctggggagtccatgcctctggttgtagagggggtgattatgatccaggaatggtgcactgtggtgagttgtgttatgcaggggataatgtcacaacctctattcgggtactttccagtatcgcgacgcatggttgacatgatgttgaggttgtgtcttgtgggtacagtggtacacctctggccagagtaaaactattcgaatagccgtgcccgcggttatgggcgagttgagcaatgtttttcgtgattagtctcacacctctcacaataattatggatgttatacctggtaatagtttgcttagctcctggtttggagattagatctgtacagccgggtatggttgttcaggatggttgggcctgtgcagcatgggtgtgctgttcagtgttgattaaaatttctgattaattaatttactgttttactactcttaactctttgctaaatgctgctttcgcaaatgagcctatattatgccatcctttggtatccttgtgcacttgcatatttgctgtgtggcttgttgagtatgtcatatgctcattcttgcaataatcatcaaacctcagttgaagataaagaattcagaaggagaagacgtttggcttatacctcagttgagctgcctgtgggagtggagctgaagccctcgctagaccgttaattccgctgctgttttcttttcttttgtaagtatgtgatgttattattatgatgcatttg

SEQ ID NO: 16881 - DNA, 1627 bp, Oryza sativa
gaactcggcataggggagactcttatcccaggtcttcccgaaatctagtacacatgcgcgaagcatatcttctaggatctgatttagacgctcggtctgtccatctgtctgcgggtgatacgcggtgctgaaatttaatcgggtaccaagctcttcttggagcttcttccaaaagtgagaggtgaattggcttcccctatcagatacgattttcttgggaacgccatggagactcacgatcctagcgaagtagagctcggctagtttgttccctccatacgtggtcttcaccggaataaatcgagctaccttggttaatcgatccacaactacccatatagaatcatatccgccttgggtttttggaagtccggtgatgaaatccatcccaatctcatcccatttccattctggtacttggagaggttggaggagtccggccggtcgttggtgttctgccttgacacgctggcacacatcacacagagccacgaactctgcaatttcccgcttcatgctaacccaccagtatttctccttcaagtctaagtacatcttcgtactgccagggtggattgaataaggactttcgtgagcttcctgaagtatcagctgtttaagttctctattatctggaacgcatacccgatttccgttccatagggttccgtgttcatcctctgtgaaaccaacggctttaccctgtttcatattcttgaggagtccatgcatgtccggatcattcttctgagcctcgcggatttgatcgagcaaggtaggcttggcttccaacgtagccaaaaatccgcgaccaactatgcttaggttcagggcttccatctgttggttaagctcgggtggaatgccacggacgttaagattgttgcaatggctctttcgacttagagcgtcggcaaccacgttggccttaccaggatgatagtgaattcccacatcatagtctttgatgagttctaaccatctcctttgcctaagattcagatccgactgggtgaagatgtatttcaaactcttatgatcagtatatatttcacagcgattcccaatgagatagtgccgccagatttttagagcatgaaccaccgcggctaactccaagtcatgtgtagggtagttgccttcatgaggtcgtagctggcgtgaggcataggctaccacatgaccgtcctgcatgagcacgcaccccaatccttggcgcgaagcatcacagtacaccatgaaatccttgcgagtatctggtaagactaacactggcgaggaaaccagcttttctttgagagtttggaacgccttctcgcattgcgggctccacacaaatttctcttctttcttcaacaactgcgtcatgggtcgagcgattttggagaagttctcgatgaacctccggtagtatcccgccaaacctaagaaactgcggacttgagtaactgtcttgggttgcttccaatcggtgacggcggtcactgtttcgggatccacagcaactcctttagcagatatcacgtgccccaagaatttgacttcggacaaccagaactcacacttcctaagcttggcatacaattgatgttcccgcaactttcccaacaccagacggagatggtgc

SEQ ID NO: 16882 - DNA, 804 bp, Oryza sativa
acgcgtcgaggtcttcttgagctgcaggttctcctgacgcagctcaagaatcttcatgttgttctccaccatgccacgacgcaccatctgatggaagtcgatacgagccgcgtcgtatgcctccaccatgcgtgccagatgcacgacggtagcgtcatcctccgagctagcatctcggaaggtggcgtagtcgcgggctcctccgcgacgagggtggtagcggtagggcgagtgctgcaactcgtccgggtagcgctggtgaagggtgccgatggcgaggagagcggcgttctggcaagcggcggggaaggaatctccacccgcggtgactgccagcgaggtccgctcgggagagccggagaggatcactgcagtgacctcccaaccagcgtgcggctctgcatcctcaccctcctgctccgggagcggcctggcctggtaatccactccatgtggatatcccaagaccacgcacatgccccgcagctccaaaacgaagccagtcatgtccaaaccacgacgggtgacgctgccggccatctacaaacaaaaacaaagaggagagcaacatttaaaaaggtcagattttgttgataagtgaagcagcaagatggagggagaatagagggttttcacaaatacgggggatttttatttcgaaaatactgctaaggcttgggatctacggctcgtcctagggtcaagggtggctctgataccaacttgtcacgaccggaattaacccaccgggcgttccttacgtgcgtgtattattccttgtcccaagaagcaaggtacaccaaa

SEQ ID NO: 16883 - DNA, 2561 bp, Oryza sativa
ccattgtgcccgtctgtctccgccgcgcccgttcgtcgttgccgttcccgcgcctcgtcgcgtggtggtaaggatccctctccctcgctgccccgtcctcgtcctttcggtgtcgcccgtgctcgttgtgcggttgtcggccccggtacccgtgtaccggtgtcggtagtcgttcacgcgtgcgggtggtgaccgtgtagtgtccgcgttagtgtgcccgctcggtagccacgtggtttccacgtgtgcaggccgtgtggtgtctagtggagtccgtttgtcggccactcgcctcggttgacacacggggtccgcttccgtcgacccgtggaccgtctctgtgtacccggtctaccgcggtcctttaggttgacatgtggggtccgcatgtcaacggcgcagccttcctgtcttttccaggctagcgcttacacatgttttatagttgcaaagcttaattataataatccgcaaatctccatatataacagcattaaacttcggatgatcatatcttggtcatacgagctccgaatcgatccgttcaagtctcctaatgtttgttataacctaaagaaccctgtgctttgttttttatgtattgttattgcttctttataggcttgaagctttgcttgtgtgcttcgcgtagctttcgtcgttccggaggttcccaaagcgtggttcgtggtcgtcgccgaaggttcggaaggccgttctctctgagcaaggcaagtcacatcatccttgagcatattgaatcccagtttataaaattattttagtttaaattaatgcattatcgctttatttaaaattcccgcgttgtcactgttttatttagccatgcctatttacctttgttatgaccttattattattgctattgttattattaccttgttcaccctaggataaacaaaaccccaactagtgggtattctattcatggttccactagtatgaatttaggtagatgcttcgctgattaattaggcaacattaggtggttttataactttagactttgggaatattcatatcacctggacactatggaattgttgggttatggtggaattggacatacacctctcttcctctttcaaaacccctaaaacctgttttcggtggggtttgggtgcatgccagttgtgggaagtagcaccccggccactataaggattaagctcgggcctctgttgcaaagcactaccgtacttccacatgtctagtgggtaaggcttagtttgtggctcagtctggtcataaacaaaagtacacggatggagatggatgaagtcgggggtcgatgaacattctctaggacaaatgaaggctacacgagctgcggcccggtagtcgagatgtcatggcacagggttggtgccctgctgctaggggctcagtcctgcctgcctgtcccggaggttccggccgtaggtgggattgggtcggtactcttgtttatggctaggatgggttggaaactatgtcacgtcttccgtccgtataccgtggtggtatgtggcacgtggttacacgtgaggaagatgtgtcttgtgggtaaagatgtacacctctgatcagagtataatctattcgaatagccgcgccctcggttatgggcaagccgagcaatgtacccaagtcagtgttttaattcttaaaatttgctcaacaactaaaatgtggaatggttggcctgggttggcttggaacgagctggaacacagggtcgggttgccagttcggtctgaatcatcatagaccttgggttaaggcaggtccgtgtgggttcacggccttgattaataatattatatagctctaggaccgtgttaacaaaatagctttgagcaactaagtgtcttctaatgctgtttactgcaaaccctaaccccccctatattatggctcccttgtactcccttacatttattctgcacttgtgggtgtgtcttgttgagtacggtggttgtactcagtcttgctcaatttttcccaaccccaaaagaggagttccttgaagatgaaggctttggtgtctagctcgtgcctgccgtcaagtgcctgtggtcgtcgccctagtcttccgctgtttctcgtttgtttttgtgtgtgctgggtcttccctgcccatgtaataaattaactatttatgattccgcttgataaactctgaaatgtatcaactcttggtgtaccttgcctcatgggacaaggattaatgcacgcccgtcaggaacgccaggtgggttataaaaggtcgtgacatgtgtgctagttgaactaagcatggctaaacaatccctaatccaacatctaatcaagttacattccaagctagcaaaggaacatgataacaaataatatggctgagacagtagggtaacatcccatggtaacattataaaacaatgtaatatttaaggaaaacaatagagcatttgcaatctgggatcaacatattcaagtgacaagcacgacttgccttgcttttgggctgaagaaacctcggcgactatctcaaagtacaccggagcgtccgaagagccatg

SEQ ID NO: 16884 - DNA, 1704 bp, Oryza sativa
gtcagttaacgttgccagtgtcggtgtagctcttagggagatggacggtattgattgcctgtctggaaaggtttgggatggagattttctaaaattgttcgattgtgatatacagccaattgaagatggagagcccaaattattatttagagggcgtcgtgaagggttgaaacgtctacaccaaggacatagtagatgatctcgatgacaagcaaggacaaggtttcatgtcggccgatgatttggaagaaattgatataggaccaggtgataaaccaaggccaacatttgtcagtaagaatttatctccagagttcagaaccaagttgatagagcttttaaaagaatatagtgattgtttcgcttgggagtatgagatgccaggactcagctggcatgccaccacgacataccggaaagaggccgtgataggacccttcacataacccactctaaccaaacataccacaccttaggtttcacccccactcctcgcaaggcggcgggcagtctcctctcatgcctaggtgaatcaaaaagccgcataggccatcgcagggcccatccgaacttcatcacgctcacccttgcttggatatgtcagctagagaagagctacactacaagcccaagcgttgcccacgctggcttgtggcaagtacgaggaattttttcagggtttcccgcgaaccggtccttaattgccattagtgcgaccatcaaaaccatgcacccacagcccaccatttattttaattaaccaacaccacagcggtggcactaatccaacatcaaactataatctgaagtctatgtattagtgtgtttcccccattgtgtgctagttgaactaagcatgactaagtaatctctaatccaacatctaatcaagttacatcccaagctagcaatggaacacgataacaaataatatggctgagacagtaggttaacatcccatggtatcattataaaccaatgcaatatttaaggaaaacaatagagcatttgcaatctgggatcaacatgttcaagtgacaagcacgatttgccttgctcttcggctggaggaacctcagcgactatctcaaagtacaccggagcgtcgggagagccgtaatctatgcgacaaacaaagcaaacaggctacaagactattgaaatagagaaaaaaaccatttttaatggattctttgcatttttcttgatttatggagagttgaatgggcttaaacggagcacggatgaattttctatgaattttcgaagattcaatgtgtttaactataaaagaaaaagccttaattgaattattgcgcattaattaaccccggatgacgtcagcgaaggaaggggggcgccgacatgcgggcccacatgtcatcgacacggaggaggcgtgtcacgtcctgataaattcatcccgaaataaaaatcattttctaaaaggaataatagaattaattaaaattcgaaaagaaattggcaaacactaaaatacgtacaagaaaaattcaaatgtggcccggggaatttttgttaaattctccttggtctaaaaggagccctcaaattttagtggaattttcagagcacaaataataattattaagaaataaacaaagttaaaatggttttataaaaagaaaaatcctaaaaagtcttctttcccccccccttaccttactgggccggctcggccca

SEQ ID NO: 16885 - DNA, 1145 bp, Oryza sativa
atatattttagggtcgttttgggacatgacaaaaggcctatagtttgggaaaacaccacctggcagatagactggccctgtagcttgatgctgagctattgtgccatcaaccaatgacttcaccatttttgttaaagtattgactaagactcctgattgattgatcaaagcatgttgcacagcgtagtcaatccgatcttggaagttgttaaactgaggttgtaatccattggcatctggaccaagatcttcaaccattccctcctgaaaaccatcacatttgtcgtgtagttcaccatcagtacctttatcaccttgagatgagcttgagccgacttcatcggcagcaactacttttaccttgtacttttggtaaactttcccacgggtttctacgaaagacttcatgaattgctcctgagcattcttcatcattatgtcgaaaatccttcttctgttctggtgagagcttgtccatagtgattggaacaatgttcccttcatgaacttcagacccagttggatttggaggcctgttttgaggatctgtcgacttgcccgtcgaggacggagattgcttttctactgacatgcttgccgtctcccactgggcatgccaaaagcgtgttgatgcgaaaacacgaggcctggaagatctgcttaacttcagtgcaggtccaaaaatcttgcctttaggttcgtgagcgtgccagttgatttgatcctgcaataaaagagaaataaagacaaagaaactacggttaaatccataaatggtagccgatcggccagccgccgatgacgtatcatttatctttgagccgatgtcatatgtgaatcgatcggcaatcatgaatcagtaagaaagaactaaatctactcgatcggctgtatatattaacaatatataatccttatgttgatatatacttaaatcaagtgattgggatagatcggtcgccatgccgagacagtataaatcacttagatcgaaatatatattaacaatgagattatatatgttcatagcatagccgatgagatagatttagcatgtatcgtctaatactccgataccactctactattaagatattaaagcaagtagaatatatcaaacagaagcctgatatactttgggggat

SEQ ID NO: 16886 - DNA, 1096 bp, Oryza sativa
accacgtgccacataccaccacggtatacagacggaagacgtgacatagtttccaacccatcctagccatagacaagagtaccgacccaatcccgcctacggccggaacccccgggacaggcaggcaggactgagcccctagcagcagggcaccaaccttctggccatttgacatctcgactaccgggccgcagctcgtgtagccttcatttgccctggagaatgtccatcgacccccgacttcatccatctccaatccgtgtacttttgtttatgactagactgagccacaaactaagccttacccactagacatgtggaagtacggtagtgctttgcaacagaggcccgaagaccggtccttatacggccgaggtgctaccatcaaaaccatgcacccctagcccagcccaaaaccattttaggggttttgaaaggaaggagcggtgtgaaaccaattccacaatagtccaccattccaaagtatccaggtgatatgaatatttcccaaagtctatagttgtaaaaccacctaatgttacctaattaaattgcgaagcatctacctaaaattaaactagtggtgtcatgagtggagtgtccactagttggggttttgtttgtctagggtgaacaaggtaataataataacaataacaataataatatggtcataacaaaggtaaataggcatggctaaataaaacagtgataacgcgggaatttaaataaagcgataatgcaataatttaaatcaacataattttataaactgggattcaatatgatcaagatgatgtgtcttgccttgctcgctttcccaaacgtcggcttcaacttccacgaagagcggatcttccgaagctgcagcgtctacacgaccaacggaaaagaaaaaggctttaactctaataaattccacataacagcagaaataaagcacaaaaatgggttcttgacttcttaaggaaaaattagagacttgaacggtccaattccgagttcaaatggccaagatatggccatttgaagtttatatgctctttaaatggatatttgcgaatttcttcatttaaattttaattaaaaactcatt

SEQ ID NO: 16887 - DNA, 1006 bp, Oryza sativa
ccagtcacagaacctaagccaccctctagggtagagtcgttagtcgcgtgtttctttgcttgtgtgtgtagcgcgtggtttgcatcagtggggtgtgatgtaaccatgctaggttgtttgcttaatcaacctgcagaaataagcaaaacaaacaacacatcaacaaaaagagttagttcctttaaggtcttgtccctagttctggtctattctttccttgtatgcttcccctctcaacctctaccttgtgacagatggataatactggtaacaaaggctatgggaacgatggatccgatgactcaagaacccaagccaatgggaatgagagaagcatcaacgaaacctcaccagagctaatccaagttgtggttaaccaaaccaacatgttggcaacagcctttcaactattacagaattggaacaacccagcaggggcaaccaacgttcaagtgcctacagtccagcaacagtgcaagttatcagaatttctcaaaactgagcctccaacctttgccattgccgtcgatcctatggaagccagtgattggttgcgcacaatcaagaagaagctagggttgattcagtgcaccgaccaggagcggggtggcttcgcaactcatcagctggttggaccggcttcagagtggtgggatagctacgaagcatcacggccagaaggacataccatcacctggaacgagttttcatctgtattcaggagatcacatgttcccgcaggaatgatcacactaagaaaacgagagtttcgctacctgaagcaaggagatttgaccgtcacagagtacctgcacgagttctatcgtttggctcactatgcaccagaagatgtggaaacagatgaagacaaacaagagaagtttctccaggggttaaaagatgagcttgcagtgcaactactcgctagaggattatgaaaattttgagaaacttgtggacaaagccatgcaacattgaaagtgagcataatccgatgacgaactgc

SEQ ID NO: 16888 - DNA, 1988 bp, Oryza sativa
cttggtatctagcagaatcagatccgaggaaaaaggaatcccctgaatttctataggaacggcagggctataatactttgctgtcataacccctccaggggtggtgatgagcagagggtttctaagcctttctacccccaactgacttttccccacgaatggcacagatataaacgagtgggaagctccagagtcgaacaaaattgtagcagggatggaatggatgaggaacgtaccaacgatgacgtccggagttgtcagcacgtcctcggccgtcacgtggttcacacgaccccgaatgacgtccttcccaccgttgttggagcggggaggcgcttggccttgctgacgccttggcttcgggcatttatccgcaaagtgcccgggctcgaagcagttgaagcacagacgctgctgaccttgagcgtccctgcggccttgaacgggctgcacagttggcgtaggaggacggggtgcacgagtcccttgttgattctgctgctgctgcggctgtgggacgcgcaccacgaattgaggtcgaggcgcggagcgagattgctgctgctgttgttgctgctgtgaggaggatccccctggatagggattggtgtagcggaccctttgattagcaccctgctgattgcggaagttcgccaagcggcgcttgtgcgactccagctccttgtgcttggcctccaagcggatgctcttgtccaccagacgttggaagtccgggtagtccccagagactagacgaacagacagctcagggtccattcctgccagaaacttctcttgcttctcctcatcttcccgcacatcctccggggcgtaacgggccagattgttgaactcatgcaaatactccatcacggagcggttgccttgcttcaactcccggaactccctcttcttaagagccacaactccggcgggcacatgggttctccggaaagcggcggtgaagtgggcccaagtgataggttgcccctctggctgcgtagcctggaagtggtcccaccagagagatgcgggcccctgcagctggtgggcggcaaagatgactttctcttcatcactgcactgcacagtgtccagcttcttccccacggcatgcaaccaatccaacgcatccacggggttgttggagctagagaaggtaggtgggcggatacggaggaactcggcgagtttagagtgttgtggaggtggtggtggagcattctgctgtggcggattttggaggtggtggaggaaagcagtcatcatgttggcctgctgggcgaggatttgggtgagaatggcgttggtgtctggtggtggtggtgaaggtggattgccttgggggttggggttgctgccttcgggttggttgccttcaccggtgctaacatttctcctggtcgtcaccatctgaaaaccccacacagaaccagcaaacagagagagctaacgattaaaactaaccacccacgactaccataaatcttgaatttattactgatattaaattggttcattaaggttcaagttgcttaggcaaataaaaacaagacaggctccgacatagttatgccacacaccggcataaccatgccccacacaactcaagaagacaaacgaggaaaaacacacgcgcaagcctactaactactcgactaccgctgcgacgggccaggacggaaggcgagcaacagcgcatcctccgtgctgccaacgccggaggcttccccctcctgaggaaccacgggcgcaggctcggcacgaggggtctcgacgaagcaggtccacgccaaggactgacgaacaagctcgggcctggaggtgctcttgcgggcggtgatcttctggctgcggcagacgcggcggcgcttggggcggctgtcctctccttgggcgagcttgagctggtgcagctgcgactccaacgcgtcgaggtccttcttgagctgcaggttctcctgacgcagctccagaatcttcatgtt

SEQ ID NO: 16889 - DNA, 637 bp, Oryza sativa
cgagctctactccgctaggatcgtgagtctccatggcgttcccaagaaaatcgtatctgacaggggaagccaattcacctctcacttttggaagaagctccaagaagagctgggtacccgattaaatttcagcaccgcgtatcacccgcagacagatggacagaccgagcgtctaaatcagatcctcgaagatatgcttcgcgcatgtgtcctagatttcgggaagacttgggataagagtctccctatgccgagttctcctacaataacagctatcaagccagcatacaaatggcaccctatgaagcgttgtacgggcgcaaatgccggacaccgctcttgtgggaccaagttggagaaagccaagtgttcgggactgatatcctgagagaagctgaagctaaagtcagaatcattcgggataatctaaaggtggcacagtcccggcagaaaagttatgcagataaccgtcgccgtgacctggaattcgcagtgggtgattttgtatatcttcgggtcacgccattgcgaggtgtgcacaggtttcagacaaaaggtaagctcgcacctcggtatgtgggtccttaccgtatcatcgctcgacgcggagaagtcgcttaccagctagagttgcccg

SEQ ID NO: 16890 - DNA, 3460 bp, Oryza sativa
cggtgttcagagtgtcgtcctgcagctccctcaaattggccatcatcctgagggcggcctcctcacaagcatgctctaatgtgcccttgcaagctgtcacctccatgttgggcatgtaggaggggatgccgtgaacctacaagcgaacctggtgcgggaactcgccactgagagggtggatgctagtgtattgtggctcccttggaaaaccgatcacgaacgccatgtgggacaactctgcaatgaagcctcccatagtctgaccttagtgcgttaggggacagccggtcatctatagaagacaaaggatggagaatcaaggcatgctcaaatccaattatagaataaacggaaaaggactcaaataaaataagcgaataagagcggaattttgtgcatagatcatttttgcatgagaacgaataaataagactgatatacatagcaataagataatgagaaattagatacatagtagtaataatagtagtagtagtaagaaattgatataggaccaggtgatagaccaaggccaacatttatcagtaagaatttatctccagagttcagaactaaattgatagagcttttgaaagaatatagaaattgcttcgcttgggagtattatgagatgccaggactcagccggaatgccaccacgacataccggaaagaggccgtgataggacccttcacataaacctctctaaccaaacacaccacacctcaggttttacccccactcctcgcaaggcagccggcaatcccctctcatacctaggtgaatccgaaaaccgcataggccgtcgcagggcccatcagaactccatcacgctcacccttgcctggatgcgtcagctagaggagagctacactacaagcccagccttgcccacgctggcttgtggcaagtacgaggaattcttccagggtttcccgcgaaccggtccttaattgccatgggtgcggccatcaaaaccattatcacatcctgatttttgtttcaggatttataaattatttaataaattaataatagaatttatattaaatgttcattaatttacaagtgaagttaaatgtgggaaataaaatttcctaaatataaagcatggatggatttaatttttattaaattctccatgattaagtcaactctctgaaattttctcggatttttcagagctcaattcttaaataatacaaagaacagttcagtaattatttgatcattaattatatttgttaagagcttttcttgtttaaaaacccttaaattataaattgttgtttaaaaggaattattagaaatgattttaaaagcttaaaagagaagatctagttttaatttgctaaatctcaacataaaattgggctagataaaattttgttaaatactttgcttaattctataattcttagatttttctgggatttatttgagctaaggaagtatttttaataaatggaattgcatttaagaaataatttaaattgaaaaaggttttaaaagtcttcttttggctttgggccgaaagccggcccaaaacccttctctctctttccctcggcccagccggcccagtccgccgagccgccgctctcctctctctctcagtcgctgacaggtgggccccgcttgtcagcttcgtcgtcctccttcggccgccgccgcccgcaaaccctagcgccgccgccgccttcttcttccaaatccggccgcgcctttccttctccggccaaattgatagaggggaaacaatctccgggatctcctcttccttttctcctttggaaacgtcggccaaatcggtttggaatgagtttgattcgagttcgaatcggatcggctttcctctctccaagccgagcttttcttcgccggtgccgccgccgtgggcctccgtcgctgctcgctagcccctttaaaaggatccccgagctcccctctacccgtcgcctccctcgccttcgctcgccggcgtctgtagcgccctagcgccgtgctgcttcgcgccgccgtcgtcgccgtcgctccagccgtgtcgcgccgccgttgcagtcgccgtcgtcggtcgccgtcgccaccatcgggttcgcaaggtcgtcgtcgtcctcgtccgccccttcgtcaccgctgaagaccgccggagcgccgttgccgccgtcgacccgaagagcttcgccgcttccttctcgtcgccctcgccgtccgttgcccttccgccgttcctttggtcaccggtgagttcgccgcgtcgtcctcttcgtcttggtgccctccgtttgtgccgaagtgccgccgttcgccggcgagcatgcgagcccgagccgccgagccgccgccgccggggtgacgtcatcgctgacgccatcggagccgttcgccgtgagccggtcgtggaccgatcgatctcggccgtccgttttggatagggttgatctcggccgtccgttcccgtgaaccgccaccgtgcgcccggtccaccgaaaccctagcccgctgacgcaataatccttcttttccttttcaaaaataattcattattgcgtcataattcaattaaaatcaatataaaggttttaatccgatttaatctttaaaaattcataactaattcatttgaactcagtttaatgtgcttcaagttgcaaaagttgtgtaaaataaagatctacatcttaaaattgtccttaaattgaattaaatttatttaattctttttaaatgggctttaaatagatttaatcttgtaaaattcataataaattcatttgaagtcagaatgaggccgttcaagtctcataattcatctaaaattatgatctacatgtttgtttactttttatgtatggtttatttggtttttattagtcttttccttcgttttgcgtgttagcttgtcgtttccgtcgttgcgaaggttcgcgagtgcgccggaagtattcaagaagattaattgaagaccgaatattgtaaggcaagtcacacagatcttaaacacaatcctttgagcatgttgatcctatatttaaattctctatttatttcaactgtgcatttattttcgaatgtcactgggtggtgtgaatctattcctttgttatggcctgtttgctatatatattggttcagctagatattagatatgattgcttagccatgcttagaaacattagcacacaactgggataacttattattcactattatttaaggatggtctaatgatagttcacgatggtcaatcgtgattggttaattaattaattgccaactaaaacttgataatgatgggttgttgtcgcgtcccaaaacgactctaaaattcatcctcgaaattgtgcaaagaataattaaaattcatgtgaaagcctccaacaattaaaatgtgcaaagataaaagtcaaatgaggcttggaggatttttgatatgtcctaaaagcctagaatgtgtaa

SEQ ID NO: 16891 - DNA, 2006 bp, Oryza sativa
ttgattactttattccttgataccttgggtaattataattggactagttgagctttatatatattggttcaactagatattagatatgattgcttagccatgcttagaaacattagcacacaattgggataactaatgtttcactatcacttatggttatatttaatggtagctcacgatggtcaatcgtgattggttaattaattacttgccaactaaaacttgataatggtgggttgtgagcacatggttttgagagtcgtgctcatgacaattaaggaccggttcgcgagctactgttgtgaaacattatccgtgccaaccacaagccagcgtgggcaacggctttaccttttgtatagcatggttcattgcggagcaccagactgagaagtggcggagataagcccacgggggtcgctggggagtccatgccttgttttataagggggtgattatgatccaggaatggtgcactgtggtgagttgtgttgtgcaaagggtattgtcacagcctctattcgggtactttccagtatcgcgacgcatggtagacatgatgttgaggctgtgtcttgtgggtacagtggtacacctctgataagagtaaaactattcgaatagccgtgcccgcggttatgggcgagttgagcaatgtttttcgtgattagtctcacacctctcacaatatttatagatgttatacctggtaataatttgcttagctcctggtttggagattagatctgtacagccgggtatggttgttcaggatggttgggcctgtgcagcatgggtgtgctgttcagtgttgattaaaatttctgattaattactccactattttacttctcttaaatgttttgctaaatgctgcttttgcaaatgagcctatattatgccatcctttggtatctttgtgcacttgcatatttgctgtgtggcttgctgagtatgtcatatgctcaccttgcaataatcaatcaacctcagttgaagaaaaaggatccagaaggagaagacgtttggcttataccccagttgagctgcctgtgggagtggagccggagcttcgctagattttgttttccgctgcagttttcttcatgatgaggactaagtgcctcataagtaagtacttatcgttttagttaatttgattaatctgtatattaaattgtcagtttgtgtacctcggctgattcctggacgaggattttatgcacaaataagttcggaaattactagtgaatttccgggcgtgacagtgctcccggtccaccgtggaccgagaggctgacgcgtgggccccactcccgtggacccagtccgcgcgtcctctctcccggctgacgcaataaatgagtttttaattaaaatttaaatgaagaaattcgcaaatatccatttaaagagcatataaacttcaaatggccatatcttggccatttgaactcggaattggaccgttcaagtctctaatttttccttaagaagtcaagaacccatttttgtgctttgtttctgctgttatgtggagtttattagagttaaagccttttcttttccgttggtcgtgtagacgctgcagcttcggaagatccgctcttcgtggaagttgaagccgacgtttgggaaagcgagcaaggcaagacacatcatcttgatcatattgaatcccagtttataaaattattttgatttaaattaatgcattaccgctttatttaaattcccgcgtgatcactgttttatttagccatgcctatttacctttgttatgaccttaatactattgttattgatattaataccttgttcaccctagattaaacaaaaccccaactagtgggtactctattcatggttccactagtatgaatgtaggtagatgcttcgctgattaattaggcaacattaggtggttttataactttagactttgggaattctcatatcatctagacactatggaattgttggtttatggtggaatttgacataca

SEQ ID NO: 16892 - DNA, 4938 bp, Oryza sativa
ggacccagggtcaggttgccagttcggtctgaatcatcataggccttgggttaaggcaggttcgtgtgggttcacggccttgattaataacattgtataactctaggatcgcgtttacaaaatagctttgagcaactaaacgtctttaaatgctgtttactgcaacgctaaccctttattataaattcccttgtactcccttgcatttattctgcatttgtgggtgtgtcttgttgagtacggtggttgtactcagtcttgctcaatttttcccaagtccagaagaggagctccttggagatgaaggctttggtgtctagctcgtgcctgccgtcaagcgcctgtggtcgtcgccctagtcttccgttgtttcccgtttgtctttgtgtgctgggccttcgctgcccgtgtaataaatatatttacgcttccgcttgttaaactctgatttgtatcaactgttggtgtaccttgcctcctgggacaaggattaatgcacgcacgtaaggaacgcccgttgggttatttccggtcgtgacatcataactatgggcacggctattcgaatagattatactttgatcagaggtgtacaattttacccacaagacacgttttcctcacgtgaaaccacgtgccacataccaccatggcatacggacggaagacgtgacataccatcctagccataaacaagagtaccgacccaaccctgtctacggccggaatcccgggacaggtaaccaaggttgagcccctagcagcagaacaccggccctgtgccatgacatctcgactactgggccgcagctcgtgtagccttcattctccctagagatgtccatcgagccccgacttcgtccatctctatccgtgtacttttgcccatgaccagactgagccacaaactacgccttacccactagacatgtggaagtacggtagtgctttgcaacagaggcccgagcttaatccttatattggtcggggtgctacttcccacaactggcatgcaccaaaaccccaccgaaaaacaggttttaggggttttgaaagaggaagagatgtgtatgtccaattccaccacaagccaaccattccatagtgtccaagtgatatgagaattcccaaagtctaaagttataaaaccacctaatgttgcctaattaaccagcgaagcatctacctaagttcatactagtggaaccgtgaatagagtacccacaagttaaggtttcgtttatcctagggtgaacaaggtaataataacaatagcaataataataaggtcataacaaaggtaaataggcatggctaaataaaatagtgataacgcggggatataaacaaagcgataatgcattaatttaaatcaaaataattttataaactgggattcaatatgctcaaggatgatgtgacttgccttgctcagagagaacaaccttctgtaccttcggcgacgaccacgaaccacgcttcgggaacctctggaacgacaaaagctaccgaagcacacaagcaaagctacaagcctaaaaaagaagcaataacaatacataaaaagaaagcacagggttctttaggttattacaaacattaggagacttgaacaggtcgattcagagttcgtatgaccaaggcatggtcatccgaagtttaatgctgttatatggagatttatggattattataattatgttttgcaattataaaacatgtgtaagagctaacctggaaaagacaggaaggctgcgctgttgacatgcggaccccacatgtcaacctaagggacacgacagaccgggtacacagagacggtccacgggtcgacggaagcgggccccgtgtgtcaacagaggcgagtggccgacaaacagactccactagacaccacgcgggccgcacacgtggaaaccacgtggctaccgagcgggcacacaaacacggtcaccacacgcacacacgaacgactaccgacaccggtacacaggtaccgggttcgacaccgcacaacgggcacggggcgacaccgaaaggacgaggacggggcagcgagaggagagagatccttaccaccacgcgacgaggcgtgggaacgactacggcgaacaggcggcagagatgaacgggaatgacggagacgacggcgaggggacgacttcggcggcgatcgttggatgaaggcgagacgaggctggcacaaggcttgacgacgcggagccgaggatgaagacgacgacggggctgcggcatacttgacgaaacgcgggcgacgaacggacgcggcttgacgaagggagggccgacgacgagcgcaaccaggaacgaggaggaggcgacaatggcagccagcagcagctgcacagagacgagaacggtgtggaacacgccactacgatgccgatgatagtggcggcgcagcgagacgatgggccggcgaggatggacggccgactggagaagtcgtcgatgaggacgaacggtgacgacgatgaagaccggtagggttcggatggaggggaggcgaggccgaggacgaccttgtcgctgtgatgccgaaggtcgtggtggtgtggtgcggccgatagtcgcacgggcgaggaggaagggacggtcgaagggacaccggcaaggatggcgtggaggcgacgtgcggtggcttcccgaccaaggagaggcttggccaagggagaggacgacgctgcgacgccgaaggaggagacggcgatgtcggtcggtgtcacatcccaaaaatcttaaaaatataaattgttgtttaattggaatttttagaaattaaattaaaagcctacaagttaaaccctaattttctaggaaaattttcaatataaaaatgagctagataaaattttattaaatactatgcttgctcctctattttctagaattttctgggaattatttgagcaagggaagtatttttaataattgaaacaacatttcataaaatgttttattcaaaaaagttcaaaagttcccccttcttggtccttgggccgatttcggcccgtctctctctttcctctctctcctccgcgcgcggcccaagccggcccagccaagccgcccgcgctcgcgcccctctctcccggaggctgacaggtggggcccacctgtcagggccgtcttcaacctccggacggccgccgccgagccgaaccctagccgtcgtttcccgctccaaatccggccaaatccgactccgttttctccgattgattgaggggttttgttcctctcggtctcctctttctttttccccaagaatcaaagaaatccgttgaggattcgatccgaatcgaactcattttgatttatctctaaaaaccgagttcgtgttcttcccgatccgattcctctcgtttgcggcttggtctcttcgattcgagctcatataaaccttccccgtgatctcctctttcatttgcccttttcccgagtcctcccgtgcctcctagcgccgccgcgacgcgtcgcacgtccgccgccgccgctggccatcttcggcatcgccgccgtgccgtctccgccgtcgcctttggtcgccgccaccgccgttaggtgcgccgtgaggagaggaagctcgtccgcccctccgtttgcgtcgccgatcatcggagctccctcgacgccgtcgacccgagccgccgcgccgcctcttctcgtcgccggccgccgtcgtgcatcgtttcttgtcgtggtgagtaccaatgagttcgtctcgtcgcccgctacgcgttggtgccctccaatcccgccgccgaagtccctagcgccggcgagctctccttcccgagccggccgccgtcgctgacgtcatgccgacgtcaaccctagggctgacgtcatcagggccagggctgacgtcatccttctctctttttcctttttctcgattttcaaatagattaaaactttggaaaatcataactaaataaccgtagatccgttttaggtggttcaagtttctaaatttttctaaaatcaagatctacatgataaaaatatccacatgtactgtttatgcttgtttttgtactgttttgttgattttatttatttgctttagtttccgacgttccggaggagagcgtttccgttgaggaaggttccgaagcgtttgtggaagcccaaggcaagtcacacagatcccaaacaaccctttgagcatgttgatcccgtttaaagctattattttatttcaactatgcattgttttcgaatgtcatcgggtggtgagcctttcccagttaattattggccgaagttgactttattttcctatgggttataatttgaatagcatgaaccttatatattggattggttcagctaaatgctatatttaggtttgcttagccatgcctagaaacattagctaattaaaaggggttaagtataaattatattacataattattatgtattaattagggttataatcaatggtagctcacgatggtaaatcgtgcgatgttaattaattgataattaaaatctggataaggtgggttgtgagcatatggttttgatggttgtgctcatgacaattaaggaccggttcacgagctactgttgtgaaacatttatcgtgccaaccacaagccagcgtgggcaacggctttatcttttgtatagcatgattcattatagtgcgccagactgagaagtggcgagaagtccatgggggtcgctggggagtccatgccttgtttataagggggtgattatgatccaggtacggtgcactgtggtgaattgtgttatgcgaggggtattgtcacgactcctttccgaggtatcgtggtggtactgaggcacatggtaacatgatgtggggttgtgtcttgtgggtacagtggtacacctctgatcagagtttaatctattcgaatagccgtacccgcggttatg

SEQ ID NO: 16893 - DNA, 922 bp, Oryza sativa
cggccaacctccagccacgccgctccgccacgtccgccgtcgccgccgcttgccgccgtcgccaagaggtgcgccaaggggtggagaagcccggccgcctgtccttcctcgccgccggcgacctgagagtcgccgccgccgttcaaccgagccgccgccgtcgcccttctcgtcgccggccgtcgtcgttcgtcgtttgtcgttgtggtgagtaccgttgggttcgtctcgtcgtcctctacgtgttcatgtcccccaaattcgcagccgatcatccaatctccggcgaggtcgccaacccgggccggccattgatgaggtcatcgctgacgtcatcatcggtttttctttttcccgtttttctaatagattaaatcttcagaaaatcataactagataaccgtagatccgtttcaggtggttcaagttgctaaatttttctaaaataaagatctacatattaaaattgtccataaattgaattaaatttatttaattctttttaaatggactttaattagatttaatcttgtaaaattcatcataaattcatttgaagtcagaataaggccgttcaagtctcataattcatctaaaattatgatctacatgtttgtttactttatatgtactgtttatttggtttttattagtctttttcttcgttttgcgtgttagcttgtcgtttccgtcgttgcgaagtttcgtgagtgcgtcgaaagtgatcaagaagattaattgaagaccgattattgcaaggcaagtcacacagattctaaacacaaatcctttgagcatgttgatcctatatttaaattctctatttatttcaactgtgcatttattttcgaatgtcaccgagtggtgtgaacctattcctttgttatggccaatttgcattgaatgccctattccttgatac

SEQ ID NO: 16894 - DNA, 1095 bp, Oryza sativa
ttctttccccccccttttccttcttgggccggctcggcccaactccctccccctctctcctctcccccgcggcccatcggctccctccccgcgcgcgcgccgctgacgggcgggcccgcccgccaccctcgctgacgggtggggcccacctgtcatctccctcctcgcgccgcgcccgccgcccgcccgtgccctagcgccgccgccgccgccgaatccgccgcatcccgccctccccgcgcgcaataaagagggggaaatcactccccgtgattccctctcccgtttcccccgttttcccctctctctctccctcggattcgtccgaatcgcgcccgcaatcctcgccggcgtcatcaatggcggccgagatctccgcggccggtttctttcttccccggccaccctctctccctcccgaccctatataatcgtcccccgagccccgctcttccgtttccgccgctcgccgctcgctctttccgtcggattcgtgctcgcgccgtgctcctctctctccgccgtcgccgccgacctccggttcgccgccgccgtcgctccgggcttcctcctgactcggcgtcacctccatcggcttcgccgcgttgtcgccgaccccgtccgcccctccgcttcgcccgccgaacgccggagcaccgtcgtcctcgccgtcccgaaccgcgccgccgccttcctccgcttcggccgccgtttccgtcgtcgttgtagtcccggggtgagccgaggaccgccctttcgcttccctctcctctccgctctctcgggcgccgctccgccgcgccggtggtcgccggcggtgaccatcggggcgcgggcgcgccgctcccgtcggccgtgccggcgaggccgccttcgggcgcgccccgcggctgccagccgcgtgctcccggtccaccgtggaccgagaggctgacgcgtgggccccactcccgtggacccagtccgcgcgtcctctctcccggctgacgcaataaatgagtttttaattaaaatttaaatgaagaaattcgcaaatatccctttaaagagcatataaactttaaatggaactatcttggccatttgaactcggaa

SEQ ID NO: 16895 - DNA, 3080 bp, Oryza sativa
ttcgggattcgcggggcgaacttttgtcaattaatgtcaatattggcatattttgagtccccacgggtgcgatgtttttgacgggattgaaaaacttcaaaaagcatccaaacgtgatttttagacatattggagtgtattgggtgcgttcgtggcaaaaactcacttcgtgattcgtgcggcgaacttttgtcaattagtgttggcaaaaaactcacttcgtgattcgcgcgacgaacttttgtcaattaatgccaatattggcatacgagggtgcaatgtttttaaccggaatgaaaaagttcaaatagcaccaaaataagatttttggacatattggagtgtattgggtgcgttcgtggcaaaaactcacttcgttattcgcgcggcaaatttttgtcaattaatgccaatattggcatatattgagcccccacgggtgcgatgtttttgaccggattaaaaaagttcaaaaagcaccaaaacatgatttttcgacatatttgagtgttttgggtgcgttcgtggcaaaaactcacttcgtgattcgcacggcgaacatttgtcaattaatgccaatattggcatatattgagcctccacgggtgcgatgtttttgaccggaatgaaaaagttcaaaaagcaccaaaacatgatttttcaacatattggactgtattgggtgcgttcgttgcaaaaactcacttggtgatacgcatggcgaacttttgtcaattaatgccattattggcatatattggtacacgtgggtgcgatgtttttgaccggaatgaataagttcaaaaaccacaaaaccatttgttttagacatattggagtgtattgggtacgtccgtgtcaaaaaatcacttcgtgactcatgcggctgatgaatcctgagttccacatgaaactcaaggctgttgttggcccgatctttcgatgagttgagataactacgatttgggagaaacgttgacgacccgactacaaccgtacaagacgttgtgttgcgccttagcgatcgatacacctctccgtaggttgttgatcttgccggtgcaaagcaaccctattcctgcaagcaaatcgaagaaacaagcacgaacaagataaaagcaatttgaattgcaaataggaataaatgcacacaataagttggggtttcggatacaagcagatggacggtctagccgacacgcgcgctgcaaggaagtagcaatggctaaactttcatctaaacaaaagccaactaaccctgaaggggttactagctatttaagggatgtaggaggtcagaagggcgtcctccctctgtttggagcgcaggccccccttgggccccacttgggccggggtcccagacgaaattacaggcccataggcccattacagacaatgcagccccttgtttcttcaattgccaatgactcagatagaatttgacaatgaggttggatccgttggaatgaggattccgagagctttctatcaagtactcgtgggcctaaaatgaaggccatatggagatttggcgaccgtttgaattcagcactatctcaagtggtcgaattggattctagaacgcggcggacttcatctccatctctgcatgcaccatggccgtcgtctttatcttccatatgcagccccaaataagtggattggtgtaacgccccgattttcgttcgggattaaaaatcattaaataatgcattttctagaaattaaataaaagttaaatcaatttaatcaagtgaaataatgggagaattaaaattttcccttaaaaatcattggccgggaatattttgcaatattctttgtgccctaaaatactctccggatttttccgtgaattttcggagttcaagaaataattttaaagtcacaaagttcattaaactaatttaaataaaaagaaaacaaaataaacttccccttcctccctttcgggctcggcccaaaatcctctctccttcccctcccgcggcccggcttgcctccccttttggcgcaagtctgtttttcctccctcccgggctcccctctcactcaggccgacaggtgggacccgtgggccccacctgtcatcttcaacctccagcccgggccggcaactgccatggccgccgaaaaccgcccacgtcgccaccattcccgggctcctcgagccctctctcgcgtgggaccgggagccatccctcttcttcacctcctcccccgtttttcccaatttttggcgccgaatcgagccccactttcgccacgatgtcacccacgtcgccggccgttgccgcttcaaatccgccacgtccggccacgatttctcctccccgagcctataaaaatggtccccgtgccatcctcccccttttccccaaaaattccgaacccgctgcactcccaaccgctctgcccttgttgctcttgcgctctgtcgctttccggcgagctccggatggacgccgacggacatgaagccgccgccgcgccgcaccgcttgcaccggcggctccggtgctctttgccacaccccggccaccgctccgttgccacaaaactccgccgaaacaccacatccaccgagcacccgagccacagctgcctctcgtcacctccagacgcgcgccaccaccgctcccgtcgctgccgcgctgcgctaccaccgccatcggcatcgccggtcctcgccgcaccccggcccctactccgtttgccctccctgcccctggaacgccgccgccgcgttcaccatctctctccgccgccaccgtcgagtccagccgcgtcgcgccgcctctccggtcgacgccgacttgagccgccacctccttcggcttcgtcatctcgagggccccgccggccctcggccgcgtctccgccatggtcgggtgtcgccggaacgccgttcccgccgcctctcgtgccagtcgccgccatcctttccgccgccagccgcctccctgtggtcgtctcgccgtcgccgtcctcggtgagaatccccaccggcccttctcctttttttttccctcctccaccactccccgtgcccgctgccgcgacgcgccgctgtcgcc

SEQ ID NO: 16896 - DNA, 11253 bp, Oryza sativa
ttgaaaaattactccgttactcgcgcggtcaatttttgtcaattaatgctgatattgacacacgtgggtgcgatgtttttaaccggaatgaaatgttcaaagagctagcaaatattggcctatgttggcacacgtgggtccgttgtttttgccaattaatgtaggtattggcctacgttggcacgcgtgggtgcaatggttttaacctgaacaagaaaaaacagttaaaaaaccagaaaaacatgagattttgacttattggaatggattgggtgcgtccttgttaaaaattcactccgtgactcgcgtggcaaactttgtcaattcatgccaatattggcacacgtgcgtgcaatgtttttaatcggaacgaaaaagtttagaaagcaccaaaacatgtgttttggacataatagagtggattgggtgcgtctatactgaaaaatcactccgtaactcgcgcagcgaaagtttgtcaattaatgccaatattggcctacattggcacacgtgggtgcgatgtttttagccggaaaaaaaaagttcaaaaaccacaaaaacatgagttttggacatattgcagtagattgggtgcgccctcgtcgaaaattcactccgtgactagcgtggtgaacttttgtcaattaatgtcgatattggcacacgtgggtgtgatgtttttaacaagaacgaaagattcaaaaagaactaaaacatgagttttggacatattggagtgtatttggtgcgtccgaatcgaaaaatcactctgtgattcgcgcgacgaactttcaattaatgctaattttggcacacgtgggtagcggaaccaaaattttcaaaatacacgaaagcatgagttttggacatattggaattgattgggtgcgtccgtgtagaaaaatcactccgtgactcgcgcggtgaactcttgtcaattaatgccgatattggtacacgtgggtgagatgtttttaaccagaaaaaaaaagttcaaaaaaaagtaaaacatgaattttggacttattggacgtacgtccgtgtcgaaaaatcactccgtgactcatgcggcgaacttttatcaattaatgccaatactgcactatattggcacacgtgggtgagatgtttttaaccagaaccaaaaagatcaaaaagcagcaaaatatgagttttggacatctcgtagtggattgtgtgcgtccgtgtcaaaaaatctctccataactcgcgcaacgaacttttgtcaattaataccgatattggcacaatggcacacgtgggtgctatatttttaaccggaacaaaaaagttcaaaaagcaccaaaacataagttttggtcaaattggagtggattgggtgcgtccgtatccaaaaatcactccgtgactcacacggcaaacttttgtcaattaatattaatactggactacattggcacatatgggtgagatgttttttaccggaacgaaaaagatcaaaaagcagcaaatcatgagttttggacatcttgtagtggattgggtgcgtccgtgtcgaaaaatcactacgtgactcgcgcggcgaacttttttcaactaatgccaatattggcctatattggcacacgtgggtagcggaacgaaaaaattgaaaggtacaaaaacataaattttggacatattggatttgattgggtgcgtccgtgtcgaaaaatcactccgtgactcgcacggcgaacttttgtcaattaatgccaatattagcacacgtggtgcgatgttttctcaccggaacgaaaagttcaaaaatcaccaaaaacatgagttttggacatatttaagtgtattgggtgcgtccgtgtagaaaaatcattctgcggctcgcacggcgaactttcatcgattaatgtcaatattggattatgtctacataactatctcgtagcaaagtgcgggctatcaactaattaaaccttccctccggcgtcaacatcgtcacaacgtcattcttattcgtgccaaatttaggtggctttcccagtttatccgcatgtccacaaattaatccctcatgctcttggcatttacccaccagacgatcacatcacccgctccatttgcaacggagctccttactctacctcgacttgcaaccgaccaatggtcgccgtttgttgggacatccatacccatgcattctggatacgctcttctctcctccgtcttgctcgtcctcctggcgctctccatcatcacactagtgccacgcatgccatcaccgcagtcgttcttccgatctccaccgcctcgcctgatcaacagtagggttcctcatccatccgatgccagcgattgtattttctccgacggtaaatgggtgagggacgccgcggccgtgactgcttaccgggaggactgcccgtttcttgaccctggtttccagtgcatcagcaacggccggagcaactcgtctttccgctactggcgatggcagcctcatggctgccagctcccgaagtaggtagccatcgccaatgacatctttgataaattagtaatttcttttctgtggtttttcatgatgtggacatttttcagttacttgcattgccactcattcttcaattccaaatgatttgaggtgtttaggttcaatgcaactgatatgctggagaggagccggaacggcagaatcgtgttcgccggcgactcgatcggccgtaaccagtgggagtccatggtgtgcatgctcgccgcctccgtgccagcggggaagtcaagaatatatgagcagtccgggaaacccattagcaggcacaaagggtacctcgccatggtcttcgcagactacaacctctccgtcgagtactaccgcgccccaatgcttgtcatgatcgaccgcttcccggcaagcagcggtgccgtcaggggagcggtccggctggacatgctgcctcggcacgccaaccgttgggctggcgccgacgtgctcgtgttcaatacagggcattggtggaatgagcacaagactatcaaatcgtaatttgagccgtagttaattaattaattattttgtttctatgcatactatgttgtttcatttattataactgatccctaagtctcaaactactgccacatacatgttttcaggggaaactatttcatggttggtgatcggctgaacatgagcatggacatgaaggaagcattccgatggtccctggagacagtgaaagattgggagataagtagtacacgggttccaaatagttattttttcttcaggagttattctccttctcattataggtaagaattgttagtgaacgatacacacagttcacctctttggtgaattttaacaagacaaaacataatccttcatacaatttgaccattcgttttattcattttttttgcaaaataaaaaagaatataagccatgcttaaaaaaatatttgacgataaaccaagtcacgggtaaaaacgaaaaaataaaagacaatacatatttttttaataaaatgaatacaatacatatttttttaataaaatgaatggttagaacgtatttaaaaagtcaacattgtcatgcattaaaaaaatggagatagtacgttccaacgtagatatataatgcttttaaaatggattaaaatggagtagtggtggtgatgagtggtgaatctaccaccatccccatcactaactccctactttttgagtaattttatagtacattctacttgaagtatatatttgctgcagtatatggaagggtaggttcgatatttgttaaaaaatatgaaaagtgttgtttagtattttgaaattgaagtttattttcatccggattgattttccagttgtagtattttttctgtatctcgtcatccattcgtgatatagcgcttcttcagaatttatcgcgtgtccccggcgtccttgactcccgacgcacttgcctccagccccggcgcctctatcccgattccttcatgacaaaaaaaaaagttatgtccagatttcacccgatatgtctggaccaggaaacaactaaataacacgtgattttcagatggagctaatataaattaaataactattattttaggaaaaaaagttacctccggatttcatccggtatgtccggacatggacaacaatgaaaaaacacgtggttttcgggcgtgctagcataaattaaataactattattttaggggaaaaagttactaccggatttcatctgatctgtccagaccaggaagacaactaaataacacgttgttttgtggtcatgctaacataaattaaataactattattttagaacaaaaatatttacatccggatttcatccggcctatccggaccgggatgacaactaaataacgcatggttttccggtcatgctaacataagttaaataaataatattttaggcaaaaaaaagttatgtccggatttcatccggtatgtccggactgggacgaccaaaaaaaaaacatgtgctttttcggtcatgctagcataaattaaataactattattttaggaaaaaagttatgtccagatttaatgtgatctgtccggaccaagataacaaacataaattagataaatattagtttaggaaaaaaaattccgtccggatttcatctggtctatccatactgggatgataactaaataacacgtggttttccggtcatgctaacataaattaaatatctattatttaggaaaaaaagttacattcatttggtctgtcgggaccaagacgacaactaaataacacgtggtttccggtcgtactaacataaattaaataactattattttataaaaataagttaggtccggatttcttccggtatcccagaccgggatgacaactaaataacatgtggttttatggtcatgctaacataaattaagtaacacctattttagaaaaaaaaaggttacatccatattttatccggtatgtccggatcaggataacatgtggtttttcagtcgtgctaacataaatttaataacaattattttagaaaaaaaagttacttccggatttcatccaatctgtctggagtaggataaccgaaaaaacacatggttttctgatcatgctaatataaattaaataactattattttagaaaaaaaaagttatatccggatttcatccggtcggtccaaaccggtatgcaacgaaataacacgtggtttttttagtcatgctaataatataaagaggcaattgtgcttcagtccttgatttacaattcaattgtgattttactcttactttttagggtttgtgattttgcccctgtttttctgaaatgagtctgcccctggttttgacataagtttggtggcctgaaatttccaaattaaacgaataaagaaaatgttattattatttgtgaatgaccattctacccttggttcaatgagcaaaatcccgaattcctttactgtccgggttgcaagcgctgggttgcaagtggtggcggcggcgacgcgcggccagcgcgcggcagggaggagaagcggtgcgggccagcacgcggcagagtcgggcgcgggcagggaggtacggcagcggctagggctgtcaacgagccgagcttgagcgagcttgcctgtctaggctcgagctcgagccgagcctataaaatgttcgaactttcaaacaggctcggttcgagctcgatcaagctcgagctcaactactgagctcggtttttaattagaacattgtatatttcaaaggataatttttaaaaaatatttaatttatggtttatcatattagtataagaagaaaaaaaataaaataaacatataatgccaatacaaggcatacaaataacatatttgatctaccaatttattaaatagcaacgaaaaattatatattactaggcccgttagaagctcgagctcggcgagctttgggacaagctcgggctcggctcgtttggagctcgagccgagctcgaatcaagcctaggacgagtcgagctcaagtagctcacgagtctcgagctttctttttttacagccctagcggcggcggcgtcgtggctggcgcgcgcagggaggtgcggcgctcccgcggctgcatgcgcagggacggcctttggaggcgccgcgacgaggatgacggcgaggaagaggacattgccgtcgacgagagggactcgctcgggctgccgttgccggtggtgagcaactgctcatcgtcggagtgtgagtacatggccgagtcagaggctgagctggcgaagaccgaggaggagaagtgcgcgtcggcgtcgtcagcgtcggagtacgaaaagacgtcgcagtcgagcacgaggagcgtcgcattccatggtgctgccgacgccggaggagacgggcataagctgagtgttagtgctgcttctattattgtgcgtttagttagttgggatttgggatgccataaatacaatggtgatcgatcacgatgcccatgcacgctgtgggccaaaatcatccatgcaactgttcgtttatcaagactaaatctctataacgagcaaaaagtgcaaatatctgtcactttttaccttcttttttctaatcattagacattagtgttcgttttgctctagaaattatcattgaatgccaaaacatgtcaggggtatatttgtccattcaccacaaatttaacaccgctaccattaattaacaaagtaggggcaggcggctacttcatttcaaaaaagcaggggcaaaatcacaaaccctaaaaagtagggataaaatcacaattgaatagtaaagcaaggatagaaacacatttggccctaatataaattagctattattttagaaaaaaagttacgtccaaattttacgtggtctattcgtactaggatgacaactaaataacacgtgatttttcgatcgtgctaacataaatttaataactattatttttgaaaaaaaaaagttaattctggatttcatccggtctatatggaccgggacgataactaaataacacttggttttaaggtcgtaacaaattccctttttaatcgatatatgtacgtgcccgatccatttttttgttctctccatttgctgcttgctgcctgccggttgctctttgcttgctgctgccctgcctcctactgcctgtcattccctgtctgcgctccttgcccctgactgcttccgtcgcccggatgccctgcaatgctgctgccgcttcctgcactgctgctgccgcgcctgtagcagttgcgcccgggtgccctgaagccacgacccttgactgctccgcatccccttgccgctgcgcgcctctggccgagccaccagtggccggcgcccttctgcggctccgccccttcccacgcacagagacgtcaatcgtggagttggggaatttccaaagacctaggttttgggtgcgcgggaagggcagatggaggaaaggaggtcggaaaatcgaatcaaatcacattcgcggtggctatcagcggcggcggtagcgcatgggacgaaggaaagcgaacggaattctctcgggccggatctgaccgaataagagaacgcgaaaatacaaaaaatactccatgcaaaaagatagaaagacaaatttacccttttcaatttatactgtaaactaatctaaaggaaggtcggatgaatcgacaccgttacatcatttactaatctaaaaggaagatcggatgaatctacaccgttagatcgtttaaactacaagtatatactttgcatgtaccgtaaaaatcctctacatttttaaggtcaaaaagggtgccatacatgtcaactaccccaccatcaattctctacttttttggaagaaaatatgacagtataaatgtgaataccaaatacatacataaattaaaggggtgatatatacattaatgaaggtaataatgctttaatgctaattttctttacttaaaatcacattgcaacgcacgagctagttaattaatatatgcatatatttctctctctccatattatactgtacaatgtttttccattctctatattaattaaaaatgcatacaatttcaagtttatatatagttccgtacagagaactttacagtttaaactagtattaaaatgaaggtcaaaaaatgacagcaatggcacgtggaacacgggtggctcgtgtgctgaccatcgagatccagtgaccagcagtgaccaattcgacgaggagtactcttggatcaacgccatgatctcgaacgccatcgacggcatcagaagccacggtcgaaggaaagcccatttcttgaacataacgtacatgaccgaactgaggagggatggccacccgtcgcggaaccgggagcctgggacgccgcaggacgcgcccgaggactgcagccactggtgtctgccgggcgtgcccgacacatggaatgaggtcctgtatgcacacctcatgtcaatgggatatgatatcaggatacactagtacaaaaccctcgcagggaccggctgtatatgtgctatgtgcctttttccacctccacatgataaaaaaaatataaaactagcatatttaacaactatagttgtcggctcttaaaaaaactggtagtaatattgggtataattttatgctttctaaatgtttcttgaaactaaatgatttgaaatgatgatgagattggtatatgtgatatgattgccttacttccccttatgttgtaagggaatgatgtctatctatttatgttgatatcatgccatgattaatatgctttatatattgcttaaatgatttgcttaaattacgttgcaaatagtttgtgaactaaaatttgctttatgctgaaaattgagactacaaatagccttccattgacttagagctttcatgtatgtaagtttgatggtgctcttgccagtacattaatttgattaatgtactgagtcttgccatgtgttgttttatgttttgcaggattagacttagtttaatttgagtgatgcggttttcgactgcttcttataggatttgaacttaatgggggtaaacccctagtcggtgtgcttaaggattgggtagtcaagcttccgttgttctcttatatatttatttggccggtcggcctatgtaactattaagttgatgtaagtctcttagtccctttcgtcttaaatgtgtttgctatatatgtccatgcttaagatgaaagtgtgaatctagtgcacatcttgggaattagattcacatgagttaagaatatttgagatgttgtagatctttagccattttgtcaagtctcctgattgtgtaacacatctggtcgccgctttcgagtggtttgacgggcatatctcacgccgaagttgactggcaggctaaaggcccagcaatgtcttcaatattcttctctcgatgtgtcggatatttcattatgtttgtttgatgacttgagttattcacttcatctcttaaatataatgggaggtccggagagcctacgaaaactgccgccgcagctaagccgctgccgagccaagtcgagccgagccgccgctttaacccgttgctcgatagctgagttgcctagccatagatgcaaacctaggttcctactggcctaccgtttgtcgtaccggggctttaccgtgaatcgtgtctagcccaccagtttagcctcagccgttgttgagtcgttcgctcgtttattcgaacgaggtgtccccgtgtttcgttcgtccgtccgtgttgagtcgtcctttagtttagagccgttcaaagccacaggttccgtttgcctatttcggttgaccatttgggtgatcccgtgtcacgtagaattgactcgttgagtcggtatctcatgaggcttgcttgccagtaaagtgttaagaatccattaaaattggtttcttttgctgtttcagtagctctttagcttgtatttattgtgtgccttgtttgtcgcttagactctggcagttccgacgctccaatttattttgaagtggttgaagaggttctatcagctcaagggcaaggcaagtcatacagatatcattgatcatattgagcctatctgcaaaacccctgcttttctcttaaaattgcattattttataatgtcatgtgggaaggaatttacccgtactcagccttatgcttaccctgattcattgatagcctgggataataatttgattgtaggttgggctccgtgtgctgtggttgttgcttgaacaaaacactcggctgaccgtgagccgatgttgacgcacccagcttcccaaaagccgttgtaactataggctgttgctctggggttattccagatgcaggttgatgcttaccaccattattagtgctgatggtcctatattgtggaaaaacaccctcaggaaggaaaatcgatcccttagcttgatactcacttgatcatattagacaagcactcctgattggttgatcaaagcatgataaacagcatagtcaatccgatcttgcatattattgagccctttaggatctccttatggtttctcatttttaggcttggcatctttaggagaactcgtttctgggtcgtcatcagatagcatcgctatcttatacctctgaattactgtccctgatctagttaacacaaatgagtgcaaaaacttattttgcatttggttcatcatctgctcgaggtccaccttttgttctgctgtcaacttgtctagcgttatcgggacgatgttgtccgggtcaacattagttgacttgatatccaccatgatgaagatatgtcgaagtcggtcccactgagcatgccaaaagcatgttgatgcgaaaaacacacactggtctgagagatttgctttactctagtgcaggtcctaaattttgcttttgggttcaaggcgtgccagttggtttgatcctgcaaccaacaagaaacaaaggagccaaagttagatccataaacgatagccgatcggctggattgctgatgacgtatcgttcatatcaggctgatgcgatatggatcagattggcagtgaagtatatggcaaagaaaagattaaacctacgctattgcccgtatatatcagtaatatatgagataatccaagaaatgccattgacaagcgtctaagtcccaaaagtccatcgacaagtatgagttccaagaaatgccatcgtacaaacgattttgtcccaaaaatgccatcacagttagggttccg

SEQ ID NO: 16897 - DNA, 8965 bp, Oryza sativa
atttcttggaactcacacttatcattggcatttctgggatttggatgcttgtcaatggcatttctttgattatcttataatatataatgtaggcttcgaaatacgcttaaacctagtgattcggatagatcggacaacatgccgagatagtataaaccacttatatctaaaggtactttgaagcaaagattatatatattcctagcaaggccttaggcaaatctaacatgtattggctactgttctgatactaatttatactaagataccagtttagattaaaagcaaaatttgctacaggacataaaaaacgtgtaattagctgggagacaccgcaagaacggaaatatgctatagggcatcgcaaaatattggtaattagctgctggacacccgcgggattattttattatatccggagaaattggagagagaaaaaactgtgtaagtacggttctacccttcgaatttttttcttttttttctctatccttctctgttccttcttttccttgttcttttctctctcattctctctctgctcttttcttcaagcaagcccgagggagagggagagcatcagctacagcgcggcgaggcgcgggcctggtgcggcacctcggctgggacggcactgcgctgtcacgcacagggctaccacggtatgcacatgcacgctgcctccaaacctagctcaagcatcagtagcagcgggccaacgacagcagtagcacggtgggttagtgggtgtcgctttcagcacctccatgttctcacttgacatggccacacccatctgctccctgccacgccagcaccacgcgaccgacctcgcttgggcgcccatcctcatcgccgctccgcccgcgggacttcaccctcgtccaccacgtcggcgtcggggacatcgcttgaaggagaatgcgtcggctcgtcgtcctcgtgcgagtacgccatgaaggtggtggactgccgtgcgctctccaagaagggcaagctgggccacgccgtcgcggagaagcgcgttcttgtaagttcaagtgccttaatttggtttggtgattaatgacaaatctaataatatgagactaacgtttttatgagcttttctttgactagtctcgtttcgatatgaaaataaaaatgatgagagttgtcaactaggttatttcccgatgatgagatgtggtagatatgcattctttggtgatggaccttaatcatgataaggataaaatgcatggagataaaacgttatgtaccacttcttatctcctactttttgataggttcatatatatgatttccatgttattgttatataagtgtgagactaacgtttactcgagtcgtatcttatttagtctcatttacattaagaacatggagatcatgaatgtatgtgttttatgttggtctacatcattactacatatgctttctctatgtgtacaggataaacccccattggtcattctctaattatgcatacacttgcatctcttgtatatttatttgtatgcatatatttagggggagcaaatcctatacatttattgtgcatgttgtagatccatgttgttcacctattatttatattggatctttgcatttaagcttgcatgtgagtatatgtcaattgtggtgttaatgaataatgaatactcaacaaacatattcatatctttcatatgcaactggttggtcatcaagtgcaagatgacaaccgatttgttgggactaatgttctcctttgagctgtgcaaaggaataggtcccaccgtgatgaggctaatagatgacaccatggtttgatgatcaccaagccaaggacatcgccatgttgacaagaatgaagtcaagattgtgatgagatgaaagtcttgacaaaggatggtcaagacctaggcataaacaagattcaactgaatagtcacatgtgttgatcttggttcaagcattgaccccaagttggatggcacaaggcaaaggtataatcgagcgaagatgttttcttagtctttttcccggtcttcgtgtttggtgtagaccggatttgctagataggcgccatactatcaagaggggtctatgaagcgagcacgtggatgatcttgtgccatattagttcatatgaatgtaggagcatttggtgggcttgtctagccatgtgtgatgagttttctcatgtcctaaacaaagagagaagtgagcaagtccaataggagcgagtgacatcttgtgggtatgtctggtggatatcctttggagtgtgagccctttatccttgacttaagttgtgtttcttgatgtatttttcatgggttggatagctccttgaataatctttccatagagtccaagaacatcaaattccgagatccaagtcaagagatatcgtcattttactgtcggtgggtcgtgctgaaaatcggtcggcggtcagaccgaccttgtgtagccggtcagacctcccgaaggccccgaaagcccgccaacggctagtttttttgtgcgttggactgagggccggtctgaccgggtttagaagggcggttagaccggcaagcacgtcctaaaaggtgttttagcctctaacggctagttttggtggttgggggtatatatacccactccccagcagcaagggtgaagttttggcactccattgcattatcttgaacccttgcaagagctctcacacccttgtgcacttagtttatctagtgaggtgttagagagtaagttaagccaatccaagtgcattgcttcattgttatagctagtgtggcacttggtcatcctcggcaagcatcctagacttgttactcttggaggttgccgcctcctagacggcttgtggaggtgttgcccggtgacctctcaaaggagattgtggaggaggcccggtgccatttgtgagtggtttggagttcaccaccttcggagtgaaggaagaactaccctagtgatcgaggcttgggtagtcctctccgtgggccggctcccaccatgcccaccccttgacgaagggggcgtgcggtggcttcgttgttgagcggtggagttgggctcgcctcaacggggattaggaatctggcgagtttccgaacctcgatgaaaaattccttgtctcttgtctcatttatttgttgcatttacatttgtgcaatttacatccatagagacatatttgagcccatatcacctaggtttgcaaaacttaacttagttgcttagttaaccttgcaccttaccttgcttagcaacttaggttagttttgtttaagtgccattaagttttaaaaccgcctattcacccccctctagtcggcctccttgatcctacaagtggtatcagagcttggtttctctttttatggacttaaccgttccgagagaaaaggatggcttctagagatatagtccacccgggtggtgaccctcttatatttgatagcacaaattatgcacaatggagaattcacatgatttctcattttagggccatgagcccaaaaatatggtggattgtagatgtgggcttttctcatgctttggatgaacgtgctcccacaagtgggcaagagaaatgcctacatctcgatgctcaagctactaatgctatattttgtgctttgagtgatgacatttttagtgaagtatgcaatctcaagagtgcacatgctatgtgggtaaagcttaaagaaaaatatgaaatgcccacacttgttgagaatggttgcacataaggacggatgtcgggtgaagacttcacctcctcaagagatgatgaggagctcccaacaccattcacatcatctcattacttaatggcaaatggtaagaatgaggtaaataaagattctcttgatattactattgaaagtagtaatggtgatgatgatgatgatgatgatggtgatgagccttcatatgatgaagttttggacatgcttagggaggctagtaaatacattgccaaagagaagaagaaaaattaaattttagagaaaactcttctctctttgaaagactcaaatgtggagctaataaattcttataaggaactttgtgattcttataagaacataaaagaagcttatgagtctcttctcattggcaatgcatttagtaagccaaaggtggacataggtatcatatgcaatttaattgatgatgatatgccatgtgtagctagctcatgcattacatctaagactaatatgtccacctcttgtgatgacttgcaagacataccttatagctcaaacatagatgaaaactcttgttcttcctcctctatgtatgttgttgctaaccttgtagaggaaaacaagcaattacaagccaaagtcaaagatttaaaagaagacttggatagaaactacataaggaagaacacacttgacgaaatcctaagcaagcaaaagagctcaaatgacaagtgtggacttggcttccaccacaaggagaatgctaagaagacaaggcacatgcctagatatacaaggaagcatgcatacttaagaaaggatggaaagaaaaatgtgagtaagaaccatcctcacattacatgttgtggttgtcatgagaagggacactttgcctcgttgtgccccaaaatgaaggatgaaaagtacaactccaaattgagacaaactggcaagaagacaagtcatagaggtcaaagcctaacttgctacaattgccgcaaaaagggatatattggtaaaaattgtctcataggtaatacttctaagcctaatattatttttgatgattatgtgcttaggaaaaataggcaaggcaatgtgtttgccagttatgttggtttacctagacttgcacctagaaggaggaccatttgggtgccccgtattttggtaactaacattgatggacccaattttgttggggaccaaaatgtgccaaaatgagaatataggtacatgagaggcattgaagttttggcctatgctagaaaatgtgattctcaccaagttcaagaattggagccaataatgaggatgaagaattcacatcaagaaccaatgccatctcggtaacatgcttttggtttgtaatttttttatatagccttatgtatgttgcattgcattctcatagctctttccaaaattaaatttccctctcgtatgaaaatcgtcatatatgcatgttaagcataataaatgtggcatatgaagctataggtttggtcataatcacacatcatgtttgcctcatattgcttttgtgcttattgtcaatcatttttttatcttagttcgatcttgagtttattttcctatctttgttgagatgaagagaatatcacattaaggaaaagtattgcatttcttgcatatgcactacaactcttagaatgtgaacaaagtgatcaaagtgcaagaaaggttttcaaaaggtccattttgaccaaaagtcaattttttgagaaaaaaactataattcttgaaaactattacatggaaaatgtttcaaaaggtctctaatatgttttccaaactttagtttgcaagaaaaaatatttgtaaagtaaatatgcatttttgactaaaattctagtttctaggatcttgttttggagcaaaactatttttctctctacaaggatatctaaagggaatttgaaatggagaccaaaacaagttagatagagttggtcatttcaaatgtttttggtttttgaaccttatccgaaagaccaacctattaaaagaaatttgatgtcaaaactcaccaaaaaatttagctagaccatatatggtcactttctagcacttggttgagtttatttcttaaacctgaataattgcatctttttggctcaaaatcatatttgaacttcatgcatattaatttctctcaaataccatctcatttgcttcttttcgcatttttagaggaaggtatttgaaaagagagcttttgtgtccgtttgctaaaacttggcctttactatcaaatcttgaattcagggagtagaaatgagagttgcattaatggggaacaatctgaatcaaatccatattccccttgctcccaaatatgaatttttgaaaaaagttgtatccatcgcctttgaaaagagcctaatttggtgaaaaagtcaaaaatcttatttaaatggcccaaatttgtgaaaatcctttcaaaagtatccaaatatgtatttcaaatgttttgcaaggctttcgaagtaaaaattttcatttgtgaaacaaaatagcaaaattggtttcaataggatcttgtttttgttgaaaatgttttatttccctaaatcaaaatatattgagtttttggaaaaattttctatacaaaacttttagagttggtcatttcaaacatttctctaattcaaagttctcccaaaataccaaccattcaaactatacaaccatttaaatttcagccaaaatcttgacttggccatttttggcctaaacttgcatatggtgtgttaagcctttagagtcaaagttctttgtgaatcttggcttggaagtgtatttataaccctcctaaggctttacgaatgtcaaactccatggatttcaaatttgaatgtgatttgagctctcaactcaaatttactcaccctaaaggcctacaatgcttattttgtcttatcttttaatataaaaatgatttttaagaaattatttttggaaaatttcctcacaagtataaagatcatatatgcaaggtttcaactcatttcgatttgatttgcaaagattttgactttttctcgttttgctcagcctgctgaaattttcagaacaaccatgtttttgggcagatttgtgattttcgtatctccaaatgggttgcaaatttgaagaagatcacaacatgagttttgatcctctatagttgaaatttatttcaaaatttattcagaattgttggaggtcatttatctaccttttcaatgttgttttaaagctaatatgaatgtccaaaatctgaaacttccagtttgctgaaactttgagacgtttttatctctaaatgggttgcaaactaggaggaacttataatacaacttttgatcctaaatagttgaagtttgcttccaaatttactcaaaattttcagtggtcatttggatgccttttcaacctcattttcaatctcaaaaatctgaaaaagtctgaatttttcagttggctgaaagcttttgagcttcatttcttcatgttaattgtgatctaggcaatggtcccaaaatgaaacttgtgcattcttttatgaactatctccggggtttatggcatattttttcgagcttggttccacaggttcctattgttaaaagatgccaacattgctatgtgctttttcatctaaacatggatttcaatgtgcatatcatttcttgtttattatttgagcatggtggtgaaatataagatatttcaagtaatgagctctttgttattttaaaaacctcatgaattcttgaactcttttagtttttgaaatacccatgatatatgaaaccacctaaactcaaaagtcatttttggatttctcaaaaccaagcctccatggatagactccaaattccaatctttgccaccaaatacaagttgatccttgctaccaaagctaactaccattccttcatcccaaattcgaattcctatacacaagtggtctctaaacaaatggtagtttatcttgatcatcttgaacacggcactagctcatcattttcattccttgccgatattgtgcacatgtaaaattcttccaaatagccttgaccaagctcttctcaatttttgacattcttgagaaaacctttgatgagaatatctcaagtgaaagttcaagtgctcaaactaaccccttctacatatgaaatctattccaaattccatatccaaagacaaatatctataagtaagggggagttttcctaaatgggcaatttctaaaatttgttgctttgtgcttccataaaaattttatttggccttgtgggtctttattcatttttgggcttttgtaattgcctattttctaaccctttttcatttttgggtgattaatgccaaaaggggtagaatatttgaggatcccacatttgatcttaaagggagagaatatttgtgatatccttatgatcatagctataaaaggggaaaatattctaggatcccacatcatagcattacatatgcatcatatgcgtaagcatgtcattggcatatatatcactcctatttactcaatgacatgcatggatataaatcaattgccaagcttcaatacaatgataatctatatacttcatatccaaatgtggttattattaatgaatttgtcatcaatcaccaaaaaaggggatattgtaagttcaagtgccttaatttggtttggtgattaatgaaaaatctaataatatgagactaacgtttttatgaacttttctttgactagtctcgtttggatatgaaaataaaaatgatgagagttgtcaactaggttatttcccgatgatgagatgtggtagatatgcattctttggtgatgaaatgcatggagataaaacgttatgtaccacttcttatctcctactttttgataggttcatatatatgatttccatgttattgttatataagtgtgagactaacgtttattcgagttgtatcttatttaatctcatttacattaagaacatggaaatcatgaatgtatgtgttttatgctggtctacatcattactacatatgccttctctatgtgtataggataaacccccattgatcattctctaattatgcatacacttgcatctcttgtatatttatttgtatgcatatatttagggggagcaaatcctatacatttattgtgcatgttgtagatccatgttgttcacctattatttatattggatctttgcatttaagcttgcatg

SEQ ID NO: 16898 - DNA, 581 bp, Oryza sativa
ggcgaattcgagctcggtaccctttgaatagatgaagcatacctgatcaaagttcgcgcattggaagaatctcctgccccgagtttgtatcatgagggaagacttgagtatgcatccatccccacaatcgcacaaaggacggtcacaccatggtggaaaccaaccagcaaaaggatcgcttcgctagttgagacgctcaaggaatggcgcttccattttcgtgtgttgtgtgctagtgggaaagaagatatgaagaggttgccttcagattgtcaattatatagcgtcgttttcactgcaatatatgtgaactcaatgagatacattattcattacatgtgacaagacgatcacgcgtgggcgtgattcactttatgtcaacgggcagcgccgaaagttgatagtgacaactcgagctgccgcttttcatgtgtgctgttgtggactgtgcgcgctactggatctgacactaccgtgaagcgccgaaagtgtgttgtcgtgagcataagttgttctagcaccatatgaatgaaaagaactatgtagacgagacaaacacaagtagtactgcagtagtaata

SEQ ID NO: 16899 - DNA, 1431 bp, Oryza sativa
  unsure (1)..(1431): unsure at all n locations
gcgcccccnaatgattccataggacacacncatatgaacatagaacgagtttatacctctggttatgtagaggatgtgtgtgctgcatctgcgtaaaccgtaacatgaagtttatgctcaataatgaaattttatatgaacacatagtattcgaattcgactcacttgacatcacagtactatttttggccttacaacggaaggttgtaaagccagcccacctgaactcgaagcgtcatggtaatccactactggaaagatgaatccaagctttttagtatttcattatatcaaactctaatgcggcaaaggaactgtttctgtgatatattgtgtttttaagggataataagcagggtagcttcgttttacttttctgtacctttctatacccttctatttcactaagctctattttatactagtaccagttaacattgaagcaagaagttgatctattctgtctccctctcctgaagtttcttcccttttccctctcaaaaaaaaaaagaagaaaaaagcctctggccttgaccaccggtagttacagacaaatctacttatctaagatcatttctctgttttgtttgatgatgtgttaggtagctggcttttctagctgctatgtttggttttattcaattgaaattggtataataaataccaacttgacagctatggactgttgatttcatgtaactctgcatatcgattttcatgcactatctaatccatccaaagtgctcctagatttgtataagtgcattgaaaatatttgaagaagggagtgttagtttgatgtttcaaagtttttataaatcttgagccacatctgagaaccaattatccatactgtcattcttctttatatgtttattttcctcgacatttattaaaattcttggggaaaatttgtttttcaatacataatatgcacttaactttgttttatttgtttcagaatcaaacaataacgatttggctgaaatacggaatgacaatgttccagcttcaattccacaaaagcagaaaacttctaaagcagagaggcgtgctattcaggaagctcagcgtgctgctaaagctgctgccaaggaggcaggtaatatccttgttctcatcttctcatccccttccactcccttgtggggtgtgctgcagcataattataacattagtttggacctgtagggttatcaggaaagtctgcaggcactggttcaggggctaatcctgcaatgcccaagcaagccaaatcatcaaaagtttctcagaagaaagatgtgccccaagctgcatctactgctgcttctgagaagaaggttactgaacgtccttcagaaagagataggaagaaagatgcgcctcaccctcgtatgcagtttgatgatgtgcaccgggtggagaaagcaaaaaaacgtgcaattgtaa

SEQ ID NO: 16900 - DNA, 8365 bp, Oryza sativa
  unsure (1)..(8365): unsure at all n locations
ctgtannnattaganacttagtagccatgtgancancancgaattggataaattgattatcatcaattttggttgaatatgaataactcaacaggtattcactatgtttcaggttgggctccaatatttgtctggtgaggtttctggtggaaatggtcgttgtatagcaatgcttcttgcattccaagtggcaataaaagattactctacacctcccaaaaaaactctgagtagagatcttacagcgaaaatcagcagttatgtgtcgtttcttattgagtgcaggcctctgtcaattagcatgggcaatgctattaggtttttaaagaacaggattgccaagctaccactcacattgtcagaatcagaagccaaagccagtcttcaatctgatattgatcgattcattaatgaaaaaatagttgtggcagataaggttattgtcagtcatgctatcacaaaagtcagagacaatgatgtcttgctgacatatgggtcatcgtcagttgttgaaatgattctggatcatgctcatgaacttgggaggaagttccgtgttatagtggtagattctcgtcccaagcttgagggacaaggattactacgtagattagtggaaaagggcatcaactgcacgtatacacatattaatgccatctcatacatcatgcatgaagttacaagagttttcttgggtgcctcctcaatactatcaaatggaacagtttattctagagtcgggacagcatctgtggcaatggttgcacatgcatttggaattcctgttcttgtgtgctgtgaggcatacaaatttcatgagagggtgcaacttgattctatatgtgctaatgagcttggtatgtatatatcttttgaatttatgctttgtaactatttttttttaccatgcataagaatcataacacgagtcttttacccaggtgatccagatgtcattttgaaagttcctgggaaggcagatttgggccatcttaagaacttggcagacaatgaaaatctccaactgttaaatcttacgtatgtccttgaattccattttttttaagataatatgtccttgaattccataggtgacttgttttcttagttctgtcaatgttccctttgattgagataattttgcacattgataggtatgatgccaccccttctgactatgtgtcgatgatcataacagattatggaatggtaaaatacctttcacctctaattgcagtcatttacttgtcctatttgaagatattcatataagatgtccttttgcttagttttcctcacataagcatctggctgttgaattataggtgttagcaagccttttctatggatgttttttagcaacaaacatttttttcatcttttaagttgcacttgtatacttttttcctcaaaattaaatcttgcagaaaacattaattgatgccgattgcatgtactgaactacttcctccgtttcacaatgtaagactttctagcattgcctacattcatttagatgttaatgaatctagacatatgcatgagtttagattcattaacatatatttgtatatgggcaatgctagaaagtcttacattgtgaaacggagggagtaatatattctcttctacagttagacaaatgtcttttttatgccaacttttttagatttttatgaacaggaaaaattttattcaatcccttggaagtattatggttggtctatttaacccttgtaggcttgaattcagtactcttaccacctaaagaacaaaagccggtttaaataactccttagggtagttttgtaagtagttgtgagatgtaaacgaagatgtagcaggtggtggtgtctgctgaaccaatttcagccaaacaggctcggcttctcccatgtattgtctgcctggcagatacatgaatccatttctcccaaacaggcccagccgctccctttctttctccaattgttgagccagggaacatgtcaccactattgtgcttctacgagctgcctactagtcaaaacattatttaactgaatacatcgccaagctatcctactagtagttaaaaatatatttgaccgaatacattgtcatgtcattgcacttgtcatagcccatctggacaaaacctctttcaaagccacttacctttgatagtttggagatagattacctgttgatatttgtggtggtacatacctggtttactttaagggcccaagtagacattttcgttataaatatttaagatgatggctctcttatccggttcattgaattgctgatggggttgttttgctttgttccagcttccacccacaagtgtacctgtcattgtgagagagtatcgcaaagaacagctgtggatatagatgtactgcattatgacaacaattttggtaactgttgttggcttgctgcccaaagtgcgggatgcgtgaaacatgtacttctgtttgagagctctcagccgccaaaccttttttcttttgagcttatcaatttgtttgccacaagatggtccaattttgatatcaccatggctccgtctatgaagattgcactctggcacctctagaggggttatgttggtggtagtcatcaaacgttgtgatgcaactatgctcgtacctatgtcttcctgagcctcctctggtcatgcgcgtgatagtaactgggacctgagatgaattcgaagctatatttgtaacagtattcacctgtccaatacatcatgtagattggggggacttcgcgattacgcatgaggtatcgggatagggataggttgcggaaatctcatacgttgcctgagcacttcgcgatgcctataatttactagtaatattttgcaacttggggatagttagatacataccgattttcaagctgcatggaattatggtgacaagttcagagtttttattatgaaatcatacattcagtcactctcggcctggagtgaccgacttcgtacgttcactgaacttcggaacgactgaatcatgataatcgaacattataaaatcttcttgcagtaaaaacatgtttaaatcctagaattcagcatgatacagtgcacgaatatatcctgtggagcatgtcctcgcagctaaagtacaactcagaatacgaataaaaatggctataaataagcctataccacaatggatacctcgctacatgggcaaaacgatgaacaaaaactttccacgcaaagaacaatgtataaacggttgtctagattactggcatatttgctcaacggcagccacaatctgggcaggctgcacgacggtggcatcctccagaggcgcagcatacggcgtcggcacatcctgcgacgacaagcacatgatgggtgcgtcaaggtagtcccagaagttgtcgatgatggccgatctcaagctggcgccgatcccgcccgtgcgcatgcactcctccacaatcagcacgcggtgggtcttcttgatagagttgcctatggtgtgcaggtcaaatggcttcaacgacctgatgtcgatgacctcgggatcataccctttgttcaccagggtcttcgcagcctgcatcacatggtacctcatccgcgagtatgtgaggatggtaacatgttctccgggacgcaccatctcagcctcctccaggcatagaacatattcctcgtcgggaattttctccttcaggttgtacagaaggacgtgctcgaatagcaccacggggttctcgctccttatggcggctttcatcagacccttggcgttgtaaggggtagagcaagcaaccatctgaaggccggggatcgactgaaagtaagactccagacgctgggagtgctcagcaccaagctggcgaccaactccaccaggacctcggatcacgattgggattttgaactggccaccagaggtgtagtgaagcattccgcagttgtttgagatttggttgtaagcaaggagaaggaaacccatgttcattccttcaacaacaggcctcaaccccttcatcgctgctccaactcccatgccggtgaatgagttctcagcaataggggtatcaaggactcgtaggtctccaaacatctcagccagacctttggtcaccttgtaagaacctccatagtgaccgacatcttcaccaaagacacataccgttggatcttctttcatctcttctatcaaggcctcgcgaagagcctcaaacagtaagacctcatgactgaataaaagttacagaattaggaatttgccttagattacatattctatgcactgaaatgttatttatttggataagataaaaaaaatcagaaatgtaacacctaaactagcacaagtgcacaacacatataagcattgtaatgaaccagggcaaatactgaattctgaataccagtgttaaccgattcgttacaggtaccgataatcctacagtcaacattacaaagtaaatgtaaaccaactaagcttgacagcctgaagcaattttttatgagtatatgcagcctatataatagcatggtaagtggccaattgggttggaaactaatctctctactttaatgtgtctgacgttgggagaactaaatgactggagggagtaacagaacagtttgtgtcacccggtgaggagcatattccactgagctcaatgtcaaatttgaatggctagacgttataaattctgtgctttccagccctatgtccattatatagattagtaatagccaaaggggaaaaaaactaaattcctaatttcttttttgcaatacaccaaacattggacatgtctacagtgcaggtaggagtataaggcagtatgcaagtcccatcagtgtttcaatcaaggcctaaattgatgcttccaaagtcattccctactcatatccaagaaaatatatgtcaaattgtgaatgccagccagcagcagaagccatagctgaaagctgatgggcaagtcagttgaatgttctactttgttgattgaaattcactttacagtggtctctactggtagtaaaatcaatctagacctttcatcttttcttatataataataataatgggccatatctatcctactactggtaatagacctcataaatctaaagaccgctataaaatactcctagtttctcggatgcttcaaacaatttcttcatgaactgtttctagtcataagttctctaacttcaattcttcatacaagcttagtaacattcaactagccccctgtatcaactttcaacgaacggaaggctgcaaaattgcatcacctaacgagcagaataacaagagcccaacccctaaacagatccaagctccaaaactggagtatagccccaacacacaatagactaagaccaacacaatccagccaaatcaaacccagattgagctgaatcgatcggtcttatgaacagaagaaataattgaacgcttggttaccgtatggattctgtactacacaattataaaattagaggggtgctgaattctttacccgtcagacttggaggaggccgcgctcgccggcgattccgccttggactgcacgcgagaagaaacacaaacaaacacaacatagagcagttcagtgaaaccatcagagcccagcagagcatcgtagcgaacggaagtatatcagctcagagagcagaacgtctcacgcaactgcaacggcggcccgcgccaccatccttccccccgcccgccgcgccgcgcacgatccggccgccgccgccacgcgcacgctcctcgccgctgcaagagcaaaacaaacaccacatgaatacacaataatcccacggaaccagcggagatccgacgagcaggggaggaaacctcgcttaccggaggctgatctgcggccagcggaggaggaggaggagaaggaggaggaggatcccacccgcggggcggcgtggagggaggaagcggccgccattgttgaggtcgggatctctctctctctctctctctttctcgggaggacgcgcaggcgatgggttggtggtccgctatataaaggtggggggaagtcttggggtggcggcggtggaggaatggaggcggcggcggcggtggcggagagaacgaggtgaggtaagagaggagaggacgagaaatggagagggagacgatgggctgtggaccgggtctatggacatgatggggggtggattttggttttgatctcggccgctggattttgatccactgtgtgagaatcttgaaaatggattgtttgctcatatgcacgtacgcacattcaaacactatgagatactggacttttatactccatccatccgtcccgaaatatttgatgccgttaacttttttaaacatatttaaccatttgtcttattcaaaaacttttatgaaatatgtaaaactatatgtatatataaaagtatatttaacaatgaatcaaattataggaaaagaattaataattacttaaatttttttaataagacgaacagtcaaacatgtttaaaaaaatcaacggcgttaaatatttagggacggagggaatatattataagattaacggagtaaacatatgcgtcttgttgttaatgggtatgtcgcctaccattaaaaataattagtcgtatatgtgagtatacatgtcaaatatcatatattatatacttgattatggataaataaaattttcaagaaataaatttaataaatggttttaagcaagtgatcttagtatcgcattagaagattgtttttaataaatatatgtatttttagaagtgtggattatcatctgcagtaataatcagatgaagaaaccgaaaagaacacggacataacgtaaggactcttggattaagcacggtccatgcgaaaatcctaacgagcgatcaatcgccccgcgtgatcaccccctcctccacgctacttttctattttagtaaatttatacacctcaagtttacacatctaaaattcatacacataatctaaaatttatacacataaagattagagacccaaagtttataagttaaaagtttatatatccgattcaaatttaaatttgaattcaaatattttttatatgtagtatttctatacatctaaagtttatagacccaaagtttataagtcaaaagtttacccgattcaaatttaaatttaaatttaaatatttttatatatagtatttctatacataaatttttctaactttattattttttattttttaaaaaatttttgtggtgtagtaggaagagaagaaggggaggaggaagagggagaggagcgtattggtggggggatgggaatgatcgctgtgggcgatcacccgtccattagtgtcacccaacgcccggtccatatatatatgtctaattatgagattatttttagattggatgtacaacacgagcccctttgaattggcctcctccctccttgtctcttctcctcctaagctaggccaccattagaaacacccttttgctccaacttcgtaaccactctgacttttatgttctcgtctctgaccctgttcactgacgtcctataaccccataattccaacggtattatcaccaactcattacctaccattgtcttccatcgactacgaacatccctctaaacatgagaaaacaccttattccccatcatcaccgtcaaaaagttgccaccgtttcgctggtgagttacattgatacctcctcctccctcttgcccacttacggcttgcctaaattcagtgttcccatgatgaaacctaaaaaaccatataatgatgagttgagaaaaaatggttattgttttttctttcttaaagagtacaccctccgtaaaaaaatatatataaatcctagctatatacatggaccaggtttataattaggattgttttttaggatggagagtacatttgaaagcgcacaaacactatccagacaacaccacaacatttaaacaccgagcgtcaacacacacttatactttttccataaaaaaaaacctagatgaggtgtaacaccacctcaacgaatctggatataaggttgtcaagattcgttatcttaggtgatatttgcattggtttttccgaggccaaagggagtacgacccactcgacgcgagcgtgtgctcaaaaaattggtggacaatgacgtcccttccaaacatgtatcagtttctgacttgaatttggactctctcgaatggtaagtttaggcacatgactcatgaggtcacaattaactattaccatgacattaccagttgcatacaaatatgtttgagtaaaatgcaccagcggacattaacttgggtggnngtctatgcgactgctctaatttnnacagtca

SEQ ID NO: 16901 - DNA, 4781 bp, Oryza sativa
  unsure (1)..(4781): unsure at all n locations
cgggttgagtgtcacattatgatagaacatacatgctncccgctctatgcatagccggtatccgttaggccttatgcctagcagtccacgggtatccgtgaattcattatccttacaccattagcacgatgcgaagccttacctgttatacccacccgtttttgataccctttatagtttacgtttacctatcacctatgacatcatttttatactaccctggtttttcgttgtcgagtaatgctttgcattccaagcatccaaagaattagtgtaagtatcccaatagggttgaatttccgtatggttgggtgtgcccggcctgtatgttttatggcctataataataagagtttttgcgtgggaagcggtccgttccattaaagtcgtttgcgggcttacctgcccgctccgaaaaaacgtcggttggagcggcgtatttcccgggtagggagtattcgcctgctcgggagtcgagatagaaaaggttagcgtgcgtgtgggcgtgcgtttccgtagcgtgtaacatggaaagtctggtgcattttactcaatatcttttcatgctgcaacttatacttctaagagttaccataaaagttatttaacacatattagaactctgacggtatcaattctgcaacaaaaagattatatatactagatgaaaaacaggtatatccgcatgaaaacaaacagctatagtagtaggcaaggttatgtttcttatctgagttgttaaaaatgtgtatatatggaccgagtgcaggccaattgggtcagtgtggaaggacctcaatggtcagcctcggtctcatcgatgctaaaaccttgtggccttggcctcatccacctaggccaagtggcactaccctttcaacaaagtgttgctgaatttttcagtcttttgtcttgagtttcatcttgcagaactgagaaatgacaggcaagagagctgtttagtgaagggaaaaaggcaaaatatttgtcaccagcaaccacactatttcaaatattactgcaaatattaatgggtgaatagctaatttagttcctcaagcttcactgaagactcaatttagtactttaggtttcattttgtccatacaggtcatctaagtatttgttttggcttaaaatcatccttggacccacttgatttgccatatggctatttttagtcaacaattctattagaaagtgtcccttttgcctttaatttgtatacaactgtacactagaaaaaagaaaacaaaaataaataaacaacattacatatgtatttcccattatttcaacatgtgcacatgaaacttgagcctaatggctatcgtatacacttgtaagtatataatttatttttgttttacataaattgctatgcattgtctataaaaagaattcattgtatgcaattgttttctcttatatatgtgaatgagggggtataagtgacatttatcaagagaattgttggttatgtgggttcaaggataagtttgaattaaaataaaaacttgaagaagtaatatgaacagattgaaacattaaggactaagccgatccttgtatgaaacttggaggacatctttggctattcacccaatagattatggactaagctgatccttgtatgaaacttggaggacatttttggctattcacccaatagtaatctagagagaaacttttaccacttcaaacaagtactagtatgtttttcgccaaagcattttaatgatacttttctttactaacaaattactccctccagtaatacatatatgacatttagaacaatatttgatcaaattttttaaacaaccatcaacagtttacgagtttcttagtttaaaaaggaaaaaatggtatgcacaaatttgcctaaaaaatcattataataatatcagaagctaactgaatttaacaaaatattctaatacgaatttgatagtcaaagtctttttaaaaaagttaaccaaatcttgtcctaaacatcatttgttttaggaccagagtactacacaaacataaaaaatgacaacttggtgctcttgaaagaaagatcaacaacgcatcttcaaacttaaggaaagagcttgaaaataacccaacaattccaaggaacatatttacagagactatcaaacctgaactacagtagctagaagtaagaacagtggaatactacttattccattaatccagcacatgacaaattgataatgtctccaaggctgcgggcaatacatcatctgagctacaagagagcacggccaggctaatccaaccatggctagtcctacagaaagcaccaaagtttcagcacatgtttttagtgcatcacaagtcacaactcgaacaacattaacaacagcagcagtagaaggtgacacaagccacccagcatcccgacggcctcgtagccccggcgaccaccatttcttcccctaaccctcatcgccactccgccgggctggtacgccatgccggggttccaccctgccggtatggcgttgctggcaacaaacatctggccggagctgaacgtcaggcggacggagaacgggccctgcagggcggagccggagttgagcctccacactgcgccccatgactgctgcatcggaatccatgaccccgaagcaccagcaccaatcggcatgatgtcgacagccgcaaggtcactgtcgttgtcatcgtactccaccagcagggccaggtagttcgggttggagccagagtccacgacaaaggttagccctactccagtccattcacactccacactgtacaccacaaaagtaacagaaaagattaaacatactgtttgttacatgatgagaaacatagcgaaaaccagacagtttgcatatctgcgtgaagtgtcatatgtacttggccgttgcagcagccaagaataatagtgtagctgagtgcctgtgtactatatatgatgatccattattcatgtgtaccgggtgtactgaatttggaggaggccagcaccacggagttgatcagcctggccaggcctcgccatggcaccgaatgctgtcccgctcatgtcaaagtgagctgcttcattcatgcattgaccatcgactagctcttccaagcatgggccaccaggcccctggtcagtgatgacaacggttacagggataccagagcaagcttcattaccagcacacaccacctgataaatcagttatttccaaatgtcaaatggcagacatgcatgaatgagcatagcttcagctgctaatggtcaatggatacacacccggtagcacgaaccacatcccttgccagagtcatagatgtaggggctaccagcagcaatcctggatgagaacggtggctggtcaacagcatactggtacccacatgcaccgcctacaacaaatttatgcatgagacatcacattttcgcaccacaagccgctttgagtagagtgcgtatattcacagattttattttttgtggtatctaccataccttcacttcctgcaccattaggatcgccataccatgtagcaatgccattcgaccagccagagagctcacggtggagctcaatggacgtgcaaggttggaacaccgaagcgagcactgtaatggcaatgaagtacaagagctgaagcctggaagccatgtgctgcactctgtcacattatggctgataaggactaacacactgttggtttgcaaggtcaacaacacaagtatagattgtatgatatgtattcaatgggcatattttgtgctggaggtaatgaagaacaggacagcaagaaaggttattgttttggcttcaattgcgcctcagaacataattcacagcattgagaatgttttcataacaacacttcactgagttctcattaaaaaaacactccactgaagaaaatgaaaatgccataaatgtggtacagctgttttctgaagttagaataaaaaatggattttaaggagatgatagacaagaagggcaatgtgccgtgaattacaaaaagttgttgtcatggattatggcaaacatgtaaaggagggtgttagaaaatttccaattactgatgaccattgtcagctgattaacctttagtttctactttacgatttgtcaccattacccaaaaacatagcacctagctactaaccaaaagaaacacatgcccaaccttaaataattatgtcttgaagaagtttcgagagcatactgtttaagtccaaagagcaaatggcacagtaagccattactccattgattgaaaaaggcataccgatcatgttatattcagttcgttttctaaatagaaagatagaaatgacaaagttttattcgctaacagtactacacaaaatgaaatatgaaacactattcatgaagactaccaacagaacagcaaatgtttgagaaaaaaaatacaagcattacttcctccgttttacaatgtaagtcattctagcatttcccacattcatattgatattaatgaatctagacatatatatctatcccatattcatattgatgttaatgaatctagacatatatgctagaatgacttacattgtaaaaaggagggagtatcacctagacaaaatacaatgctttgatgaagtactgtaccagtggaaatcaaanntnaacatttttttgtgttttttnttgaggagaggataaccaactggtgcatatcggagtntaaagtcgagtaaangggagaggganagtgatattatgagtaanagagatacgataatcgtcgatgaa

SEQ ID NO: 16902 - DNA, 43662 bp, Oryza sativa
  unsure (1)..(43662): unsure at all n locations
ttggctggttttctcactaagcatcttgataagcattggtccacgttatcttgtgtttttccaaagtcatattttagtttatgcgtatcagcatagtcgcgtagaagtaaaccattatgccaagattgttctcctgctgtatcacggttcaacgagagtaccagttgaatagaacctgtctctattggtataatcgttgtattagctacctcagaagaaccgctattcaactgtctgtgcttggtgtaagtactaggtagttgtatatttacctgtccattcacatccaaatatgtgaacccgtcagaagatgggttaagtgtatacccttctagaacaatcacctattgtctatttagtagtgcaactgctctattttttttttaacgtaatggtgttagtggggggggcatcgtgctgcatcctcttaccgatggggctcgaaggccgccatgcgcaggcgctgcggatccaccaccaccactttcacctgcccactcaagaacacagcagagttcagcacattgcagtagctaataaagccaacgactcgaatcagcaagcacgcaactgcaactgcaacggccgtccgctcctccagcttccctccgccgcttttgtccctcgccacccgcacgcccctcgtcgctgcagagagagaaagagagagagagccggaaaatgtgatccgactgagggaaaaaaaatccagcggagaatgagctagcggcctcgcggggtggcagcgggagagcgtacctgaggcggatccggaggcggcagaggccacgcgaggggcggcggccggcattgggggtgggagtgcgtggcgaagctgcggaggtagcgagactgaagtgacgggggcagtggacactgtagttgtagagtagtggtggtttgggttggctggccagggctagagatggtaaattagtaatttcaccatgcaacctcattgggataaactaatcagggattatggatttagggagcaggaggggacgagatggtcatgcgggtgcgggctcgacggtcggcctcggtagcataggcccgaccacgtgtgctcgccacggcatgcgcgctcgctcgcccgcgtagctcggcccctcggcgcgcacggtgatgcggcgttttcttggtgcgggcggtgggccactgcgtggacagaggacgggagagaccgaggggagtcgggattttggactatctgccatctccttcaacggcgcactctcaaatgcgagtgaggggaggttttaaggaggtttttaccctttatatttggaaaaaagtccacataaactcctaaactttagatgaaagtctgtctagcactctaaactttaaaaccggacattcaaccccctaaattttacagtaccgtttatataaccctctaatatagttttgcatagtggtttgtatctaatttatatataagttggatgagtttgctcacatgtcattcactttggacatatatattaaaattttgacttaaatctttctttttctccttattaactcttacttccaaacaaataccaacataataatagtatgatatcaccgtataagaataaattgatgacttataactgatgatatgcaaatatgttatattaattattcaaactattcgtttaagcttctaaaatatgtaaaaccatcatccaaaactacctttggagagtaatatggatggtacggcaaagtttagggggttggatgtctagatttaaagttagacgaacttccatctaaagttaggggggtatttggacttttttcttatatttgggttaattaaattcctatataagatttaagatacaaaatttaatatcgagtacattttagactgttttatagatgttttatgagcatattttttctctttaaaaaaactttatgagaatgtagttttagtcatgtaggaagtttcagagcaagaaggttcattcatgtataaagttagcaagttgtacttcctgcaaaaagttctataatttggatgttatactgatgtaaacttcacaacctttgatgtaaacaaagtttatatatacaaattttatgtacaagtacacagtttttttttataaattttatgagcacaaagttttttttaccaagtttatgagtataaagttttataatttgaatgtctgtttacttcaaagttgtgaaaattttcaatataaagtttttcaatacaaggttatggtttaaaataaagttgtgacaacggaaagtttttcaatctaaacttttgtgtgtactaagtttctattccaccataaagtttcaaaagaaaatttatactcataaacttttgtgtgtactaagtttcaattccaccatagaattgagtcatttgccaggaggaaagacaactgatgacttttgttgctatgcaaatttacagtgcatttccaattcgtttgaagtatgtactagtcatcaccttcagcatggccaatcaatattttttcaaagtctctgggtcactggatgtcttctttcagtatttttggatgtttttttttgcaggagtttacatcttgtcacgtgtgtgttcctgacttgaattttcgcagagggcaaagcaaggcttcgccaattagaacattgtggtattgagatgtcatagctttttaatatgttggatgtgcattactctttagtttctcgttttaaggtaggcatcgtaatcctgagttaaaaaaatataatcacatcgggtatatgccatttactctatgaattgatttgtggacttcagtattggattctacaacggttgtttctcgtgcaagaattaaccttctgtacctggattgtgagtgttttcccattgtttgtatgatttagctaaaacatcatatagttgtgcatatacagtgatcaattttttttcttaaattattgcataaacttgcacattttttcacaaggacaacaacatacagggtgaactgccaccaaacaatctcatccgcatgtatgacttcttttttttaaaaaaaaatcccctattttttttctgaagtttaaaagttacggatctttgatgtcaaaagtactttttatcacctttgaaagttttattcatactagttgaaaactaactcccgacctatttattatccctatttaccccctcacagaaagtaaaggataactcccttaaaattgtgaaagttataggtcctactagttacttcctccgtttcacaatgtgcatttcccacattcatattgatgttaatgaatcttaaataaatatatatgtttagattcattaacatcaatatgaatgtgaaaaatgctgaaataacttatattgtgaaacggagggagtaagaagtttttgattgattagtggaaatgttttctccttatgggtcagaagtttctttctatgggcctggaaacgcataaaagtagacaaaaaaaatcgcgtgaggagcacctatgacatcactacgaaagggaaaacgcttggagaacgtgttcgcgcacgacgtggtcgcacgaacggtggcgcaatagcctcctcccccgacgctcttgatctatttttaattcccatcgtgtgcacaaatctcaatgcggatttgatggccgaaaattcaaaactttcttctctaattttcttgctacgaatagcaattccgaaagtttgaagaattaagaaaaatagtgtgcgctagttcgctaaatagcagtccccttaccatatctatcaaaataatattatttactatctcgccaaattcaaaactactaactcactcctattttaagcacggttatggatttctatgtctaacgtttgattgtccatcttatataaaaaaattataaacattacagaaccacggtctttttacagacttattaatgttgagattatgggcatataatgatttaatttattccataaataaatcatgacattacagatgaaaactagtatgaacgcatcattagatctacacatgtaaactacgcagaataacatgaacagatcaaatatgcgcaacatattgaacacgtaccgaggtgacgaaaagaccggctgcttggtcgaaacttttcgcaggtgtctacgaaggcacgaaacacgcgagcgaagaggaaggcgagccgtcgcgaacgaacagggagcagtcgcgcgaagcgcttcccaaaaaccttattgccgccttctcccggtgcaggacgtcaaaggcagaggttccggagacctgctctcccgatcgctggtgcacgccggcgagcgggatggagtagtctacgagcgacggcgcagtacagagtaggaggcaaaccctagattgattttcgcatatattgcgtgaagacggcgggtcggtttatatagagaagggtcgcttgatcagggcgcccgcacgatctctactgcgcgtaatcgaaccggataagtcgcgcgtaacttatccggactccacgccgtttgcacgcaccggatttttcggaacgtttccaaaacaaaaacgaatccgaatttgcagcaaaacaaaactgcaaaaggaggctgcatctgcgcaagggtgaggagccaatttttcggaccattcgacgcgtacgtcgtgcacgcgcgccgcctgccctgccaggccaggcgaggcgagcgagcgcgcgcgtgtttcccctcttctctccaccacacatgcttcaagtagctaggagggcatcctcccttttaaggaggtccccctctcctagaataagcaaggtggtactaaactccacatgcatgccatcccatgaggtgggcttttgtgattttccaaagaattaatcttcgagtgggctaaggcccattcattaattccaacaatcccccaccaaatctcaaaatcccactgagatttgccttttccaatgtactgtttatataccagcggttcgatggagaccaattaaggttgaacatccacctagaactccaagctacacttactcacaacttgaacaatggactacgccttgaattgcaagtcttgtgcaagcaagtttcactcaaagtcttatctggtactagaccgtctgtagactacccctcgggtggagcgtataagtcatactcctaggtctttagtaagcttctgtcggtgacatgggaccgggagtatcatgactagaggcttgaggcagacacaatcgcccacgtggcctggcaccctcggggggcgtcgggcccgagggtgatgtgttcgccctcctctttgtctccccgagggggtcggaccgctcccgcctcggccccgagggccgaggcgccctgaccccttgtgggttttgcgccgcgtatatggggtaggtgagcatagcggggctcacctaaccgcatttattgcggtttggacgagcgcgtcacgccacatgtagcgcagtatggcacgctcgtttatccggtctgtgaccggtctcagaccggtcagatcgtgggttaggtggcgacaggcggtctgacgcacgcctcgccccatcccgtcaggacgagagcctccaagcactcgtccctagccggagccggcgtgttagctcctggagatggcacgttggttccggtcagatatataccaggcttcatcataaccattacaggcaagatattgtatgaagaagggcaaacatgcagattgttaaactgacacgtggtggacaagaatgaccggtttatgaccggtctgacaatggtcatgtcatcagcagacagccatgttcccacgtcgcgcctgcttccggcggaagtggaggtaggtataggccgtcccatcagaaggtcattcggacggcagccatacaaatctccgtccattaatgaagagaagtgaagttggagggaggagaggatgagtccccacacaaaagaaagagagggagagatggtgcatgtggtatccccttgagatataaaaggaggaccttgcccacttagagacgggaggaaacgatcccagaacgatcgggggctggctcgcactttgtagcttcttcatacacagatccaccaaaacacaggagtagggtattacgcttctcagcggcccgaacctgtatacatcgcccgtgtcttgtgctttttccactctcgcgaaccttccacacacagactaggagcttagaatctcacccagggcccccggccgaaccggcaaaggggggcctgcgcggtctcccggtgaggagccccaagctccgtcagcttcctagaagattcacccaaaatcttcatagactgcgaccaacagtcaagctcacaaaggtgagttccttcaagaatgctctgcaggacaacatctttgctaattaaagccaacagaactcattaaggcatagccaacctgccttgcagctcacgagagtatatgcatcttcacttggatagggtatatatattggtactctcctctagtttattaatggtttgttcttcccaggatctaattcacgggatctccgatcacatagactgggttaccaccatagtataactcacatgggtctcaaacccatctccttcgatgcattgtctatcacatttcgtgatagtcccttcgtgaagggatctgccaggtttctcgctgtttggatgtaatccaacgttataactccggagtttcttaatttcctgacagacttcaatcgtcttttcacatgtctagacgatttcatattatccttagaactattcactttgacaattaccgtttgattgtcacagttcataaggatagccggcaccggtttttcaacaacaggcagatccattaatagatcacgcagccattctgcctcaacagtagcagtatccagtgccgttagctctgcttccatggttgacctcgtcaaaattgtctgtttgcaagacctccatgaaacagcaccaccacccagtgtgaaaacatatccactagtggctttgatctcatccacatcagagatccagttagaatcactataaccctccagtaccgcaggatacccagtatagtgaagccccaattccacagtacctttcagatagcgcattactcgctcaagcgcacgccagtgatcatctcccggattagaggtaaatcggctcaacttgctcacagcaaaggagatatcaggcctagttgcactagccaggtacatcaacgagccaatgatttgggagtattccagttgattcctagcaattctcttgttcttgcgaagcaacaagctaggatcataaggtgttggagaaggcttactatcaatgtagccaaagcgattcaagatcttctccacataatgggactgcaagagtgtaatcccattctcacctctaattagcttaatgtttaagataacatcagctactcccaaatctttcatatcaaaattttgagacaagaatgatttaacctcatttatcacctcaaggtttgtcccaaatatcagtatgtcgtcaacatacaagcacaaaataactccctcacccccaccatggcgatagtacacacatttatctgcctcattgactgcaaagcctgcagatgtcaatgttttgtcaaatttctcatgccattgcttaggagcttgtttcagaccatacaaagacttcaacaatttgcacactttgccttcttgaccttcaactacaaacccatcaggttgatccatatagatctcctcatccagctctccattaagaaaagctgtcttaacgtccatttgatgaacgagaagaccatgtgaggctgctagggaaagtagcacacgaattgtggtcaatctagcaacaggtgagtaagtgtcaaagaaatcttcgccttctttctgagtatagcccttagcaacaagccgagccttgtacttttcaatagtaccgtcaggcctaagcttcttcttgaacacccacttgcaccccacaggtttacacccatagggtcgctctgtcacctcccaagtcccgttagcgataatggaatccatttcactacggacagcctccttccagtagtctgcatcacgagatgcatatgcttctgaaattgacttaggagtgtcatccacgaggtacacagtgaaatcatcaccaaaagacttagccgtcctttgtctcttactccttcgaggagcttcactgacatcctcctcagagacaagttcatgtgtatgttcagtttgttctggtggtgtgattgaactgggaattatttcagagggttggttcgaaccactatgtgtatccttcattgggaaaaagctctcaaagaaggtagcatcacgagactccataattgtaccaacatgcatgtccggtacctcggatttaactattaaaaatctataggcaatgctatgatgagcatatcccagaaaaacacagtccacagtcttaggtccaagtttgcgcttcttcgttattggtacattgactttcgtcaagcacccccatgtgcgcaaataagaaagtgatggttttctaccaatccatatctcatatggtgttttgtccttatttctgttaggaactctgtttaacacatgatttgaggtcaacaatgcctccccccaccatgccttaggcagtcccgcggtgtccaacatggcattcaccaagtcagtcagtgtgcggttcttcctttcagcaatcccattagacgggagaatagggaggcgtcctctcatgtatgatgccatgttcctcacagaataagtcaaactcgttcgagaaaaactctccaccacgatcagacctaagcctttttatctttctgtcaagttgattttcaacttctgccttataaattttaaaatagtctatagcctcgtctttcgttttcaacaagtacacatagcaaaatctagtagcatcatcaatcaatgtcatgaaatatcgttttccacccttcgtcaacaccccattcatttcacaaagatctgaatgtaggagttctagtggtgccaagtttctctcctcggcagccttgtgaggcttgcgaggttgcttcgattgcacacaactatggcacttagaacctttgacaatggaaaacttaggaattaaacacatgctggaaagccgagacatcaagccaaaattaatatgacataaacgtgaatgccaaacattagcctcatcatccacactgccacaaatatggttcacagacttattgcagaaatcagaaagggaaaagcggaacaggcctccgcactcataacctttaccaataaaatatccatgtttagacacgactactttattagactcaaaaaccaacttaaatccgtctctagtcagacgggagccactaacaagattcctgtcgatagaagggacatgctgcacgttcttcagctgcacgatctttcccgaagtaaacttcagatctaccgtgccaacaccatgaacagaagcatgtgacccattccccattaggacggtggaaccccgtgcgacccgcttccatctccagtgttgccaatggtcacattagcagacttagaagtctgccctgcaggtgccttcatccccttgcgctgtggacacttcctagccagatgaccaacttggccacacacaaagcaagtcctctcatcctgattaggattgttgttgttcttcttctgcttcttgaagttggtggtctgctgagctttgtatttccccttgctcttgttctgggccttgtgcacaacattggcactggactgcccaccatcgcccttagacgcggcatctttttcccgagctttctcctcaacatcaagagacgcaatcaacccctcaacggagtattcctgtctcttgtgtttgagtgcagtaccgaaactcctccaagatggaggtagttttgcaataatgcacccggccacaaatttgtcgggtaagacacacttaaggagttcgagttccttagccatggtttgtatctcatgagcctgttcgactacagaacggttgtcagccattttgtagtcatgaaactgctccatgatatacagattattgctagcatcagtagcaccgaatttagtattcagtgcatcccacaactccttagcgtcggtcatatgcatatacatctcgaccagacgatcgccaagaacgctaagaatgcatcccacaaagagagtagtggcttcctcgaattgcttctgctgttcagcagtaagaactcgttcaggtttgccagtactcacccagaagcatttcatagctgtcagcgacagagtgaccctgatctgccatctcttaaaatgcacaccggtgaatttatccggcctcagtgcatcggcaaaaccagccatagtaaaatcacagtgcctatgataaggtttttggattgttgagattatgggcatataatgatttaatttattccataaataaatcatgacattacagatgaaaactagcatgaacgcatcattagatctacacatgtaaactacgcagaataacatgaacagatcaaatatgcgcaacatattgaacacgtaccgaggtgacgaaaagaccggctgcttggtcgaaacttttcgcaggtgtctacgaaggcacgaaacacgcgagcgaagaggaaggcgagccgtcgcgaacgaacagggagcagtcgcgcgaagcgcttcccaaaaaccttattgccgccttctcccggtgcaggacgtcaaaggcagaggttccggagacctgctctcccgatcgttggtgcacgccggcgagcgggatggagtagtctacgagcgacggcgcatttgcagcaaaacaaaactgcaaaaggaagacctgctctcccgatcgctggtgcacgccggcgagcgggatggagtagtctacgagcgacggcgcatttgcagcaaaacaaaactgcaaaaggaggctgcatctgcgcaagggtgaggagccaatttttcggaccattcgacgcgtacgtcatgcacgcgcgccgcctgccctgccaggccaggcgaggcgagcgagcgcgtgtgtttcccctcttctctccaccacacatgcttcaagtggctaggagggcatcctcccttttaaggaggtccccctctcctagaataagcaaggtggtactaaactccacatgcatgccatcccatgagatgggcttttgtgattttctaaagaattaatctttgagtgggctaagacccattcattaattgcaacaattaaaatatcgtatcataaaatggaatacaagagacagcgtaagaaggtggtacaccatgccgccgaacatcccagcgatcccgtaaacccggaagccacggccggccgtcgccgcggcgccggcggagctctccaccggagacgacgacgtccctcctacggctgcccccgagccaccgccagccgcagcgcacggcggcgcgcccaggtagctcgcctgcgcgccgccgtacctttcccggccgacgcacagcttgtcgttgccccgcacgtcgaggcgcctgcccagccgcgccacgaactccgccggcagcgcgatctccccggccagccggttctggctcaggttgagccgccccagccgcggcagcgcggcgaggctcgccgggatcggcccgtcgagcctgttccggtcgagcgacagcgccgccaggctggccagcgcggcgaacgcgccgcgcgggatcggccccgtcaggccgcacccggacatgcccaccacctgcagccgccggagcgacccgaccaccgccgccggcaccgccgtgccgatggggttctcctgcaggagcaggtactgcagcttccccagcccggccatcgacgccggcagcggcccggcgagctcgttgtggctcaggtccaggaacaccagctcccgcagcgacccgacctccgccggcaccctcccggcgagctcgttgtggctcaggtcggccttctccagcatcctcaggctccccagcgccgccggcaagccgccggcgaggctgttccagctcaggtccaggatggacaggctctccatgcctccgatctcctccggaatctgcgcgcgccgaacgtacacgtgtcaccaccacgacatgtacacgtcgtacgagctcagtgacatgacacctacctcgccggtgaggttgttgtagctgaggtcgagctgctgcagcggggcgaggcggccgagctccggcgggatctcgccgcggaagccgttctgggacaggctaagcacgcgcaggctcctcaggtcgctcagcgtcgccgggatccggccggtgaggccggggttagacttgagcacgagctgctcgagggaggaggcgttggtgaagagcgccggcgggagctcgacggcggcggcggcggcggcggcctgatcgtcgtcggtgttgggaatcaaagcaactcacgcgaatacaggctacactttctgaacgaggcagagaggaagaaacagagaggaagaaacacaaacacataagcaaacacacaggagctttgcggcaccaaaacaacttgtgcccttttcactggttttttctcttaactaaatgattacaatgagcagctatttataacacagcacatacacacacgaagctggttgttccgcttctcgagccacacacgacgcccacgtcctgtttacttggccgcaacttcacaagtactgagtcctcgccgacgtcgttgcttgcaccacccaactaacctgcatgcatgcaaactgaccacatcctactcataatcttgtgcaagactcggctaatcactagcccacaattatgcatggctaactaactaagctacatacatgtgctctcatctcctggctttttattggctcactactcactgccaaccactactcactaagccatgcagcacccacgtacatatagctagctctccaggccatgcaatacacacatgcatatagataaacatgctgaaattaagaaacaacaagattaatttctaacagtcggcgacgacgaagcagccgaagagggagagcgtcttgaggtgggggagtcccaggagcacgggcgcggcgagcctggcgccgggcctgcacggcggggtggcgacgtcggggccgaagtggagcctggtggcgcgcaggtggcgggcgtcgtcgggggcgagctcgcactggagtcccggccatggcgtgtccgtgcagggacgccggtggagctgcggccacgtcgggtcgccgaggaggtcagccatcaccctacagatggcagccagttctgaccttggcagctacgccggcggcgcctccccggcgagctgcgcggcggtggacatggccatggcgccatggaggaagaagaggaagaaggagatggtcagcgaggcgagccaagcagccattggatttggtcgatggtctaccctaggcttgcaaacctgagaatctgagatggattcatggttttatagtacgaccacactcaagagtgtcacacacagtcatactgccacacagtgtatctctctctaatggtaaaaaggaagatttacttggtatagtagccttttgtactgtgtaatgtacggtttggatgatttgttgatcggatctatggcccttcacagttcttctacatggaggagttacctactgcgccagctcagattcacgcgtacatggcgctgagacccgcaccttcgctcggccgctcgccccctaactgggagacgtgttttctcgctgcaacgagggcgcgtggcgaaggaaactcgcactgtggaagtcattgcttcgattcggcgcgacctcgcctcctcctctttctccaccttcgcctcctctttctccaccttcgccgccgctcgtccagagaggtgaggtgagaggggagccggcaagggaggagaagagagatcaatccgcctcggcctcctcgaccgtcgccgctccggatccacgccgccgcctcggcctcctcgccatcaccgctctggatccacgccgccgcctcggcctcctcaaacaccgccgctccggatccgactagatcgagacggacaaggaggagaggagagttgctacctggcggcggcggcgtcgtctccgtcctctcgccagcgaagggaggaggggaggcccgcggaggaaggaggggaggctggcgacggcggagggaggagaggagagctggagaagagaggaggggagccggcaccggcggagggaggaggtggcctagctcgtcgatggtgcggggatgacgagaaaaagctgcacgtggggatgacttccctaatggagataaaggatgaccataagttctcggtctcgttatctcgtgtcaaatagcatttcccaaagacttggcataaatctgtctctctaaatatttgtttgactagctctttataaatttgactcttcatttttttatgctccaagaaactctctatttaagttctccgatataaccgtgggacacacatgtaaggttgtgttattcccctttctttcccaacccaccttcatcttttccgcgcgcacgtgttttaaattcttaaacaatatgtttattaaaaagttatctatagaaaagttgctttaaaaaatcatattaatccatttttaagttttttaggctaatacttaattaacacgcattaatgggtagcgtcattttccgtgctaggaggtggagtctgtttactcttcttcttcccaacaccactaaccaaaatcttcaactaaccactatattgactagcgcctccacggtggagcagcaacaataacatctgtcaaacaacaccgaggacccttacacgaacaactatatgaaggagatccaaggcaacaaagagaagactcggccgaactctggactattgtaccataggattataggtggccataaggcccgaggcccgatggcctggcccaggcacggcacgccctggttggggtcatgcccaggctggcccgacccggcagctaggccatgcctgggccgatgccttggcatggtgggctggcccggcacggcccgattcaatgaggaaggaagaaaattagtttagggactaaaattagatttaatgcagccatataattgggatgcaaaataaacttattacaatcatttagacatggccaaggatggaaattagactttttttatgaagaagcatgatgggctgtcgtgccttcgggccgacacggcacggcccggtttgttggtcgggccgtgccggcccgatagattctggcctgagcacggccgtgccgcccatatggccatctatacataggatgatttggaggagccgaagctcgggactctacgctgctagccaatctagagctccaatgttggcatcagggcttttcttccacggagtggatgctgtggggggtagtgacgaggacattattagatacgctcgcaactccacaagttctaatgacagtttcaagtccagttcgtcctctagatacaacactacaacactgatttcaaatggacatagcaccttcatgctaactctgatttggatgatctttgacttttttttcgaaagcttgtgttgtcacctgttgttaacaacggaacgcatccggcattgtatcaaatttttttatgagtcaacgggaatcgtcaaaacaagacagtgctattgctggaactgaatttgagtctttcggtcttgtaatagactggacccatcttgagtgtgtgtctatcctcctccactatccataatctatcccaagctctttttttctctataaatatctatgtacacccccaaaaaaaattaggttttgtttagctgaattttaccaagtgtcattcggtttgtctctagtcctgttcgtttagtcgatgactataaatttagagccccaataggccaatagttggtgtgttgatttaccgagtcgattagatctatcacttcagttgcaactattcctttgtgcttagttacctattcacgacatttagattgcatcttaccttgttcttgtagtattcttttgattgaatttcagggatcatcaaccgcgcgtcacggttggtatgacatcatttgttgtgaagcgaatgcatgacgtcctggacttgttttggttggttgccaagttgcaaaagtcgtattcgatcaaagcgagcgttatcccctcaccagaagatcgggtcgcacgagagagtgtcatcaggtgggccttcttccactaggagccttctaggtggatgcaagcggtggagctgggaggccgagaaaggtgacaacaacacagacaacggacaagaaggatgcaaccgatcgtgatgacttgttcggtgtcaaacagaggagcgaggcaactctattagcaccaaatgagaggatggacggaaggagagctcgatacgagtaagagagatagggagatgagctgagaacaaatagtgctaggaggaggagagacaataatcataggcaatcttggcaccccttggcggtttggcattagcatcatttgcacctcacattcgaatgaagtcccctctcctcttccaaccttctttttaaatcatgttgatttggtatcgaaatttgtggtataccctacttcgtttgtcctaatttttatctttagaattaaactctagttttgagatgagggtaaggcgagacggacaaatgtccttctcttgatctcctccatccctctcttcgaaccatattgaattggcattggattttcatgggaagtagacaaatcaaagtagatttccggcaatttgttctcatttttaggattaagttgtgcaagcatgcatgggagggaggttagcgctaacgggactagcgtcaacccttatccattttatcgagcacgaagtattagggtcttagtgtcaagataatttgtatggagacatttaacatccgtgccaatgattcttgccccccgagcttcggatctatttataaaataagttttgcgggtctctattatagagtgggtttattttttacatcaaatgtgaaaaatatctgggattaatactcccataagtgtggatcataaatgtggatgtgtattgttgtccaaatctaatcatgcgaaaactattgataacatttacatttaagcaagaattttggtagtccataattttttctattgcaaattatgcatgattgtatcttcataaatgtcttctttaaaggatgaaacttcaaagtatagtatctttatatccactgacaagatatcattactcgttgttgtgtttagttcacactaaagtttagaagtttggttgaaattggtacgatatgatataaaagttgtgtgtgtatgaaaggtttgatgtgatggaaagttagaagtttggaaaaaaaaactttggaactaaacaggccttaagcagatgctggaccagcccggctgcctctattaacaaactctatgaccaaatcactgtaaggcccaagtttagaaataaacatttttgtacttggtcacgaggctctttttgtcttaaaagacagattttgttgtagtgcctgtcataaacaagataaactggcagcacagggtacggtctgacactgacactgtgtcaccaagaggcatgaaattgtactgcaaaaatcgtcggaactcgaagacttaacagcgagtcgatctggtcaaaatccgccatagtataaactagacgtatttataggtaatatagttaagttcttgtcatacattttatatcaatttaagtgatcaaagcttaacactatcacctaacgaccattttgcgttgctagtaccttaaaacaattgcgcctcaccaaagtttcgataggatagcaaacttaacaccagggcaaagccacgatgtgctccgctagtgcattgggcacataataataataacaaaaaatcaccaaagcatgttctttcattgcacgtgtaattgaagtatatatattagagaaaagtacattttacccccttaacaactgcagttgaccgaaaaaccccccgaactcaaaaaccggtcatttctcaccctcaactatcaatactggatgaaaaacctcctgagcagctttgcaaacggttttggtctacgtggcagcccagtcagcaattcttttctttttaaatcagcgggtcccacatgtcagtctctcaccctctcttttacccacacctctctatctctccaaaatcctctctcttctctcttcctcaccttgaggacggcgtcctctctcttctctggcagagctcaaggcgacgaagggggcggcagagctcggggctgcggaagggacggcggaggagccaaggccggtgggcgggcgcggaggcggctgtgggcggcgggcgaggagccgaggctggtgcgggggccgaggcggctacgggcggcactcgttcggacggctagttgcggcggccggctacggaggaggaggcgcacgcactcggacggccgtcggccgaggcggtgctcgcccatgcggcgggcgaccgaggcggagctcgcccgggtgtccggcggcggtccgtccgctctccccctctctatcccaatctctccccctctctatcccattctctccccctctctctcttctccctcccctcaccggtggcgggcaggcgaggcagagctgctcgggcactggcggcgacggcgggcggctgagacagaggcggagtgggcggccgacggcgaaggcggagctccctgggcagctgagacggaggcggagggggcagccggtagcgtaggcataaagcgctctccgacctcttggtcctccccgccgcgaccttgtccgtccggaccactgccgacgccgtcgccttctcctcccggaccgcctccttagcacctccatctcaagcttcgccgccgacacctgtgagtcgtgttcgtgcccaccgcgccctccccaccacgcccaccgcatcccccagcagcgaagagagaaaagagagagaggggtgagccgaccagaggcacccatccgtgcccgtcgccgctcatcgccgaccagttcgtcctccctaccgcgcctgctgcctgcctgcttgcccaaccgcgtcggtcttgccacgttggactgccatgtgctcaagtctccggtcaaaaccgcccaaaagtatggttaagggggttaagtgtccggttttattagttgggggtttgaaatgaccggtttttgagttcgagggggttttttaagccaaccgcaatagttgggggggggtaaaatgtacttttctctatatattaagagtgtgatataaagaatgaaacataggataattcatattctagcttcgcccgtgcctaacccttcaccaaaactttactttcaccgtaagaaaagcaattttttcagactgccaaaacatatttgtgtgtgtgtgggccgcccgcctactggaaagtgtatgcaaaaaatgctatttttacgtatgggtggcgcacccgtacacaaaaatctagtttttgtgtttggatgcttacgtcgtctgcacgcgtggcacatgtggttactttgttaatctcaagatataccggatataccggcccaatcttttaaagatgctcataaggatataatatgagtgtgtgcatttataaagatgagtgtgcgtgtgttacgagtatctgtgtttgtattggatttaaacaattgcggcgtgcaatgcaacccgaatacaaactgcactacagacattgcacaaacgccaacacagctgttgccatggtcattcgggtttgtgtgataccagtccacttggagtgcaatccaatgtctgtagtgcagtttgtgtgataccagtccacttggatggacgacgcagagagcaggcgtgcattcggtagatggtaattggtagtcatgcaaatcggtagatcgatgcgacgccatgcattttcttgtgctgctcgtgttacatatgtaatctcaccaagttactttcgtaaaattttaaatagttttatttagaataaaatcgaaacacctttacattctaaatgtaacgggtggagtattactgtacaagtgtatacgtgcgcgcgtgcgcgcgcgtccacggtatactgaagtactacttcatattctaatgtataacgccgttgacttttttccaacgtttgaccattcgtcttattaaaaaatttatataattattatttattttattatgatttgatttatcatcaaatattcttaagcatgacataaatattttcatatttacacaaaaattttaaataaaacgaatgactaaatattggtaaaaagtcaacgacgtcatccattggaataggagtattatatagcctagttgatgtgtttttgcacgggtccgcacggacgttgcgcgcaatggggcgtgatggtcgtgtcgtgtcccacgattccatcccatcccatggccacgcacggacgtgttggtaatacttggaaggctgcatgcagagagccctggtgcagaggtaggcctgtcccagcccacataaaactgtgtgttgcttgcagtaatcagggcctctttatatcctatcctaaaatttttcaccctattacagggaacgtttgatcacatacatatagtattaaatataggctaaaaaatactccttccgttttttaatagatgacgccgttaactttttcttacatgtttgaccattcgtcttattcaaaaattttatataaatgtataagatataaatcacacttaaagtactatgaatgataaaacaactcataacaaaataaattataattacgtaaatttttttgaataagacgaagggtcaaacatgtgagaaaaagtcaacggcgttatttattaaaaaaacggaggtagtaactaattgcacagattgcgactaatttatgagacgaatcttttaagcctaattactctatgatctgacaatgtaatgttacagtaaacatttattaatgatggattaattaggcttaataaatttatctcacgggttactgacggattctataattagtttttttattagtgcccgaacatcccatatgacattctatataatatctataatatctaatgtgacacgtgaaaactttacgcatcttataacaccccctcaccagtccatccgtagaaacaagtactgtacagtagtaatagtccacaaagaaacagtagaagctcttctctctctctcgtgtggactgtgtggtcaaacatgtgcatgaaaagaaaagacgggtaggctcaaggctggcggagttgcaggcgggggcggacgacgactagctttggctcggcgcgtgctgtgcagtgcagggcggcccaattgctcaacacaacagtggccactggccagccgtctgctgctgctgccgctgccgcacgcagagcaatcgcaagtgggcggcaaccaggcatgggctcccgttgttgtacttgtccaccagaccagcttaggtagcggcgagacggcgagagctcgtgctcgtcccacgcggacgcggctcccctttcccgtccaggaagatctctattcctctgccttgtaggcttgtgtgttcttaggtatggggttgggtactaataaaaaaaatcgaatattagagaatgacctaatatcaaataattagaaggggtgaggtttcaaatctagatcgtctagcccactatcttgtggagctagccggaagacacctaggtgtttttcagggttgggtactaatcaccatacatgaaaaatggagcggtagattcacgcataatcaattaagtattagctaaaaaaactttaaaattaatatgagttaatatgtttttctaaaagcaacttacctatagataatttttgtaaaagaaaatacttctactatttagtaatttggaaagtgtgcacgtgaaaaatgagggatgagaggttggaaaccaccacaaatgaactcagccttagggctacagtggatccataccaaagaggacccacgtaccagtaactcaaaattatgtaacttaagtcagagaatctcaattctctttccgtgatgtctaccaggcgaacttatgtaccgtgtgtttggttgctcgcatctctcttacttacctcatctccctcatatagggtaagtttagctaggctaggttaaggtaaccgcctctccgacggttacttggcgactggtgactagtgacgacgatttggtatgggactgtcatgaacgagtcggctggcgccctttgggcacgttgaatggttgtggatttatgcggatggcttgtgaaatcccaaaagcatgggataatagataactgttatcagattttttttattttcaaaataacaaagcgggttggatagtatgatctgatagaatgattgatcgggagtgggtttgaggggcgaattcatcgttggggcatgttggggcttcagccccagctcccctcgatgaaccccaggtgccactcttcatccgcagtagcgcctgcataggcagaagagaaaagggtgtgtagtagtagcagcacccagaggaggaagactattttctcttggttgggttgtgacaatcccgcgtaataggtgctcaatcaataagaccatacagattaacaagacgtgtcaattggttacgttatgatgtgccatttagtcaacacaaacacaccaatttatttaattattttttctttgtgaaatgttcctaatacttataaaatgattggtaatttggcatttggccggtttgatggtcttgacatgttcatagagatgaaaaaattggttttaatttgtattttggttagggcagcacgtatttgctttcactctatttatatattaatttaattaggttacctaaaatattaaatttgtttagcaaatgatcggcatacacatattttcatgttgttaggccttttaaggcaatgttggatggtaccggttagtaactaatccttcacgcacgtaaatatagcaacccattagcacatgattaattaggtattaggttaaaacccttaaaaatgaattaatatgattttttaaagcaagttttctataatttttttttaaaaaacacatcatttacaattcggggaacgtgcacggctgtgcgcggaacgatagagtaaaagtcaggagaaggtagtatcaaactcagcctaaactggcttacatggaggatggagcacccctcaacttttatcctagattcgccagtttgatatgtataattttatacatgtatgtatataaatatacgtataaacatataaatataaagtttatatgtatactccctccgtccaaaaaaaaacccaatccacatgtgtccaggtttaaatctaggattgggttttttttgggacggagggagtacgtataaaccttttacatatgtatagtacaaactttgattaaatgggtcaaacccacatgatgaaagtggataaaatacgtcaagcctatattttataaaaaaaaatgtaaacgggcttaagcccacatgacagaaatgggctaagtctacatttaataaagaaaagataaacgggctgaaaaaaaatcacctcgattaaaaatggcatataacgggctgcgccacgcgctactgatcgctaattagtgacccgcttgagaaccgctgatttgaaaactgcccgacccgattcttttctgggcaaactgcaaaagacacagatcaaacacatatagcctcgatttcatctcagccatccgattcatgatggccaaccaaagggatcgtaatgacgccaaccccaacgattacatgacgcatgcgatctaattgacagcaacaccaaagtctgaaacataatcatgaaggaggacacccttcatctgttggcatcgttgagaaggcacccaaggctagggcccagggacctaatctcatcctaactccagagtccaaacaaaacactactgtcgttcttggtgaggtgagcatatagctcaactactcgtagatttcttagggtgaaatcagctaattacggatgctcgtatttatggttaattatttttttagtggtaataggcagcatacccatcgatagtgaggtgtccgtaataattttgttaattttaagatatgtgagtttagtttttcggacgagattataggggtagggtgtgtatgtttacgtttataggagtaactattactgtgtttttttgaatgtactatattccttggtaatacttgctctgatcatcattaactgtattatattactgcaaattagggaacagataagacttagaattatgccaagagaagccggggaccggacaaatcgcaactttgcaagcagattgtatatcgttgccttttgggaaaggcatgcatacgaaactcgtgtctgatgcctgaccatggcatgatcaggcagtggaagctaattattactactacttcgtgcgatgatgactagattatctcactgagtacgtctcattctgccttaatataattggaaaagaactggactttggtattgttgtcaatatatcaagtcctgatggctactctcttcaatttcttgtccaattcgttaatagagtgcatatttaggctgtgttcaacacaggatgttcccaactcctctctcttgtgttccacgtgcacgctttttaaactgttaaacggtactttttttgcaaaaagtttatatatgaaagttgtttaaaaaaatcatattgatctattttttaaaaaaattagctaatacttaattaatcacgtgctaatggactgcttcgttttccgcgtgaaagataggttcccagcccatagaatcgaacacagcctattttgttaattaagagaagattagttcttgatttttttttgcattttccaatatatatgtacaacgtactgcaaattgaagtgaagtgaatgcatatcggttggtcctcaatataatatcctcactaatttctcttctgtttatttaacagaaataataccaaagaattatccattcattgtgacctgttgttatttaattttctaatagcttacttcggttttaagattggtagcaacaaactccgcagttggtcgtcaaattgtaatcattcagtggtaatagctgtgcaagtagccttttccacctgtatcaaggaaattaaccacggaacccagtaataatgcatatctgccttctagtaatctctaaccaaacgggttagcctcggagaaagaaaggaaatgattagctggctttgttcctttattttcgacgcttgatcgatctagttggtcacttccaaagcctggatttgaccaggtgaatatccatggcaactttactacgccacttgtctaggtctagggaaaagttcaacaaagatgaaggataatttatactcctcattttctccccttcctcattctctctccacaataatgaagggcttaatactttttaaccttatgttaatgtatttttcactagctaaaacaatagttttttttagaatagatggagtacctctgttcattaaattctttggataagcaaatgaactatgttttgccttaagttgtactccgtccgtcctagaatcatttttattcctcccatttgtttcaaaataagtttatttttaagcaatcattgcattgaagtaaatgaaagtaggggataaatgcatcaggatcaatggataaaaagaagaataattgcattgagatttgacgaagtgggagtattatatttttttggttttgtattggtatatgtggaataggtgaaaaataaacttattttgaggaaagattatgtactaatgacaaataaaagaccagagggagtaatataaatagctggatttatttttttttctttgcacatttgtaaatgaacttattttccctaaaagtttgaattgtactccactatgtaagaaaatgatgtggagacaatgatttgatattactggcatattgaattctaaaaatacaacacatgcttagctaatagatgatgatgttgcacacttacatgtgctttaaaatactctagataataacttgctactgaatgatgatgtgacacacttgcatgttgagttttaaaagttaatggacatcaactatatagacggtatagataagaatgtatagtatggatagtctaacccgaaccataaaagtcaaatgtggaacaaaagtaaaacaagcgagcttttcagaaggttgggtgcaacctaccgttgtctttgctacttgcgacactattgctgttagctacaccgcagtatcgctgaataacccacactattgctgttagctacaccgcactattgctgaataaccccaaggcatagattagtcttgtggttttccaaactacttttttagattaccactatccgatggtatatcatgattatcaggataaccgtgaaaaccgtaagtttaccatgaaaaattgtatggttaaaaatttaacaaggtaaccgcatataagtacctccgataatcgtgacgtaaccgtacaatattgtaatcgaggacattgttgtccctgtaggatggaacacgtggccatacatgaagccatcctagaatacaattcacgattcacgcactacaatgaatgtggatttcacccccaattattgaagaagattggaaacttatatgaagaatattttagcatatgacgagacgtacatcatgtttccatcaaagatgaacactgagcctgagcctgagtctgaatatttctggtgactgaagaatgagctggctagcaatcatagtgaagtaaaccattcttagctggcaggatctcgccgagtaaagcctgatgttttcaatcagcttcgattgcaaattcccgtgaaaaaaggaatgtttttaagttgctgtgccaggtgctgcccttgagcatcaccagtgtggtgtgtgggcaattgattgaaccgtacaaggttttgattggtgatttgccaattgattaataaattaatgcccgtagttgcatattgttccagagcttaattgggtacttgattacatcatcatatatagcggcagtggtatagtatactaggtatataaagtttctagatcgaaactccactaaacactgcagtctcatatggtactagaaatactatatatttctacctccgtttcgaaatgtttgacgcagttgacttttttaaacatgtttgaccgttcgtcttattcaaaaaatttaagtaattattaattcttttcctatcatttgattcattgttaaatatatttttatataggcatataattttacatatttcacaaaattttttaaataagacgaacagtcaaacatgtgctaaaaagtcaacggtgtcaaatatttcgaaacagagggagtatcataaatggaaactctttgaaattatacttgttcccggtacaaatctaaataagtgagaagtgaagcccttcatgctgaactactgagccacgtcagaagatatggacagtccgaattttgctgcagatgttactccccatcagatccttttattggtaaaatatcttctttttccttcaagaaacctctatctacttttactacttccacgtctctagataataaacttaaatcattttccatttcgctccttcccttccctagcggatcgcgatgactcctagctctctttgcacgcaaagcgccgccaccttcatctccatcccatcccgccggtctcagcctctttctccccatcccctctaccaaagccagtcctccccatccccatcgactcttctcttcttctccgtcctctccgccgctgcctcctattcatcaccgcatccagcagtgaaagaaggagagatagaggggaaatgatagacaaggaggagagggagatgaaggcagggacgtagatgaactagcagaccgtcgatccggcgtggaggaaacattattgttgaattctgataattcacataagttgacatatggaactcatatatggattgttaatgcagtaatcatttgtcctatatatgaattattgattcgatcatagaagcaatcaaattgtacaggatatataacaggaattgcagatatatattactagcaacacaattagttacaggaatcccagatattattactagctatacaattaggatcatccggagtagaaatatatagtacactaacaataaattccacaaccatatgctttgcatttactgaaacttataaaaggagacagcgaaattatatccagggtttgacattttggactaaaatttcggatccctccgatatgatattattttggccaaaatttttcatttttttaatttttcatgaattttggtaatatttgctcaaaattgactaaattttgttctaaattttggaccgaaatttctgaaattttgtcatatcggcactgcccgatacaaaggccaaaaacgaaaaagtgaaccctggttatatctacagtgttgccatgcaatttaatagcgttgttctttttctatgcactgttgtcttatcacaataggatgtagctgtatatatcttatttgttgatttttcagcaatcctggtatatataattctatcgatttatacaagaagaagaagaagctatgttcacgtaacatttgatcattgatcttattagaaaaatatttctttgatgataaaacaagtcagaacaaaataaataatatttatataatttttttaaataagatgaatggtcaaattttatataaaaagtcaacaatgtcatccattttgggacagagggagtatatatattttttctagattaatgaagttagcacgggtgtctcgttgttgacgggcatatcgtctatcactaaaataataattagttatagatgcgagcacccgtgtcagtctacaacttaaaaattcgagtggattcgttccaccataaaaactctagccagttgaactacgctcacctcacgacggagtatattactttgtatgtttgggtaggtatgctccggccgtgacctaccggctggctagcgcctgagcacccgcgcgttgctcggcacgcaggcgtgccccaccctagctgccctgccctcttcctcccggcaaaacatgtctgccacagtgcgtagctggaacgtgccaacgtacttgtgttactaggactctctagagtacacagatgcactcacgcgccaatcattattaaccactcgcgcccacgccacagcacaaaccatcattctcgaacacgtatcaatcagccttgctagctactacaagcagctataaaaagcgcagaggcaggcagacgagatgagatcgccacagccaagctctcgcacacaccgatcagtcggtcataaacgccattagaccaagctcaagaagaagaagaagaagaagaagaagaagaagatgcggcagcagcagcagaagaggaaggtggcgtccgtgtcgtcggcgctggtgatgtcgctgctgcccatcctctacgcgtcgctgctccgcctcccgccggccgcgctcgccagggacaccaccttctggttccttctctccaactgcatcatcgccatcatcgccgccgccgactccgccgccgccgcgccaataacaacttcgtcgtcgtcgtcccacggccacgacgacgttgacgaaccggccctcctcgccgccgccgtcgtccctgctgctcctcctcctgcagcgggtgatgatcagctccccgcagaagcgccggtggccgtacgaaacgacgatgagatcaacgagccgccgtcggcgccggcggtgacatcgtcggcgacgccgtcctccgacaacccgccggcgttcatcgcctccgacgatgtcgcaaccgagggtgaacggccagatcagcaaccacaagaagcagcaaccgacggcgaaacccacggagaggctgtcaaaggagacgacgacgaagacgaaacagcaagcgacaaaaccacgacgacgaacaagagcctcccctcgtcatcgtcagaggagcttgcgattgtcacctccaacaacgacgacgattacgacgacggcggtgactctgcgtcgtttggcgaggaagacgaagggaaagtagtgccgtggggcatgccggcgccggcgacgacgacaggcggcggcggcggcggcaagcagtactggcagctgagcgacgaggagctgaacaggaaggtggaggagttcatcacccggttcaaccgagagatgaggctgcagatcctgcaggaagccggtgtctgactcacccactcactcacagctacacctccatcacagtggcggatctgccgtgaggcggcgagggatcgagtctccactactgacaataggactatgagagtctttcgagtcctcctaaaattttctaccacatatatctattggaagaagttatgtacatgtgtagtttgttcagtctcctactatttcttcttggatatgatccaccttctagtatatatgttcatataatagcatgcaactattatatatttgtattgcatatagatgtacaggttatatataatacaagcgcatcatatatgttaattagtttgcttatgtacgtcgttaatttgtgatagagtatagtgtactccttatgtcctattaaaaaaacctaatcccccattctaatcctaagttttaattcggattaggttttttatgggacggatgattgagttttttaggggtagagggagtagtgtacatgcattttctttgtgcacagtgcacatgccatgtaatgcaggtttcaggcttgtttgcagtgttatacacaagactgttttgttcgatgagagcgacatgttagatatgacatggatcgagtcagctacctaaagaagcttcggatgataaatctacacgtacgtacggccgggccggccatggcgatatcaaacattaaggctggaattaaggtgacagttcactctggagtgtgaagtgatgtcacggatacaaatcagggcacgatttagtcatggatatcgagctatcgagagccgttcgtttactgtgctcggtgaaatcatgtccacatatatacgaaatctgcagcgagccagacatagcatcgatcagtcactccccaaaacctgcaaattaactcgtccactgatcattctgcggttcatctcacaagttctccttttctaagggagcctatgcatcgccagtcttatctaacagcttaacctcgagcacacaaaatattagtactaactccacttttaagtatatggattttttgaattttttacataacttatgaacttacggtttaataaaaatttactatggatataaaaaatataaatcatgattaaagtatatttaataatacaagatggtatagaaaaataaataacattcatgtgttgggtcttaaaagaacattttcaacacgattaagcctgttcaaacaaaacctggctcggcccacatacgcaccaggctgggcatgggcctccattttgtggtctgaaagcctgaaaaaaaaggaggaaaaagtacaccgaaggtccctcaacttgtcagtgagatacaaaaacatccttgaaccgcaaaaccagatatgcggggtcccttaactatataaaacggtcactcgaggtcccttggtggttttgacgcccgatttgacctacgtgacggctgagtcagcatgggccccacatttcagggtgccacctcatctcttccatcttatttccctcttctccctttctctcacttttctcaggctggtgacgggcggcgatgtggggaggaggccaccggggggaggggagagaaagaggtccggtagccggttggaggcaacgccaccgtcagcatcatcgttgccgccgccgtggcacaacgccgcccgtcgtcggctattttgccactgctgactccgtcgccttgggacactagccgcgctccggcggcggcctcgctagcgcgatatcgtcgatggcttccacccggaaaagctcatcgtcgccggctgtagtttaagacccgcgtgccgccgccacaaaaaaaactccgacgtccgcaccgaggaggacatgcggagagaggggttggagccgtgctggccggaggagcacgacggctaccgtggtgactcaccgccgctgttcccctccactcccctctttctctttctctgccctgagctcgccagtgccgcatctatctgcactgccgccaccgccgccgcatctatctctctctctctctctcatcaccgacacggattgctccttggagaggcgtagcttcttgcgccgctgcatccacggtggtagtcgtcgccgcggcgagcggcgccggcaagctgtcgctgtgggcgctggtgaaattgtggcgccgctccctcctctcccactaacgccgccgcacgctgctccctcctcttctgcttgtggccatcggggagaagggcggcggacttggtggggccgccacgtcgccgtcttgctccccctgcggccaccaagctcctctcgccgccgccgacgcccctcccctgctcccgcgtcgccgccttgctcccctcgccgccgccttgctctcctccccgctgccgccttgctctcctccctgtcgtcttgctccccccacggccgccaagcccttttcgctgccgtcgatgcccctcccctgctcccgcgtcgtcgccgccttgcttccctcgccgccgctttgctctcctccctgttagagttagagataatgtgtgcatgtgataatgcatgtgataacagaatagaagttagagataatcttggggttagtttggattgagatgtaattctgttatatatgtaaaaccacgttggaggttgtttccaacactaatcaatatatacgtgcggcctcgtacagaggtgataacgcttcctaaaagttttatatggtatcagagccatactagccacaaacagatcaatctggcgatggcgagttcctccagcagcgccgggagtcctttttccggtcaggcggtcgcagagaagctcacccggacgaacttccttctgtggaaggcgcaaatcctcccggtgatccgcggtgcccgcatggaagggtacttgacaggcgcgacacaggccccgctggctgtgatcgacgccaaagatggagaagcgaccgtcaaggcgtcgaagccggcgttcgagatgtggataacggcggaccaacaggtgctgggtttccttctttccacactttccaaagagatcctcacccaagtcatcagtatggaatctgccgcacaagtatggaaggccatcacggagatgttgtcttcccaatcacgtgcgcgtgctttgaacacgcggctggcgctcgcgacgaccctcaagggcgatctcagcgtctctgattacatcagtaagatgaaagtcctcgccgacgagatggcattcgccggcaagccgcttgatgacgaagaactcatttcctacgtcctggctggcctcgacgacgactacgagccggtcgtctcctctctcgtcggcaagtcggaggttgtctccctcgccgagtgctactctcaactcctgagcttcaagtccaggcagaagcttcgtcatgcggctgcacatcaggcttcgtccgtcaacgcggccaggcgcggtggcggaaagggcggtggatacactcccttcaatcgcggcgggcgcagcggtggcaacaacaacggcaggcgcagcaacaatggaggtggacgtggtggccgcggcaacaacaatggagaccggggtggcaaaccacatcctgtgtgccatctatgtggcaaaacggggcatgttgtcgccgattgttggtacaggtatgatgagaattttgtgcctgaaaataagatagctgctgcagcctcatatggtgtagacacaaattggtacgtggacactggagccacggatcatatcactggagaattggacaaattgacgactcgggagaagtataatggcaaggatcagatatatacggcaagtggtgcaggtatggacattaaacatattggtcattctgttatttgtacccctactcgcaatatatacttgaaaaacatccttcatgttcccaaagccaagaaaaatttactttttgctcatcgcttagcccttgataatcatgcctttgttgaagttcattctcgtttctttgccatcaaggatcaggtaacgaggaatcttcttcttagagggccttgccgcaacggtctctatcccataccaaaatcgtcgtcatcttcgtccaagcaagtcctcggagtcatcaaacccactatttccaagtagcatagtcgtttgggtcatccgtctttttctatagttcagagagttgtgaacaataataatctcccatgtttaggagatcttaatgagttaggtgtgtgtgatgcttgtcaaaaggctaagagtcatcaacttccctatcctaagtctttcagtgtgtttagtcatcccctagaacttgttttctcagatgtttggggtcctgctcctgattctgttggtggcagaaaatattatgttagttttatagatgattttagtaaatttacttggatctatttgcttaaaaagaagtctgaagttcttcagaaattctctgagtttcaacagcttgttgaaagactatttaatcgcaaaattattgctatgcaatctgattggggaggagagtatgaaaaacttaatgccatttttactaaaattgggatcactcatcatgtctcttgtccctatgctcaccaacagaacggttccgcagaacgtaaacatagacacattgttgaagttggtctctccttacttgctcatgcttccatgcctctcaagttttgggatgaggctttccttacagctacttatcttattaatcgcacaccaagtaaagttatacagtactcgacgcctttagagcgtctcttgaatcaaaaaccaaattactcctccttgagaacctttggatgtgcgtgttggccgaatcttcgaccctataataatcgcaaacttcagtttcgctcaaaacagtgtgtttttcttggctatagcaatattcataaagggttcaagtgtcttgatgttgcaactggcagagtttatatttctagagatgttgtgtttgatgaaaatatttttcccttctcacaacttcactctaatgccggggctagactacggtcagaaatcttgcttttgccatctacactgttgaatcctgaaattgctagtaggggtatgcaagtgaatgatcatatgtctaatgctccctctggagaatctaatattatttctgagcatgcacctgaacaggaagcaggaggttcaaatataaatgcacctacagatacacatgatacagaagatcctggtgctggcggcagtactggatttgatgaaaatactgctggaagtgatggacctgacggcagtgatggatttgatgggtcagctgctggctcagatcccggcgatggcagtacagaagttgggagcagcagcagcagcgctgtcggcagtcctagcactgggaacggcggcagtagtggtgcgtcagtcaatccaggaccagggagtgcatcggcaacagaaccagcccgtcatggtggtgcgacaggtgatgagacacatactaatcagattattcctgagcaggtgcaccagccaagtcgtccaaccacaaggttgcagaggggaataaggaaggaaaaagtctatactgacggaacagtaaggtataatcttctagcctgtactggtgaaccacagtttagatcaagtattagttgatcaaaattggaaacaagtcatggatgcagaatttacagtcttaattaataataaaacttggcacttagttccgcctcagagtggtagaaatattattgactgcaagtgggtttataaaattaaacggaaagctgatggtagcctggatagatataaagctcgtttggtagaaaaagggtttaaacaacgttatggaattgattatgaagatacttttagtcctttttgttaagactgctactattagagctatattatctattgctatatctagaggttggtgtcttcgacagtttgatgtacagaatgcctttcttcatggtgttcttgaagaagaggtgtatatgagacaaccgcctggctatgaggataagagtaagcctaattttgtttgcaagctagataaggctttatatggattaaaacatgcaccttgagcttggtattctaggctgagcagtaagttatgtgatcttggcttcaaggcatccaaggcatacactcattgttcttttacagaaaaggaaatgttactatttttgtacttatatatgttgatgatataattgtagcaagtgctacacagggtgctgctgaggctttgttgaaagatttaaaacaagagtttgctctcaaggatttaggtgatttacattatttccttggaatagaagttaacaaggtaagagatggtatcagatggtatcttgttaactcaagaaaaatatgcctctgatctactaaagagggcaggtatgtcagattgtaaacctgttgctacacctatgtccaatacagagaaaatgtcagttcatagtggttctgttctaggggaacatgatgcaactagatatagaagtattgttggagctttacagtacttgactttaactcgaccagatatttctttttcaataaataaggtttgtcagtttttacatagtcctaccacgcagcattggatggcagtcaagaggattttgagatatattaagtcttctgttggtcttggtcttaagattaacaggtcttcttctactcttgttagtgctttttctgatgcagattgggcaggatcagtagatgacagaagatcaacaggtggatttgcagtctttttgggatcaaatctggtatcatggagtgctagaaaataggctacagtttataggtcaagtacagaagctgaatataaagcggtagcaaatgctacagcagaggtaatgtggattcagattttacttcaggaaattggggttcaagttccgtcgacagctaagttgtggtgtgataatttaggagctacatatctgtcagtcaatcctgtgtttcatgccagaactaagcatatagaagtggattatcattttgttagagaaagagttgctaggaagcaactggagataaaatttatatcttctggtgatcaagtggcagatggttttactaaaccaatctctgttcaacagcttagagattttagaaacaatcttaacttagataagttatgattgaggggggctgttagagttagagataatgtgtgcatgtgataatgcatgtgataacagaatagaagttagagataatcttggggttagtttggattgagatgtaattctgttatatctgtaaaaccatgtgggaggttgtttccaacactaatcaatatatacatgcggcctcatacagaggtgataacgcttcctaaaagttttatactccccgccgccgccttgctctcctccccacccgtcctgcccagagccagagagagaagagtgggagagagaggaggaagggagagaagaggggaaagagaaagtaggatgacctagacaggctgacacgtggggcccatgctgactcagccgccacgtaggacaaaaccggcgtcaaaaccgccgagggaccttgggtgaccggttttgtatagttaagggaccccgcatatctgattttgcagttcgaggacgtttttgtatttcgctgacaagttgagggagcttcggtgtactttttccaaaaaaggaagaaacctgaacatgaatcaggtttaggcctgtttttatgtgctgaaaaggcttaggccgggcggaaaaactagctggcgtgcgcgccagcagcacgcgttttttgcgtgttaacgtaactaactcggttaattaaggataatgatagtaattaagaaaagttttttcttgttttcaatttatttactagcaggttgaaaactttcaacttaatatttaaactttgaagtcaaatttgaaaactttcaactcatatttgaaaactttcaactcgagatttgaaaattttcaagtccagatttgaaaagtttttagttaagatttgaaaattaaaaattttgaaaactttgaacttaaatttgaaaactttcaactcaagatttgaaaactttcaagtccagatttgaaaatttttaagttaaagatttaaaaattttcaagtcaagatttaaaactttcaactcaaaatatttgaaaatacgtgtgctaaagattacaaaaattattagaaaaaaaagtaaaaaggaaagaaaaaaatcgtggaaaaaaggaaagaaaaaagaaaccacgcggggaagcggcgccgtgtgcgcgccaattagcaacaccctagggcgggctcagctgtacatttttggcttaggtttttataggcccagtcttgcataaggtttgaacaagcccaaatacaagattttaaaatacaaaagggatattaggataaataaaagaagttaaaaattaatctgtcctattctaatatctttcgagctacgtataaaacatgttcgatatagaggttaaccggcaacgaccaatgaagacacaaagaatattataggctaggcaatgaccccaaggagcatatcaccacagagggcaaaccaatgagaaaatggacatttagccatcttcaaaacacggttttgctagaatgccatcttcaaaacgtgattcgataaaatgccaatatcaaggccatgcaactcgccagattgccattttcttattttctcttaattccgaaatcattttgcctcttctttgtggtgattagacggaaatgcccttggggccaatggcaagtccatctcttctctttctttctctccttcttcgttttgtgccgccggcggatatggtcgagcgcggcgaggtggtcgtcgtcgttgctgacgagggcatcgacctgtcggggatgcggcggaacaagttggcgacgatggtgtgggacagggcgaggccgagcaaaggccatggggcttggttgatggcagcgatgaagaaaacgtctcagcagcggctccgagctccggcgagacgatgccaactcattccattcgatatgaaggcatgcatgtgcatccatgaggttggttaggtcccagggatggtgcatgcgcaaagaatcgacgagggggtcaccggagcggagagaatcgaagattgacgccgacggccgaagttggagaagacgatgtcgatctccctcctcgatgctccattcttctcggttcttgaggggttttgaagaggacctcaagaaggagctgatggcgtggtggcttgctccgggatggatgaggatggccggacatcgacgatgccgaagcggcggcgctccaggacgacgatggcacgacggtgttcccgttgctacaatggatcaaacgcgatggcgtcaaaagaaagtttgttctgcaagatgaattgagtatggaacgcaaaagggataaggacgaccgtggcttggtgatgaatatgatcatcgtcttcatctcggctggcgatgggattgagaccaaagaggcagcccatgcttgttctctcgatgtggtcggcagtagggtggagagtgagatgggacgacggagttgggagaagaccatagctaccgccgccgccgccactcaatgcgccggcgaggccatggtattttgtcccctgctcgccgcgctcacgaggaagggcaatttcgtctcatcatccggtggaggagaaaaaaatgatttcgaaaatgcacaaaatggcaaaaatggcaaagtggcggtgagtgcgcgtttcatattggcattttagcgaaacgcgttttcgaaatggtattctagcgaaaccatgttttgaaagtggctaaatgtccattttctccaaacgaataggggtccttcccctttagaggtagctaatgatggtcgaaaatagaggcaaagtcggtgcactaggtagaggaagtgagggattagtgaagggtgttgcatgggataataaggaagaggtgagatgggctagccaccggtcatcaaacgcatgattaaattgaaggcctctagcttaaatatacttagtttgaaaaatgttgtgatgtctataagaccaaagaaagtgatgcttgtaagtcaaggtggctagttagggatcagggtcatgggtgaggtctacgatataccattgtctatccttgacaaaagacaaacaaaataaaaattggttgcccgaggagaatgctactcctggtggcagttatcttgatgaatgttcctggataagaaaacatatgtttgtgaatgttgatttatgtattgagtctcggtaggtttatataaactctaatttagatcataatactatctttatacatctctaaatgttatatactttttttttggaaatatacgactagcgtatatacaagaacttatattcgattccaaattttatcgtcattttaccacatttcatcaataccattattcttttgcaagtattctgacagtgacgtctctgaaatactacaggcacccccgtcatccgaatcatggatatctcggtctttttcctcacaagacaaccatacaaacaacttgcaccgcttatatgttaaatgaaagtgacgcataaagggcaaacaataataaaattcagcgactttttttttctgcgccgacaacgatttcacgtgcacgctaactgaaagcataaaagatattttttctgttttttttttgcaaactagcgtaaaaggtatttcctccggtcatgtttttgcttttatgaaacgaaaagaagatatttttttctaacaaaaatccaatttactttctccaactattttattggatcacttaaccacctaaaatatttttaaaatgtgacatggctacttaggttattatattttgagacgaagataataaaaatatatttaataaaaaaagaacacaaagatgtttgtgacttgtattctctgtttaggttttattattgtaacttaaggttataagaaacaaccatttgataactagtttttaaaaaatctggagaagctatgagtttaaactcatagtgtattttcttaattctatataatcacgtcatttcagaacataaataaaaaaattaaacgatttaaataaacttttgattatacgaaaaaccatacccgctgcctggaatccctcgcagataatcccaccaacaagcagaaacatacaaacatccagacggaacgcatgccgaacggtcgaacggatggctcggcccgggacttatcgcggggggagggggatcggatcctaacgggaaagacgggaaaatctccggcatcgccgccaatttctcccgcacgccgcggcgctgctcccccttccctacccacacactccaccaccatcaccaccaccaccaccacccgcacgcgcgccgcaacaacctcactactgcctatcctacctatatggcacggggtgtgggtccctccgattcccccggcacgccactcctctcccctccccacgcaaccgcctttctccgccgccgccgacgccgacgccgacgccgaccccttctcccaatctgcggattccagcgggggtcccccccccctcccaccggcggcgcccggtggtcgtggtcgtgggggaggggagtcaacgaacgagccgagccgcccgcttgccggagctctctatctatctctctatctctatctctatccctccagattccctcctccatcgaatctctgatatttggagggagcgactcgacgcagcatcgcatcgtaaggaaggtcccctccactgtcgatggatgtgaggtttctttccaattttttttcttcctttattattaattattaatctctctctcgctcacaagcataccatgcgtttcatgtgccattatgcctcatcagtttgatatgatatacggtatggatggtctctagtctctgtcatcaatcgatcgcatttactacatagatatggaactaacatggaagaaaaagttgtcagattcttttcctccaatctgtattaggaaaaataatttgtcatcagttgatcgcatttaatacatagatatggaactaacagggaagaaaaagatgtcaccagttgattcttttcctccaatctgtattaggaaaaataagttgtcatcagttaattatttgtatttttcgtaataagtgtgtgtgtggaaaggacattcctccaatttgtattaggaaaaataagttgtcatcagttaattatttgtatttttcgtaataaatgtgtgtgtggaaaggacagggaagaaaagaacttgcaaaagtgtaattgcaaggcaattgatttgatgctacttttgtgggggtgctcctgtttatttatatatatgcctattcttttgcactaagcagcagcaccagctcgacgaggagaaccagagagccgcgctcttccactcctctgccccatcttcctctttgggagctgacggggaggaggagagggagactgtgccgctgctgtcctgcaagatggccgacgataaatctgacactgtccaggtctccgaggatacggcgcaccagattagcattggtaatttttcatcaaccgttctttgttaatgtctaggcgaatgtcttatgaatgatcgtgtgatgtgttctctcctttcttttcataattgcgatccttaagtcttcctagcctcctagttgaacaccacggcgcctgcatatatttctcctttcttttgtcctcataacctatcggacaaatagacactggttgttccttagccacagataggtaaagaaaaagaagatctgattcatattcatcatcttgaggcctaattcattaaaagagctggaacatgaagcaatttccttttgtctttaatttcttacaattttcagttgtggctcttcttactgcttttagctgttccctctgaaaatataaacttgatgcagagccacagaccatgggttgtcattttggcttaaaaaaaacattgaccttatgtggtgcgtatgattattgattgacttacgaaacactttttttttcactttcagatccctggtatcaagttggattcattctgacaaccggggtgaatagtgcatatgttctgggatattctgcatcaatcatggtccctttaggctggattggtgggacatgtggcttgattctagctgctgcaatatccatgtatgcaaatgctcttcttgctcaccttcatgaagttggtgccaaacgccatatcagatacagagatcttgctgggcacatatatggtaaatattaatacactcagttccctcatttggcaaatattcgataaggaatagtttcattctcttccctttttttcttaacctgtgcatgttttttaatcattcccctccccccatattttttgttttctttgntgggtnctgcagagngctcacctnnnggggggcat

SEQ ID NO: 16903 - DNA, 2044 bp, Oryza sativa
  unsure (1)..(2044): unsure at all n locations
ggcgtcagcgacctcccccaccacgagcagcggaagcgacgctcttctccaccgcatgcggcagcggcggcgacagcttcctgtggaggagggggaaggggaggccggctgataaatcctgagtcccactcgagacactcaaggttgttattggcccgatcttttagtgagttgatgataactacgatttaggagaaacgttgactacccgactacaaccgtactagacgtgttgcgccttcgcgatcgacacacctctccgtgtgttgttgatcttgccggtgtagatcaaccttattcctgcaagcaaatcgaagaaacaagcaagaacaagataaaagcaatctgaattacagataggaattaaatacaaatgataagttggggttccgaacaacaagcagacggacggtctagccgacacgcacgctgcaagcaagtagcaattgctaaactttaatttgacaaaacccaagaaaccctgaaggggtatctagctatttatggaggtgggagaactacctaggggtgcctagggtcgtgctccacctggttggggcacacctcacatgggccccatttaggccggggtcccaaatgaagttacaagcccatatgcccattataggtgacgtaacaccttgtttctgtgattgtggccaaacgatacggaattcggggatgaggctggatccgttggaaagagaactccgagagctttccatcgagtactcacaggccgaaacaaagcttgtatacagatttggcggccatttgaattctgcaatgtcgcaggtggccgaatcagattccagcacttgatcaacttgatcttgatgcgagcgacgattgtatcaatagtagtcatggtcacatcactagcaagccgaagggggaagaggaggtcgccgcacgggaaggggaggctggcgagccggaggggaagaggatgtcaccatgggagagggggaaggcaaaactagtaaaatgtgcaattaatataggcaaattagtctttactagtaaaatggcaaaactttaccatggatctaaacaccaactagcaaaacttcaatgtcaaatcttttgccgccaaaacttttgcccaaaaaatttgccacaacaaattgatctagacatgccctatataaatgatgaggggaaggggaaactattttgatccctcatggggagatcccctcgttatttgcatgtcactctaatggttatgaaaaaaattggaaatttgaaaatgtgtattaacatgtgatataacactccataaatatgcaagtttaaattcaacttgtacatctcgttaaaaaaacaaattaaacactagtagagaaacgatttttccgtgcggtcaaatgtgaatttcgcgtgcggaggttccaactgtctggaaccaagggtctgtaaaaatcactatttttgcgtgcggttagcgcacccacacgtgaaaatctgatttttcgcgtgcggggtggttatgtcgcccgcacgcaaaaataaaaaaccgaaaaaaataaaataaaaaaacccctaaccctaaagctgccgccgccgccctcctcacggtcatcgtcgtcgccgccgtccatgcgggggacggccgccgccgcgcgcacgcgccgtcgagcccggcaattccgatcgccgccgtgcgcatgccgacgaggccggcaccgccgccggatccgggcggggcacggtcgccgtcgncagattctggacgggggtagtcgtacgccgtcgcgtgcacacgccgtcacacgcacgcgccgccaagcccgccgatcccgtcagccgcgcgcatgcttgttaggacagcgccgagccgcgccatgccagacggccttgcccacacttgtttttgtccaggaagatttttctgacttagtccctgaaaaattatttcttttattagggaaccgggggtttgctagacgttttttcaccaatcaaatttggttttttttttccttgggagaaggtaatgttggaatttaaacttgaatggttgaagaggggattttttcta

SEQ ID NO: 16904 - DNA, 28768 bp, Oryza sativa
ggccgatattcgatccggcatcttggcattctctttcccttctttccttaactgtgcatgtttactaatcattcccctcacaccatagtttttgtatcacatactattggaatatatgtccttttttttctctaactgggcatgtttcttaatcattcccctcacaccatattttttgtatttcatactatttgaattggttatgaaaaacttgctctgggttttgtttattaataaaaaaatggtaattttgcttttgcagtatgactgaattacctttatttcaggtagaaaaatgtattcgcttacatgggctctgcaatatgttaatctattcatgatcaacactggccttatcattttagctggtcaagccctgaaggtacagagcaatcaccatcacccaactcttcttatggtgaaatgccgtgttatttcataacaagagttgggcccttctattcattatctcagtatctaagtttagatttttttttctttttgggaatacacatgttgaatttcactgggaaatctttttccctcctggactcatttgtgaacttcctttctgcaggcaatatatgtattatttagggacgatggagttctaaagctaccctactgcatagcattatctgggtttgtctgtgctctttttgcctttggaatcccttatctgtctgctctcaggatttggttgggattatcaacagttttcagtctcatctatataatgatagcatttgtcatgtcgcttagagatggtattatactttggttccttgttcatctgtccttaatttcttgtgcatttccatttgttggcataacaagctactcgtacaaaaatttcattactggttttcttttgaagggattaccacacctgcaaaggattatactattcctggatcacattcagatagaatcttcactacgataggtgctgtagcaaaccttgtgttcgcttacaacactggaatgctcccagaaattcaagttagtcagtttagtacatatggccagtgactagtttatttaccatgatattaccttatgtgtattatatattgcaggcaaccataaggcctcctgtggtcaagaatatggagaaggctctatggttccagttcactgttggttcgttgcctctttatgctgtcacctttatggggtattgggcgtacgggtcctcaacatcaagctatctactgaatagtgtgaagggaccaatttggataaaaactgtggcaaatttatcggcgtttcttcagactgtcatagcattacatgtatgtccaccttactatatatctagtccaagctacattattgtcaattagtaatggttatttctttttcaatttgatttgtttataatcaaattgacactcaatgaagtaacatgaggtcgttttctatatatgccagatatttgcaagcccaatgtacgaattcttggacacaagattcggcagtggacatggtggtccttttgcaatccacaacataatgttcagagtgggtgtcagaggaggctacctgaccgtcaacaccttggtggccgcgatgctccccttccttggcgacttcatgagcctgacgggtgcactcagcacctttcccctgacattcgttcttgcaaatcacatgtacctcacggtgaagcagaacaagatgtccatcttcaggaaatgctggcactggctgaacgttgttggcttcagctgcttgtccgtcgcagctgcggttgctgcggtgaggctaatcacggtcgactacagtacataccatttgtttgctgatatgtgaggctggaaagtgcaagcatgcagccctggatcagctgtaaattcgtcctcttcttttttatttttttggttaggggatgcatgtaggtcgatagaatgatggagattgcaataaataatttggctaaaatgttgtccagatttggttgtttgaggtgcaagatgtttgcctcaaaacgtaccgctatggttcactttttaagaactgtactgctacctctgtttgcggagatttttgtctgcaggcatgcaggatgaatattattcaagtgctctaatagtttgatctcagcaacatcaaactgtccttagatatagacatagataaacccaccttttaattttgtgaattttaatcttaattcggagaatttggcactaaacaattttcctttttgtttacaaattaggccctgtttagtttagcggtgaaaagttgttgtgtgtcacatcggatatatggacacacatttgaagtattaaacgtagtctaataacaaaacaagttaaaaattccacctgtaaactgcgagacggatttattaagcctaattaatccgtcattagtaactgtggcaccacattttcaaatcatggagcaattaggtttaaaagattcgtctcgcaatttacacgcaatctgtataattaggttttttttctatatttaatacttcatgcatgtgtttttttctatatttaatacttcatgcatgtgtctaaacattcgatgtgtcagggtgacgagttttttttgcgtagaactaaacagggcttaaatgcctctgtgacggtatttcaagaaaaatctacaattcttccaaaaccactccatatcctaattttagtggatggtccgcatcatgtaaaaaataatcactaattatgattataatcagtttctaaattttagaattaattttgtagcatttttgtcactttcattgcccgcgctcttaacttaattgctaaaaagacaagtaataaatctaactaaaaaatattctttgaaatcaaactttaaaaattcaacatgcttacagctatttttagcttctaatgatgaagagtataaatagatcactctagagcttttctttggtttgcttatccttatgcttataaaccttttgatttttaaaaattaattttgaagttgattttatggtttttccttttattgtactttatcttataacattttattttgaatcgattaggacacggatacaaaaatttcacccacaactgtttttttattgctaatatactatacatatacatataagtacaagcataagcaaaataatgaagctgttattataatccgaataaagatatggtcatcgtggccattcacagtacaagacactactatgagtacaagacactactatgaggagcatcagactcccacataggatgaagatagaggtcctaaatcagtttctctcacagtgcaaagtggttctaggggtgttttaattttgcatgtcaacctatgtcattttctattttagtcctcatattttgtaatttttaggggacccaatattttacaccaaacaccctagaaataaaaataaataaattcgccctccatcctcatccagtcatcccgcactccctctaacatttcccctctccatcgctctccccccacaccagcgccgctctccatccccatctctgccacttcctcttccccaccgctagtggagctccctttccactccaccgccggcaccgcttccccttcccctaccggtggcgccgctctctctcgcaccccaaagttggcaccactctctctctctctcttccaccggcaccactccctccactttcctccactattgctcgactgagccacgctgatggccacccctgcgccccctcctcgttagatccagcctaagactcaccggatctggccttgggagacaacgacgagagccatgcgaacttctccttgacccgggccaaggtctgtgtgagcatggtttctaggaagaagatcttggggatggagagaaggtcgtgctctagtgcttggcagggagcggaggagcgcacgggtgatgaagacacggtggctagcattggctggtcgaggggattgttgggcctatttggttctctaccctaccaattcaatggtagtgccaaaatctaggcaaattttggcgctaccaattctttggtagggtagagttcatataaatgtgtttggtttgctactatttgctatcaatatgctttttatagtgaagaaagttctagagtactaccaaattaggtatgagcattgccgatgctttggctctaatccaaaccaatcaaactactatttgaattgtcaaacaattggcagggcacattttggcatcaatctaaaatggcccgttgtcgctccatttgcctaaccaccttcctccttctggtcctcgttgtggtggtaaataggagttcacgaggttggagaacatatcagagagacggagatgcttcttgcagttggtggcttggaccttgggtcccacatgtttagacggtggtggtagaacaaacaccaccactaggaacattttaaaggagtatagataattgcttttttaacataatatgatatagattttacctcgattttcattagcacacttttcaaactactaaacgatatgttccgtgtgaaaactttctatatagaagctgctttaaaatatcatatgctaatagttttctcattttatgtgcaaacttaatcttcatcttcatcagtttcaaacaccaccaataagttgcaatgttcattttatattataagtcattttagtctcgtcctaagtcaaatttttatagaaaaaatatagatgttgctaggttttttttatgaacttgtcaaacttggacaaccccccaaaaaaaaattataatatgaaatggacatttaccgggcaagattattaaaatccaccgggccctcaattacattcgttagtgtttgtattttgtatatgtgcctctgtcttagttacggcgctgggcaccctcttctgctgtaagcaacaaaagtaaatttcacaaaactacagatactatgtccaattattaaaagccaactcttgacgagtttctgaacggttgccaatgatttgaatagtcactactagaaaaacaatcttttatcctagtccccaaagcataaatatctcgattagattaaaaaccgttattaaagatgttttagtaccggttctaaaagtccaagtccctagaaacatctttagttccggttggtgttaccaacagatactaaagatgcctccagggttagttcaaaaagaaagcatctctttccaagtcatatgtgtgtagtacgtgggatggtaacgcgcgtaagggctgaggtgagagattttgagtttgaatctcgatttactggtctcggttgctacaaccggtaataaaaggggttgttaaccggtagtaaaaatgagttctcttgtagtgagttgaacgaccatgacaagatttattggtactaccgatgagtctagtaggcccaatcctaaaatcaaaggatcatgaacttcctaaaaagtgttaagtgaatcagaaaatgaggcatgccactattgtaagttatgtgagaaagaagaacatatgaaagttaagttgccatcgccaagtgcaactgcacatcaagaactaatgcaaatgtagaaagttcaatgcaacacgagttaaggaagaaaaaggtgcacctagaattccatgtatgacttgatgcttgggttaggcattttgacataaaaaagtgcatggtgcttagactaccagtagttgtgggttgtggcaaccaccatagatctcattcgttggtagaagggaagagggttctccaccatacatggagaacatcaacaatggcaacaggggcgtggatcctaagattctggtggagaggtggggagatgcggcgtgggcaagggaaggggaaccaggaaggagggatcgatgtggggtgcggaaagggggaagggtaagggagagggtttggagcattcgtttaggtgcatgcaaaggggagagggttccatgcgaaggttgagggaggtacgtgggttgatttgagccgttcgattcaatgatttttggatcgttggatttgatgaatacggtttgtagtagtacagttggtgaactatatataaataaataggaaggaaggatagaagaatagataaattagtcacaatatactcccttcatcccacaaaactggtcgttttactccttcgcgattgtcccataaagctggtcgttttatcatttggagtagaaaagtgggcacatctaatatgaggctatcatgtactactattagttgtttttgcttcacaagactttatgcccgagaagttgtaggatggtggtgtagtgcaggagaagggggacagtgaaatagttttagtacctgcaaccggtaataatttagggtatgttgataattttcctccaaagctaatttagctgcacatttctaggacttccagaattttgggacgaagggaatatcatttaggatgaaaggatagaagaatagatagattagtcacaatatgtcattttgaacttagtttacacacattagataagtttgtgcaccataataaataatttacaaatttgtacactataaactacacccatctaatccatagctgaaagcctctgtttggatttctactgtgaaattcaaaacaaaaaagtgttagaaaaatactcctactgggctcgtacaggcgcccatcttttgtcccctcgcccgcaatccacccacctctcgagctcacaaaaatcgctcgccccccttcaccttcacctcgctcccgccgccttcaccacccatctccgccctcgtccgctcgccggcaagccgctgctgctgcagctgcttgctcgtctcgtctccccatccctgggcggggcgcggtgggaggggggcgggggactcgccaccgctctccgttccgtgggtgtctctgcactctgctttgctcctcttcttccccccctctggttccacccccgcgcggcggagcgcgggggaagggatccacagatgctgttctgctgccctgcttctcctccccctccaatccaagcttcttctctcccgccgttccggacgaacagcttgtctccgaccgtacgtggcgggaatgccgcgccacgacgccctctcgcgcggtctttctcggccaagaaccggtccccgcgagcgcggaaccgccacgcggcagcaggtgatggtggtggttatgggtctccggagcaagaggggcgtggggaatcgtccctcccgaacgccgaggcgctcgcgtcctcgctgcgtgattgcggcggcgcggacggcgtccggcgggtgcacgcggttgctgtccggtcgctcgacagcctggggacgttcgtcgccaacaatttgatcagcgcgtatgccaggttcgacgaggtttcggatgccagggaggtgttcgacgaaatgccggagaggagtgttgtgtcgtggacggcgatgatgaatgtgtatctgaaactaggacactacggcgaggttgtgaggctcttctttgatatggtgggaagcggagtgcaaggtaacagcttgacttttgtttgcttgctgaaatcatgcggcgagcgttgcgatgctaagctagggcagcaggtccactgttgtattgtcaaaggtgggtggagcaatgtgatagtggacagtgctattgcacacttctatgctcaatgcggtgatgttgctagtgcttcagccatatttgataagatggcctatcgtgatgtcatctcatggacaacaatgatcacagcttatgtgcagcatgggcatgggggccaagctcttagaatgttttcagaaatggtgtcagaaggatttcgaccaaatgagttcactgtgtgcagtgtcctcaaggcttgtgcagaagagaaagctgtgagatttgggaagcagctgcattgtgctgttttgaagaaaatgtacaaaaatgacatccatatcggcagtgcccttgtcaccatgtatgctagatgcggtgaagtttttgatgctcaggcagtgtttgatatgatgccacgaagaaacactattacatggacttctatgatctctggctatgcacaaagtggccatggagaaaaggctatcttgttgttcagaaagatgaagatgcgccgagtatttgttaacaacctcaccattgttggtctcctaagtgcctgtggctccttacagtcgccttatcttggaaaggaattgcatgctcagataataaagaattctatggaagaaaatcttcaaattgggagtacacttgtttggttctactgtaaatgtggagagtacacatatgctgcaagaattcttgaagcgatgcctgaccgtgatgctatctcatggactgctctgatttccggctacaataatctaggtcataatgttgaagcacttaaatcattagatgatatgctatgggatggtgtaaaaccaaatacatacacttactcctcggctctgaaagcttgtgcaaaattggaggctctgcaatatggaaggaagatccatggttttgttaacaagactcaagatttctccaatgtgtttgtgggaagctcacttatcgatatgtacatgaggtgtggaaaagtcgacgaagcccgaagtgtctttgatgccatgccagaacataaccttgtgacatggaaagtgattattacaggatttgctcagaatggcctctgtgaagaggctttgaagtacatgtacctaatgcaacaagaagggcatgaggttgatgattttgtgctctcaacagttctgacatcatgtggagatcttcaatggaaatccatctccttctctgactcagttgctggttcagtttcagctaggcagtagattagttctcccgtggcaaagaagctagcacttctgtacagttacagagatttgttattgtgcaagatcagaagacatgtagcacaaaaaggtaactcaaggagtgcatacgtgtatatgtacttttaagagtaccactaccttcactaaccatttgccttttgggttcattacaaaccatgcatatcttcagaagaaaaattgtgaaaactttagaatgttttttatgcctgttttaattcccactatggttatctctatcattacaattgcattaacatatgatctgcataataagcataatgcttgcacgcattagcagctaaatcattcttccatatcatccacttatccacttaggctgtgttcggaatcggacgttcccagcgtgcacagtaagtacggaaaacgaagcggttcattagcgtgtgattaattaagtattggctatttttttttcaaaaatggatcaatatgattttttaagcaactttcatatagaaacttttttgcaaaaaacgcaccgtttagtagtttgaaaagagtgcgcgcggaatacaatggagaggggttgggaaccttgagttccaaacacagccttagagttcatgctgtgactgcaaaaaattaaagttcatttggtaattgaattcattatagcaagtgtatgtttttttttcatgaaattgatatattttaacttaaatatgggttttaacatctttatttcatacattctctatttgtttttttattaatctaaaccatcacagtaattcacattcactacaatatgagggcatcttgttcttaaagatcgtaacatgttcttattttatcttgtttctccacaattttcctagtttattttcaacagggatttgaagtgctgtcctaaatttaacaaactgaagactctggtacttaatgattggtgtgtggcttctgacctcaatgcactaatttattttctgcaacactcaccagttctggagaagcttacactacagctttccaaggtacaaattttgtatatggatagctgtctgttatcaagttatcgtccacgatttatttagttaaatatcattttctatagacatgaaaagattcattgcaaacaactggaaattacaagtatcttaagaaggttccatttgaccttaagaaggttgaaagcaaatgtgatgaagttgatgaaagagtttgtgaagttctcaagatcttgagtgcttatgtaacaccgctccaaattgatatgagagatatatgtgagttaaatatttaataccactcctttcaatttatcaaaatatctataaattgtaaccatgcagtgaggaaaatatttggctaattagagggaagcaattgttcaggacaggtagaaactctccccatatttcatgaacagaaagtgaaagcaattgtcaagcatcatcatacataagcatataaaatgagtttcgtttgaattacaatgtacaatcaaattatacattcagtagtttcgagttttataaagttatacattcagtagtttcgagttttataaagtgatggcattatcaggcgctgttctctctaatttctgttctggcaaactgtaagcaaacatcctcaatcctcataggcaaaataacaccctctgtctgacctttgatggaacatgatgactgtgagtgccatcaaaggttcgacagagggtgaatctatgtttctccatgattatttagtgaatatatgtttctccatggacaaatagcacatcctatacaatccttgcatatgcagataaggtaaactaaagtgattcctattaaattttggaattatggcggttgaaaatataaaaggtggaaatttcctgtattcagtcctggaaagggaaaataaaaacgcatcactaaatttttttcagtttccggattgattgatatctatcaaactagtgtccctgaaactggtttacattggcacgcatcatgtatcatgtatgcactagaatactagatgtagttagtcaggaactatcaagcacatcttgcaatttcactcatgcctattttatctgcttcgtatagttgataagatttgggttgttaattcatctactatttgttgattattcagaaatagagcatctccctgagtttcgcaagataactttagtttcatctcaagtatgtgttgctgaagacatttcatctcttataaatcttaatgttgattggatatgctgttgattgcaccatcacaaactcacctaaccagagctgcatgaattgctctaggatctcgtatcactcgcattttctgtcacacatggctaaataattacatgaataatgatcaagccgactataagctgagttgcaccatcatctgcaatttctcctgtgcagatttcaaccatatatactccccccgtttcacaatgtaagtcattctagcatttcctatattcatattgacgttaataaatctagacatatatatctatatagattcattaacatcattataaatatgggaaatgctatgatgacttacattgtgaaacggaggaagtacaactgaaggcggccaaaaggaaaaaaaaaactagctgtatgtactactgtaaattacaaacgagcctagtcaatgccatttgccaatatgcgcttataatcagcatcacaagccagtgacttcatcccttggaagactgtgctacgtgtaaagatccagagggtggggcaaaacttgtattgccgataaaccagtagagaacccacttcaagttgcacagcatgtattttagtgcttttgtccaattgtcaagtttattgaaacttaagaagattgtatagctccctactttgtcaccttcaatcctgcaagcgaagttattcaagtaaagagcggcacaagcaacgttgtgtatataagatatatccaactgtcaaaatactagtcatatgaacaaaagagaaaccataaccgcataacttactaacctgtcttaattattttgttttatcactagtaaaacctaaagtatttacattgatttcacttaggtgatgttcaatgatggctaatttgtgtcttagcatgaaccatgcaattcatatactaagagatcatagtataggaaagttgcaataaaacttacttatatgggagcttcaatgacttgtcaggtggtacattgttctctttatccaaactaacagcaaaatcagcaaattcttgcaagcaagtcagaaaccatgtcatggctttgtcaaatcgggtactccagaataaattcacaggaccgaacctgaacattaacagtgcagcctattaacttggtataatgtaattccactgtgcaagataagaataaatatacaaagtaaacccccagagtgaattttccaaaattagaacggccgccaaatgatgattttataccagtcccaaataattgcaccactcaacataacatgtgctcagtgaaagcgaattgacaacatgatttatttaaaagtttgtggatgtgttaaccaatgtaaaagaaaattattaccaccaggaaagtgatcaggtatgacaaaataagcataagttgcctatttcatgagggacatcctagattccttactagcagcagaatttgttcttcagaaaaaaatataatatacattatgaaaataaggaatattacagtaccaatattttacaagtttttgaaaagagaataacaaagggagtacaatttccagcaggaagcttacagttcatatgtattttggttgatgtctgtaacttttggatagcttcccatagggtgaattttgatccggtatctagataaatgttcaggtagcacaattatcatttcgtcaacaattgtagagtattaggatttgtccttttcaatgtacatacacatttttaatgctacttatgagagaagatctgctaaaaacacatcatgcaatccaataaaagactataatatgcaattatgcattcaccctaaccaataaccatccaacactatctttccaacttgttataacatatagacaagctcgattcatatagaataaacatattttgaacacagagccatacagaaagaacaaagcaaacaactacatggagtaacaactaaaatgcactgaaacatgtatgtcgtaatgttgtataactagttgatggaggtaaatgccatgtatgaattacttctcaagagaatgaccagcaaataaactgtagcaaaaataatgtcactgtataaaggatactcaaattttgggaagaagtactgagccatggtatgcaacagaagagcagcctggccccaagcagcatttatctcatcccactccacctaagaaaagagtaacacagttgttacattaacacaaaggatcaacatgaacattccatgtacatcttgaatagaattcaaggaaagcactaaaagatagtgaatggacgtgatatctgcacattttgcataattacctgtacattaggaaggcggccaagacgaaagttgtttattgttccgatcaccccatcatgtgaaatatagaatgcatcattgagaacatttgtacgctttaacaattctagatgaacctgcgaaacttctatcttggccaaaaccgcatctctttcttcctgaaagtgacaaaaaaatgagttattgacaggcaaatgcttgcaaacagcccagacattatgaagcttatgtataaggaaccaatacatattataatatctatgctcctataatagaaggtagtggtgaactggtgatggcagtgaatctgccaacccacttagtcccattgaaaattttataaattactccttgagcgtcttcatgttaaaagacaaccaaatctaaatggatagccacatataaaatcaaattaaggtgaatattccttataacaaaaggatgggcaacacatttcatgtaaaatatatttttatttattttaggcaatactatagtataacgtagcaaggcatgggcattcagctagttattttctattatgaaggcagcgcaaaacatgatagtacagacacagagcattattcacaaacaatgttaatttttaaagaggtttatttataccaacaaaagtacaaaacatggcagctatagacttagtttatatagctttagctattgagtatatgacaaatctggaatatagtgcatttggttgtttctatgttctgctagaaaataacaatgtttttaggtttttgtgctaacaagaagtcaaaacatgacatcaagaaaatagtgctaagtaaatatttatagggcctgtagtaggtatttacctggtgagatatccactgaaactgaaagctattgagatcatggcaatacctgtttcaaaaatatgataaatcagatttgtttaacaagtaactgtagaacttcacaaataacatgagccaaccaaatatttcagattgcacaaaaccactagcaattgttgtagcgatataacaaaacatgtgtgggatgtattatgttattattcccaaataatgatactcctattttctgatgtcgaattgccaattatattgaatagcacactgacactctgttgaataatgtctagtttcaggtgacaaatataggtacacattaatgttttcaatataacagttgtattcatagcctataacaatgttacgactcatcagaaaaaaaagagagacagagaagagtcgagagcctcctgcaagtatgcacatgcacacccaaaagcaaattataaatcactgaagactctatatcactgattcttgtagagaaacttcagagttaataataagaacattcaagaaaggacaaaatgaaaaggttaattaaaattttaacctttcttccagttcttcgaactgtttagattttgtttcaaggcacttcatctcggaacaaatttctgaatattgcttttcagcttcctcaattgcagctttaagtttcttttcttcttcctcaatctgaaatggcagaacacataatacatttagttccatgaaaatcatggccactgaccagtcagaggtgcttattcttttttttttcacataagaaaggtcaagtaggcaacttcttcaggaactgttgcacttcaacatttttataagtgggcaagaattctcttacagagaagttacaagggaattatttgttcatttaaaacattgctcactacctatgtgtttcatctatcaaaagaaacttctgccttacttatttttgtccaaagcagcaggctgtcatgcactttaggatctcattaatcacgatatgaccataaatatgtaagaaagattaccaccttttgtctctccttctgaaagtcagtttcactgaggatgttataggtttcctgctccagacgttgaagacaggcctcataagctttattgtcagtattaacatcttcaatttccttctccattttatcagacagcaacctcatacagtccagacagagtggctgttcaatctacaagtatattccagattatcagcggtcttgacattgttcctctcaaaatactaacagatggcaatgaaccctcaacatatagtagcaaaaacatgcaaatctgatgcaataactagcaactgcacaagctaataaatgggaaacaaaggtaaaatgacagaaatggcaaaagcacgtgttctcattcaatacagaggcatcttacagaagtcattgtagtacctgtgtttgtgatgtagcaatctcaaatgcccgttttaatacagtcacgctagagtgaaaattatttcctggtaaagggctaccggggttcatacttgttggtgacaactgcgcaccacctccttcagaggcagatgtcttgtatatggaagcggcagcaggtggaagcactatatatgatccctccattgctcttgttggttggttcggctcggcacgcgggatccctgcgcttggcgggcgtgggggaattccatggctatgtgatctattttgcttcgatagcacgacataagagttgtccatcctgctagcacccataacgctgccctgaacagaggacacgttcatacctgcattgataaaaagctcttgtaacaaatagtgcagcaattcctagcatttttcaaccaatcatgccccaatttcctggctcatgcgatgctaataccataccaaaaccgaataaattttctacctatcgattccgattcgagtcgatggaattacgacgagccaacaaagggaaaagggagctaatcggttgaggaggcaagggttaccggagacggcatgagcggggagcttatcggtgaaggactcgacgccgacgacgacgagcgcgcgttggcactcctggcacttgaaccgcggcagagacgggtcgaccccgccgcccttgtcgccggcagcggcggcggaggatgcagggggcttcatatcgccgcccgacagagcaggacgcgagcgctacctgcatccacgaatccggcatcattcacctcaccagaaacaacggatcaaacgaaaatccctccaatcaaaaccctatagacagctcacgagctccagcacgcgggctcaccaatccaacgccgatccggagagcacggctccagcctccaggggcggtggagtaccccgcaggaaaatcgcggctaggcggcgtcgcggggtgggggtttgaggcgtaggagatgagattccggcgggggcagagtccgtgcgaggaaggcgacggggggctcacgtgcgcggcgcggagagacggcggtcggagcggcggaatcgccggggagggaggagtcgcctgctcgggagtcgagagagagagaggtagcgtgcgtgtgggcgtacgtttgcgtagcgtgtaaactgtaaagtttgtgtgggtgggctcaggcctgtggttgtatgcgtgtgggctacgtgggccgcgcggggaagaagagccgattgagctactccctccgtttaaatattggaaaaagtacaccgaaggtccctcaacttgtcatcgggataaaaaacgtcctcgaaccgcaaaaccagatacgtaaggtctcttaactatataaaaccggtcacccgaggttcttagatggttttgaccccagttttatcctacgtggctgctgagtcagcgtgggacccacatgtcaggatgccaactcatcacatctctctatttcccctcctctccctttctctctctctctctcacttttctcaggccgggcggcgggtgcggactgcggaggaggctggcggggcagccggcgatgggcggactgcggaggacggaggcggtgcctcgttttggcaggtcctccccttttctctcccttcttcctctctctctctctctcttactcgttttggtgggccggtcggcgggagcggaagaggtctggtggccggtgacgagctacacgatggcggcagcgactttgtgtggcggcgacaaggatggagttgacctgcagatagagcgctgcctttccccacaactcccgcaccgagcgcacgtgaagagggaggaggcgggaaggccagcagcggcctgttcctcgtcgtcgtcgttctgcggcaacaccagctgccggacctcttcctctcccctccccccagcggcgcgcggcggaggaagccgcggcgccgtcctcctcctctcccgtctcaccccatcgacgcccgcgccatcccgccgcccgtcgatgcccgcgcctccccattgacgatgggggcgaggttgacggcgatgggggcgacggaggcgccactctccccagcgccaacaagtccccctcatcctcgtcctccggggcgctcgacggagacgcggcggaggccgaggcgcgccgccggctgacgagctcgctgcgggaggcactcgggctgtaccgggacatcctccgggtcacgtggctgttcgagtggcccgacgaccgtggcgattacgacggcatcgtgacggagtacgacgtggagtgcggtgtgctggtgtgggagcgcgacgagcacgaggggcggcgggtgtgggcgacggcgcggcatcgccccgtcctcttcgcgctcaccctggccaccgccgcagtcgccctacccttctcccccagggcgccggccgccgtcgcgccgccgccgccctcctctctcccgtctcgcctgccgacgtcgcgccgccgctttgcctcaccgagaaaccgcctagaaagagagaagtggaaaaggagggaagtgatgatgtggcttcctagcatgtggggcccacgtgggtcccacgctgactcagcagccacgtaggacaaaaccggggtcaaaaccacctaaggacctcgggtgaccggttttatatagttaagggacctcgtgtatctggttttgcggttcgaggacgtttttgtatcccgatgacaagttgagggacctttggtgtactttttccttaaatattatttcctccgttttacatatatatgtctagattcattaacatcaatatgaatgtgggaaatgctagaatgatttacattgtgaaacggagggagtacaagacattttaatttatgtcaaacttaacttcaatcatatctctatctttttatctctactataaaaatttaaagatgttttcacaaaaattttgatatgtcatccgtgtttgagttggtttttagtttgttatatgtcactcgtattcaattcaacatgagtctagaataactattgtacactcatatcccaacccaacccctccccctcccagcccaaaccatcccgttgccccatcctacgtgccaccactcggtgctatgcgcgtccttcctcgattggtgtcttttttttctttttagtcttcttttctcccgataattttgatcctctcctccttccaatctcctctcttctctcctcctttctctttttttcctcttttttctctcctcataaatattttccttttgaatttatcattgtttaaggtgtgcatgcggcaagccctatcccgcgcccctccactcagcatcgtgcatgcccttccccgaccggcgtattgtttgtctccttttctttctcccgataatcctaatcctctccctctccttccaatctcctcttttctcctccttttctcttttttcctcatttttctctcctcaaaaatattttccttttgaattctcattgtttaatttgttactttgcaaatatttttcatctacagtgaaaaaactttactaattgaatagtcaaaatttcaacatttgatctatgaggttgttgatgaaaaaatcaaacacactggcctgggagatctgcttagctcctgtgcaggtccaaatcttgatgagatacgagcgtgccagtcagtttgatcctgcaactgacaagatatgcaaatagtagattaaaacagtcgatcggctgacaagccgatggagtagttccagcctatagccgataatagccgatgccgatactagccgatagcgatagggtttaagcaatcagctatatgtccaatgtagataatgatataaaggcaatcggctgatgacgatgtaatgaaataacaatataatccagtataaaccaatcggcaaataatgatatgataaataaacatcgatccgaacgttaaagcatacatcggctggaggtccgatgtcatgaaatcaacaagattagattaaacaataaaacctttgttttcacaggctaaatccaacttatatatatatgcaattcttatgagccgatgcaacgtccagataactcatcggctgaaaccccgatgaaacccttattggcaatcaagaagtaggctagagattatggttctaagcatgacttagtagatcaaacttaactgatgcaacactaagtatgaaaagaaacataatatctagacaatcaagccgatgactgattttcagggtggtagatgcctaggctaatctaatctagcaaggcgatttagccgataccagcataaaccctaaagcgagaagcagctgatagagctaaattgatatgctaagactagattaacagagacatatgataaataggtaggcaaatatattatccataccagagtaatccaagaggtcgaatgtactgatgcagccttaaacgacgtcagcgtagacgatacaattggctggaccggcgaaacattggacttatcccttcgccggtgatcaaaaatgatgcagcctcgcgtcgggtgccaagttccgccagaacgtaaaaacaaaagtagaagtaaaaaggttggcgatgcgccgaattgtattgatcgtagcgattacacagaccccgggtgtacatatttatacccatgggttgataaagtccttgtcggacaagaaagaaactttcctaaatataaaaggtaaagataaagtccttataagacactaaacacactttcctaaagataaaaagaaactaacaaactattcctaattaatagataacttgccatgccgcattctttttgaactcggtctcttctggataagcttcctttagtagatcaatttccttaaccgaatatagcaagaatccgacaactgacgacttgacaactctcatcagctaatctcaggacttcgaagccgatgctgactctaagccgatgactacttcgggcttaccaaatttcactgttaacagaggtatagcaaaatacacaggcgccaacttatggaataaccacccaatcattttgtgaggctatagaaaggtgtacataaacgattcttcgtgtgatgacatgacacatgaagcgagcacaaccaggttcaatcctatatgtgatttatgactttctttttataatgttttgtttcagtttgtcatttaaatttgtaaagtttttatcaattatgaaaattgtcttcacctgttgcaactcacatgtatttttgctagtttatagaaaaatataacgacatctacaaaaataaattatatttattaaatatagctttatatatatatatattttttgaaacctaagctttaaatatattttaatactatatttgtttcatgttaaaattattattattattattttctttaaatctggttaaaattaaggaagtttgactttgaaagttccactagagagtagaacctcttgtgtgctggcacatagagcgtgtttggctaggtgcaccggggatcatcccgcgtgcagccagcaacatatttggttgtctacatggacatgtaagccaggattcgctagtgcaaaaaggcctccaagccaagctgagaggaaccgtagaaatcagtcgtacctcctcatgtaggcccgactctcatgtgggcacggagatgggcaggtacaggcgatgcacaaagagttgacacatccaatcatccccttcgctcatttgatagctgtcatcttcgtcaatgcatatcttcttcagcaactccaaccgcgcctacaagctatgtcatcagatctagcagccaagagctcgatgccaccatatatagcctttaaagagctcgagctcgcccatccaatttaactttctcgcacggaggatgtacatgaacacatgcacatgccattatgcacacataccacacgagtgtccttttttaaaaaaaaaacatacaagagatatatgcctttaaaattagatgatcacctttaaatattgtatgatgatgatgatgatgatggtttaggtaaagaatggacttagcatgcaatttacgcttttgattaatcatcgagaggttaaaaataattgaaattaaattaatatcatgtagctttatgtgatacaagtaagagtaatttatactccctaagtttcatactataagcccgctttgacttttttatagtcaaatttatttaagtttgatcaagtttatagaataatagaataatatagtagcatttccaatccaaattaaacatatcatccaaatgtattcaatgttagatttaataaaattaatttgatgttttagatgttactaaatttttatataaacttgattaaacttaaaaagaaaaaaagtcaaaacgacttataacgtgaaatagagggagtattagccaattccaaagatcagaaacgtacaaagtttaagatggtgtagctttgtgtgacaaaaaaaagaagaaaaaaatatgaattacccctccgaactatcgcggtcgtccgaactacccctgaatcatgaaaccggacattcttcacccccaactatgtaaaccggacgaattacccccatcgaatcaattcagagcggtttgatccaacgtggcacacacgtggcaatccagtcagcgtttttttaataaaaaattgtgggacccgcctgccatactcttctcttcttcctctctctcttctctctctctctctcttctctctcacggctcgcgctacgcgcacggtgaggactgcgcggggacgggcggtcggcgactgcggaggcagcgagcgcggggaggcgagcggcgggggtagggcagtggtggaggcaagcggcagcgggagctcgtgctgctcgcacaggaagcgaagtggcggctgctgacgaagccaacggctgccaggtgccgcggaagacgcagcggcagcgtcgaggcgaggcggccgccgacaccatgcgcgacaaccagccccagcccgcagccgcaccttcctccgcttagtcgcgggcgctgccttctttttcaaatggtggttcaaatcatcatccaaactcaaaccaaatttgtttacaaacagcgacatttcatcgctcctcctacacggcgttcttccacttgccgaccaccaccatgagcgcgcggcgcgatgccccttccggcaaccacgccgcctcctgcagcaccctcgcccagcgacgcgcggcgctccccttctcccctggatccatgagctccttcaccgccgccgcgacctcctctcgtgtcaccaccccgtcgccgtcgccgggcgtagcgcaaccccgaccacctccgttaggatgaccgcgttcaccttctgctccacgtacagtggcaccaccatcggcatgccggcggcacgctctccagcgccgagttccacccgtagtgcgacacgaacgccaccatcgccgggtgtgacagcacgcgcacctgcggcgcccatgacgcgacggcgaggccccggcccctcgtcctctccaagaacccatcgggaaggcacgccagtgggtcgtcgtcgttgcggtggtccgttccgaagtcgtaggagtaggactcgccgtcgtggctcggcatgcgcacgacccagaggaacctgtggccgctcatctccagcccggcggcgagctcgcgggtctgctcaacggacaggatgccgccgctcccgaaggagacgaacaccaccgaccctgccggctggcgatccagccactccaagcacgccgactcaccggccttgtcggagcttgaccggacgaacggacccaccgggtaaaccggcgggaacgcgccttgcttcgccgccttcttgaattcttcgacgatggtgtgctccatctcggcgaagctgttcaccaagaatccatccgctcgccggtatcgccgtacctcttcgaggatctaccaaaacacggggttggacctatcgaggtatccgtccggcatgtcggcgacgcggatcgtcatgtccccagcgagacggagggggtccggcaggtctagcttcgtcgcgggcgctgcctccgccgccgcactcgcctcctccgcagaaaagagggaataggccggtggcggtagagaggaaagaggtgaccggcaagctcggtcgagctccgccgcctcgagggcctctcaacgggaggaggaagagggggaccgggaagccgccgacgaaagatggggaaggggagaggcgcgccggtcggcgtcgccaccggtgggtctgccgcaaaggaggcacgccgatgtcgtgctcaacctcctctccctctctcccgccgccgctctgctccactctaccggcggccgcgcgcttgcccacttgctacggtcgctcaccaccgcccgctccactccgcctgccacgcgcttgcccgttgcccctcgccgcgggcactttgctccacttcaccggccgtcgccgccgttgcctcctccgccgcgctcgctgcctccgccgtcgccgaccgcccgtccccgcaccgtcctcgccgtgcacgcagcgcgagccgagagagagaggagagagggggggaagaagagaagagtatggcaggcgggtcccacaattttttattaaagaaacgctgactggattgccacgtgtgcgccacgttggacaaaaccgctctgaattggttcgagggggtaattcatccggtttgcatagttaggggtaaagaatgtccggttttgtggttcaggggtgtaattcggacgactgcgatagttggaggggtaattcgtactttttcaaaaaaaaaagacaagctagattggattaatcatctaaaggccacaaacaactaacattgggtcttcatgagagaagggatggatgacaataactctacttggtggggttgacattatcaaattactatattatcaaattactattgagagtatataaaccatgacagttggaatcgtaataattggctgtagctcgtttgagtaaaggctgggatattatattccatcttttagatacttaattaagctttgagaatttctcaaaatctaagtaagcagtgacgttttttctcctttccaatccatgattttaattcagtgagaatcgctaaactgagggcatgcgtttggctcctggttgactttataatcctagccaaattttaaaattagaattaatttatatagtttccccccctttttcagtagccaaatttaaaaattagaatctactccctctattctataatataaggcacaaccacttttcttagatgttctaaatataaggcatgcatacaagcatataattaattatggcatcttctctatttaattattactttttaaaatcctccactctcatgttatctaatcctattggatgcatgcattatatttattagaatgatccaaactacaagatgataataattatttcttggtatttgggttaagagtggttgtgacttatattttggaatggagggagtaattagttttagaactaattaggattttttttccctgttttcagtcctatatgtactgtgcatctcccgtttaggaaaaatgggggtttcgatggtcatgtaggaaatctccgttcaggtgttcagagttcagacgtttgttgacggacaagcggacgtcgatctgggccgtcaacagccagatggacgtccagaactcctcaaggccgtaccctgtgacgtaggcggtgactaagcgggaccttagcttccccaacgcgtgcggcaccgccgtcctgtagcccaccgtgcggaaccaaacaaatcaatccagcatataagctgttatacaaagcttcccaaacacagccaaggccacatcgagcagcgtcgtacaaaccaaagcccctctagactaacaagttaaaaatacagtttgtcaacggtgcaaacaatggcttcacatcgatgagaccaattggcatatgctaataatacatagcagaaataaatttaaacttcaaatccacaagaaaaaaattgcatctctcttacgaggagtatatatatatatatatatatatatatatatatatatatatatatatatatatatatatataattgttgcatatacatgcattagaaaatgtactcatccgtgtgtgtataaatatgggctgtgcaggcgccagaggaagacgcccaagctaatcagctaattaacccgatcacatctagctagctaactaagagtaattaggggctaattagtttcaaagtgaagtgaggcgatatggagggagagaagaagagcgtggtgctgatcaactgcgcggtgagcatgtacggcaaccgcgtccgcatcgcgctggcgaggaagggcgtggcgtacgaggagaagccggagaacctcgccgccaagagcgccctgctcctctcctccaaccccgtccacggccaggtccccgtcctcctcgtcggcggcaagccggtgtgcgagtccctcgtcatcctcgagttcatcgacgaggagttcgccggcgtcggcgagccgctgctgcccgcggggccctacgagcgcgcccaggccaggttctgggcgtcctacatcgacgccaagctggcgccgtgcgccgggagggtgtggcggtcgccggcgggcgccgcgggcgcggcggcggtggaggcggcgaggggcgagctggtggcggcgatgcggacgcttgaggcggagctcggcgggaggaggtacttcggcggcggcggcgaggcgctgggctacgtggacgtggcgctggcgccgttcacggcgtggttcgcgacgtacgagcggttcggcgggttcagcgtggcggcggagtgcccggagctggcggcgtgggcggcacggtgcgtccgggagaacgcgtgcgtggcggcgtcgctgccggatcccgagttcgtgtaccagttcgcatgcggcatgaggaagcacttcggcctcgacggctgagatcaaaatgagctcgccggcgccgcgattggccggccggtgcaaataagcgaaaccatcgcgcgtgcatgcatgcctgcatgggaaactatcatttccccgttttcgcggcaaggtctttggctatttttgtgtgcttcgcttgcgtgtgtactccctccgtctcaaaaactaataaatgaatcgaatatcacatagtataacgaatctgactatagatttgttatacatgttctagttaatcttagattggttttgtgggacggagagtacatgcgtgtgttttttttcgcaatagctttttatgtgccttttaatttgcttggcgattcgacattgacatatcgatgtgtgtgtttcttttgtggtggtgtgtgggcgtggcgatcgactgcaattcctgagttttgtcctaggtgaaatgttgtctgcttgcgtggatgctgtttttggagtttaaagtgctctgaatatgctgtaatgtacttctgtatgtgtgctgtattcagaggtggggaaaaaatatcgtgctatgtatgtcgttgttttcctttcacagaataaaagtggagtacacaagttgttacgttattgctaccgactattcatgcgtagtactcccaattattgatagcaaacaaaagtaccaaacaacggccaaagtatagtattgttgcattgtcaatatgttactgaattcagatcagcttggcagttagcacttttttttttttgggttgctggcattgtagctgtaacctgtaggggaaaaaaattctctggggcagggccgcagctcccacaccatgaggccccactgtagatgttagccacgtggatgagcacgaatcttggaacagtttcatcttctttctcttctccccccatctcccgtatttccgacctcctcccgggtcccggcggcgtccacgcaatcagcagttcagcacggcaacatcattaatcttaaaagatagaagtaaaatctattacttgcatatttcttcaccgtgatgatcgatttccattgctagctgctttgctgcttccctcccttcccatttctctattgcacggaatctcactagccatggctaatcaaggcaggacttttctcaacgttcatatttgatgtatgcatttttgaggaaggaggctaggagcagcacagaagatgcatcccaggtcgcacgtctccaggcccgtagatcgatctgatcacgcaccggcagggcggtagtccggaaccacaacgcgatcctaaaatcccagcaaccctagtgtaggttagtggcggcgatgcctacaaattcctgtgacgagatgggaggggcagagaaaggtgagcgaccgacagaagcaactcggcgaccgtggcggaaagtagcatcgacgccgccgggaggaggtcgggaatacgggagatggggggagaagaagaaagaagatgaaactgttccaagattcgtgctcatccacgtggctaacatctacagtggggcctcatggggtgggagctgcggccctgccccagagaatttttttccgcctgtaggtccttcgattcggaaggtagcaaatcaaatcactgacgggtgaccgcctaagtactactctatttggcccacacaaacaaggcccaaacaagagcacatacggcctgttggaagtggattttgatccattgagggaaggaataagttttatttgatccacctatttgtcccccaggactactttcatcccattatcacaaaaccggatacaaattatccctgatcttactaaaccgagcagaaaaagtccctcactattgctgatcccggattttatattacgtggcgcctacccacatctcttttaattaggtttaacaccatatgggcttgacctaacgcttacatgccatatgataccttgccaataatgcatacacttaggacacacatttacggtttcacataatattatttgaatgggtgcgaccctatgcggagccacagttcgtccacatactcagccattcgacttgttgtttttcatatacaccgtatacaacaagtatgccagtacaaacaggttgcattccacatggactcttgttggaacctgatccaacaggtgaaatatgctggataaatagttacgtttacaggactctgcatatcctgagaactaaacggagaaggtttactaacactacataattttcacggaattcatgcgatggtaataaggtgacaggaaagtgctggactattctatggag

SEQ ID NO: 16905 - DNA, 751 bp, Oryza sativa
  unsure (1)..(751): unsure at all n locations
cgattgactggttagctttataagcatcttgttgagctttgtctacgttttcttgtgtttctctaacgtcatcgtttagtttatacgtatctgtatagtcacgtagacgtaaaccatttagccaagatttttcacctgttgtatcacggttcaacaagaatccaagttgaataaaacctgtttctactgggataatcgttgtattagcaaactcagaagagccactaatcaaatggctgtacttggtgtacgtagtaggtacttgtatatttacgtgaccattcaaatacaaatatgtggagccgtcagaagttgggctaagtgtatgccctactgggaaaatcccatctgaactatttgggtttgcaactgcccatggcttgtttaacgtaatcttgttagctgtggtgtcaactgcaccaatatcatatgtcctcatctgcattagctgactatacgttccatcgggataagtatagccgaacgagtttttataaccccacatgataatactacgttggtagtcttgcggtgcctgtccgttccatagactaacatcttctacaaaaacctctgtatccccgactttaagtggttttgctagttttgtaaatttaacaggggtagtagagttgtagtttcgtcccccaagagaagggtacgtaatacggttaccatctacgtcatatggggcaatcatagcatagcttctacctactcctgatagacgcttccaaatgnatccacccag

SEQ ID NO: 16906 - DNA, 764 bp, Oryza sativa
  unsure (1)..(764): unsure at all n locations
cgctgtggatcagtattcgctnctactgcagngcaattcctcgagcaatttcctcgtcactggcgctccaatcgcctcgatgggcttctcctccagatacagctgcagatcctgggcgggcacaccgttgagcgtcacctcgtagtgcagattgcactcgttgtcaatggacatccaggccatgccgacggcatgtggattctgtgcatccgtgtgctcctgtcgcttcagcagaatgggttccgccgagtcccgagcatcggccactggacggggcactaggcggccacggatcaggctcgtctcatgctcggtggccacattaacgcccagttcgccggcatacagcgactcgaggaccttgggacccaacttctccacactaccaatggcctggttgaagttgaagctcggcgtcagatcctccagcttggccttccgcttgccctgctcctcaatcaaactgatgttgggcctatcccgggtgttcacgtgctccgtttcgatgttgtaggccagagatccatcggtgttcaagtagacccacgccaaaccgctgctcttggtcgaggattcggcactgtgcggcgccagcagggtctggaagatttcgcagctggctcgggtcacgatgtgtccctggatgcgcagatgtgggtacttcttggactcacggtcagcangagtttgccacgcgacatcagtcgaagattctgtatggaaatgggcgacgacagctccaggacattgatctcngcagaagg

SEQ ID NO: 16907 - DNA, 4111 bp, Oryza sativa
  unsure (1)..(4111): unsure at all n locations
cgcctcaccccttgaangtcgatggcgnntcccgcagaagnncatcattcctcacaaagctgtttcgattttgatccagtggagagggctgctgtcggagaagctgaaggtcgaagtggatggtctgaaggactcattgcttgccagtatttgggcgtcaggaccaaactagtgcgttaatttttgctgtgtggttctttgtgagttccttactggcttgttagcgctgtgccagcagcaccttaatagaagtgaagttgagttttcagcacatcatctcaagctggcttccccagcggttacccttgtatctgcactcttatgcttgatagtaagctgggcctttcggccttttctctaaaaaaaaaatcttggttctcaaaatgaactgggaaatgattacatgctatataaataatcatatagtatttgaaaggaaatgctaagagtatcctgaaactgaccggatatttgggttgtcaaagagtgcaaccaatttccgtttatctggttttattgtcttcgcatttcctccatacagataacgcctgtgccccatcagaaaatgaggaaagttgctttcttgagtcgtcacaaactcttcgctctgcagacagaccgtgtagtccagtgctgccagtctagatgagtgcccctgatagagcataggtaggtgtctgagttgaaggaagtcgcatggagataaaaatggtttctaatccaattgttgtctgatcctcgaattaaacaaggatttcagatgcttgatggacagtaaatgataagatacacaaatgactaatccaaacaatggagtaccttgaactgtgcaagttcctcaggtgaagcgagagtatcttttgtctgtaaaagtggaaacaactggagaagaggagtcatatacttttcagcgttgtatattttaccagaggcaacatagagggaggtagtattgccaaatcccatgccctgcagcatcattccaacctgcataaactaaaccagtaagaactagcaatttatactattccataaaccagactccagagcataaaatttttaatgctttaatgcttttggcaaatcagcttactaaaatacgtctgaaatttgtgttggcatttttaatctgaaaaacgttacatagatgacatctagcactgcatattgtgccagcgatggaattgcctgtgggatgttattttgcatgaatgcacacccctcactctcccctgggtgcaactgaaccgcccaacaaattatagcctgagaagcatgacatgaaaacactaaaagagagcaggctagcaacaagaacatactcaaaagcattgcggcaggggcaaacttcccaacctctaaaggagttaaagggcacttcccattcctcctatttgcctcaggatttatcactcgaccaggtcggtgaaacttccctctccaactcctttcacgagcattttccatttcaatactctccctccagccaccatcatatatgcagcacgaaaaggctagcatatcttgaacaaaggggcataaacatcataaaacttagtgagctgaaaaaagaaatgcttagtagctaaaagagctattgcggtagaacctcttcaaagcgaaggtgcacggaaatgtacttcccaccagttaaagaactcatcttgatcattcggtcaaccatatttgttccaagcattcttatgggttcagaaaatctcaacgcctcatagttagcaaaacacctcaacgcctggatattcggtggaaccgaatgggccaatctgtttgagaaaggagcaatacgcacagtcctggcacagaaagcgagtgaagctatggtactacagaacacccttagttgcaaggatatgatgcagcatcaagggaaggaagaagaggagcacggaccctagctccaacaattttggaagcaccttttgtaggtagtagctttcagatgagaaggctttggtcctcatatttggtatcatgctgatattgtgatcaaaattcacaaatgcatcttcaggaagttttttgacaacccttatgtattttttgagcgacccaataaagtgatcttcatcaaagatatcaccaaatttgctgaaagcaataaaacgacacaagaaagaattatcctccagaaactgatgcgtgaaaactagcatatttttctgtgagttttcttcgcattttcttggactgttatttccatgctgcatttatatcagttgaaactgggatcgatctcacaattaaattaatttaaatggcactttgcttaaaagttcaaacacatatcagtatattacatagcatgagggtaaaaaaaaaaaagaggggagaccaaatgctacagcaaaataacattttttactcaatcaaattttgtgagcttcgatagaaatggaactggcaaaaacagcatctttaattagcaaagattgaaaggacaaattggagctaacagaggtctatgattaacaataaacaaaaccagaaagctagaatacatttctgaagtggaagtacaagataaatggcaaacagaggatgattgacggcacaaaaggacagggcatgccaagaaatatacttatgttaatattgcgaagaaaagaaaaggaaactaaaactgttccacttcacagttccagctaaaaaagaatgactatgctgtaaatgacaaactagtaacagaagtgaattttgctagttctctgaaggagaacgaggggaacatatgccataattcagtttatgcagacacatctggtattctaccagtaaatggagatagttacctagaatcacgccacacgctgttcaaatgaaaagctggggtgacaagagttgcattgagtaagcttgccacagcaacagcatcgcagatctgtatcgagacatttattgagatgctagaaaaaaatttacagaactttaaagatcaagattagtggtacattaattcattttcaatagttatgagctcctcatgaattgtgtggaagatagggaaagacgtgtaacaaaatggtaaataacatgttacagaacaaaagttcaaaatgtgtatatatgggatatcatataagaatttcggtatccttcattccatcaatgcttcagactgctatgatatatgtaacagaaatcataaggtttcttatcatagagcattcagaataaatttcagtaatactgaagatttgtttagtaaaaataaggatgtctctgaacttgtagacacaagactaaatgagtaaatgtatctacttggacgatttatgctgagggtaaaaacaatccagcaacttacagaaatgcgttgttgattcagaccaccatttgcttcgattatgagaaaaccatttgaaggtggtaactctgaaaagtgtgatgaggactatcagtattttttttgacaggtatgtggactatcagtataaagtgcataaccgagttttctgtcactgtctatgaatctatgatgacataaaagttaaaatccccagcagctttcgacttgggcaactctggtgtataaacttgtaaagagcgtttcaagttcacacctgatcgtctcaacttcttggtgatacaaggagcccatcgttttccagattttttgttttgtggtgtcattagctgcacaatgacaagacaatttatgttatataatatatagagttaaaaattagatctaaactgtttcaaaaaaaatctaaatgaaaaacaggtaaacactaaaaacacattacatgaccaagaacaacaacaaaaaggagtaaacactaaacagtatgaacatttgtaggtagtttagccaaatcaaaggcattgcaaccactgagaggatataaattgcacaaaccaatcaaagaactgagaggaaggtgctattttcactcgaatactgagaggaagccaagaactacaccccaaatggaatgccggtaacagatcgggcattacagttccccacggaacgagccaagaaacgcgcgcgctgggtgttccagcagctatccagggtcccaggtcactcaccgggtgcgggcggnaggtgatgngtnntgcagtacgagacgtacctcatgacgcg

SEQ ID NO: 16908 - DNA, 1254 bp, Oryza sativa
  unsure (1)..(1254): unsure at all n locations
cgcgcacccttgaccattgangtggagtcgcgcctgactgcaagncgntcatcacggaacctgtcgcggtcgtgcatccacgaggtggcggtgcccaagggctacgccgcggccaaggacgaggcggtgcacgggacgctctcgagcccggccttccatggcgagatggccaaggcctacccgttccagctcgaccccttccagagcgtctccatcgcctgcctcgagcgcaacgagtcggtgctcgtctccgcccacacctcggcggggaagaccgccattgccgagtacgccatcgccatgtcgttccgggacaagcagagggtcatatacacctcccctctcaaggccctgagcaaccagaagtacagggagctcagccaggagttctccgatgtcggattgatgaccggcgatgtcacgctgcagccgaacgcgacttgcctcgtcatgaccacggagatcctcagggcaatgctctacagggggtccgaggtgatcaaggaggttgcctgggttatctttgatgagatccactacatgaaggatcgcgagcgcggggtcgtgtgggaggagagtataatcttcctgccacctgccatcaagatggtgttcctctctgccaccatgtcgaacgcgaccgagtttgccgagtggatatgcaatctgcacaagcaaccttgtcatgtggtgtatactgacttcaggccgacaccgttacagcactatgtgttcccgattggcggctccggtctctaccttgtagtagatgaggatggccaattcagagaggataattttttaagctgcaagacacgttcacaaagcaaagtaatcaagtggatggaagaaagggtggtggacctaaagccagtggtcgaatagcaaagggcgaaagtgcctctggaaattcggacatatacagaatcgtcaaggtaggcatccactgacatttgttaatgcctgatgtattatggccttaatgggctcctgaatttaccataattttagtgttttttcccctgaaatatgctttgctttatcctaatgcaaagttgactatgttaaagactaggcaatgtttgcatatcgcttgtagatattcactcttcagatattgatgtttgatttgacattaacattaaaattttagatccttacttaattggatgaattctatctgcagatgattatggaacggaagtttcaaccggtgntggngtncagtgcagtcgtntatccctngagggccaa

SEQ ID NO: 16909 - DNA, 1258 bp, Oryza sativa
  unsure (1)..(1258): unsure at all n locations
gggccctnatgatggctttcgtggccagagnnataaaccggtctaattttagctttagcagaagagaatgtgaacaccatgccatgtcaatgtcaaaacttgacttcaacactgatgaagaaaaagataacatcgaacaggttttcagcagtgctattctatgtttaagtgaggaagatagaggtttgcctgctatagagttgatgttgcctcttcttaaacgaggtattgcagttcaccattctggattgcttccattaattaaagagctggtggagttgctcttccaagaaggccttgtaaaagctctctttgctactgaaacagtatgcccttatacctgatcattgcacttagtgttaaacttgttttattcttcacacataatatagtatggaattactatcctttgatttttgtaagttgtaaactagggacagctagggaacttttgttttgcacttcctgcattgcatctttcatcattcaatcaacagatgatctttatgtttcctccctcagtttgccatgggactgaatatgcctgcaaaaaccgttgtgttcacgtctgtcaaaaaatgggatggtgatactaaccgctatattgcttctggagaatatatacaggtaaatcgacatacgaaagtgcaattcatgcatatacttgaaattagttgaggaaatgaactacaatcccttcttactatataataattttgtgtgcactgcatttgtagatgagtggaagagctggtcggcgtggcaaggatatacgtggaatttgtgttataatgatagatgaaaaagtaagagcctacagtttcctgttataattatctttatttttcttaaatacaatttaagtaccttcctagatattcatgccaggaggtttagtgcatatttgttgactcaaataattcatcatgctattcttgataaaatgaaacttttaaaagataccaagaaaatacatatttggcccaatgcatcgtgattctgcagctgtctttcttggttcagttagcacaataaaatatgtgaaactgataactgacatactgctttactttgtttcctaattcaagtaaatgctatgtcatttgtagtaatccttctgattgtttatcacttttcatcttcaattcttttgtttatttcaactgttgtcggcatgcaaataacattaattaactaaagccagcatgatccaagttatgttttttgaaataattggacattcacatccaaatatagt

SEQ ID NO: 16910 - DNA, 2029 bp, Oryza sativa
  unsure (1)..(2029): unsure at all n locations
ctggtcatgttgagtgattttcgntaccgcagncgnncaacatggaaaatgaagctaccttacttgattcttctggagaggtatgttatttttatttatattagtgcattacacattttattcttccattgatactgacagtactgacacttgcccctgtatagactgatcttgcagaatatcataaattggggcttgatatatcggaacttgaaaagaaaatcatgtcggagatgattagaccagagagggctttgttatacttggttcctggaaggctggtacgttacacttataacctcataggttctgttccttaagaatgatttggatatatcatcagctatcaccattgtatttgtcttatgagaaacagaagggataatatatctacttctattttcatcgtttcctctgtgtactgttcctttgtttccactaagcaatttgcttcattgcaggttaaagtgagagatggttcaacagactggggatggggtgtggttgtaaatgtggttaagaaacctccacaatctggtactctccctcttgcactaagtgcatctcgtggtaataactatatagtggataccctgcttcactgttcttctagttcgaacgagaatggatcccgttcaaagccattgccaccacgcccaggggagaagggagaaatgcatgtggtgagttgaatttcacagataaatattttattgtggtcaacaaacaaaactttgttctgtagtgataattaggtgatgatcgtttaaggaaggacccaaaatttttggaatttgataaatgtaaggtatttgcaggtgcctgtaccactacctttattatctggtctaagcagtgttagaatcaacattcctcctgatctacgaccacctgaagcaagacaaaatatactttttgcagtgcaagagctgggaaagcggtacccccaaggtcttccaaagctagatccaatcaaagtatggttaacatttttgttatctttccttcggaagtaccattttaggttagcagctgaaaattacagagaatttaatatctgaaaaatgttgcatgatggtttagctgtatatgtgcacaacactctcggtgattttttttctccttttggatgccttgatcagctaactccctccaacacatacgctagggttgttattactatttctttctgcaatacattgtcgatgcatgatgcataggcagagcatacactagttctgtaatacctgtagaatcttcagctgcatattctacgctgacatatccgcatagatgcagactattgatggcttgttttgccctacccttgcaattttgctgtcaattgagctggtctattttcatgtataaaaatatatgctctggcatcatcaaacaatttgaaatcctgttctattccgtattcactctggtattctgacataattgataggacatgggtcttcaagaacctgaactagtggagttggttcataagcttgatgatcttgagcagaaactgtgttctcatccacttcataaggtactccaagtcacttatcagtcaagaaatttcttgtcacttagagattttgactgattattttgtgttgatattgtctcttagtctgatcaaagtgagcagcaactgtcatggtatcaaagaaaagctgagctaaatcatgaaattcaaatgctaaagtcaaagatgcgggattcgcaggtaggttgaatctttgcatgcttggttatttttaaacgctaaatgtgttcttactttttcctccattcagctacaaaaatttagagatgagcttaggaatcggtcccgtgttctgaagatgcttggtcacattgatgctgatggtgtgctccagctgaaaggacgtgctgcctgtttaatagacacaggggatgagctgcttatcactgaacttatgtttaatggtaccagtctaatatgattatctttgttcagttttgatganctgcttgcagtcaagcgcgaatcaaanntcaaggggcgcgg

SEQ ID NO: 16911 - DNA, 4084 bp, Oryza sativa
  unsure (1)..(4084): unsure at all n locations
gctggtattaggatgactacactcaanccncctcagaaatgtcgaatcaacttgtaggccctacctgatggatgtcatatactgttggtcaaaggtttgtcagcactatacaatccctgatgttggaaatcttgtactccgtttattttattggaaatttgttgatcgtcctctgtcaattggttctttatcttattgaatctccctatcactgtattgatattctctaatttccttagttatgtttaattgcttaattttctccatacagggggccacttttggagaggtgatagaaatgactgacatttttgaaggaagtatcatacggctggctagaagactggatgaatttctgaatcaggtatagcatcctatttatgctgctgctgccatagtgtcatcctattttacctccttttttgctgttagtacctaattcacttagacaatctgaacatctacccatcgattatggcatcttatgttcaattgcatgcaaataagaagtgcaattctggtatggaatgcccacaaaagtgtcgtgtgacattatggcctactcattgaagtcccagttcgaatgtctaaattatttcacggcaccagaaaggctaaactaggttcatacttagtttttataccctagtttcatgaatttggttcagtacaagtagttgtagtcttgcagatgatgtgaggatgacatttgcttatgccttgaaagcatcattaatagacacagcagtgttgccatcgtgtatttttaagaaaaaaaatctcaacatacaacctcacgatttgcgtacactcttttctagtcatatcatagataatgtgctgttctgcagttctcttcctcacaagcatgcaactgattggaatttggatgaacggtgattgatcattaacaaatcaacaacctaaaaagcgcatcattttcccatctgaactctgagccaactaactctgaatatgttatgacagttgaaagctgctgctcaagctgttggtgaggttaaccttgagaacaagttcggagcggccagcgacagcttacgtcggggtatcatgttcgccaactcattgtatctgtgatgaaggtccagcagttgtaacgccgtatgttagcaaagcaaatgtagttattctttttgagaaggcatgaaatgtaacccatatatcagtagaaccctgtaggtttttaggaggtaagctctctgcattagcagcccgtaggtaacgcaatttcatcagcagatcagaggcaatctggtatgcaaaaaacattttgatatatcatgttacctgtaggttttgaggcctgatgattgatatatgatgatgtgcttatgagaatttgtatgcttgttaacatacgagccagagattttgcttattcatgatacccttttttggggatgtttcttatttgccagcgacaaatcagtactatcacttatttacccttctcttatttatccacatgttattgagaggacaggagatgtataagggaacacgccaattttcagaggcaaatacacattttgggcttgtttgactcatagacattcatagccttgccaatttgtttggcaatggcattcctttgctttgctaacaaagttgcatttgccgttcaattaagccaaataatttggctacaaaccaaacaaactctatacttttctcgagtcgtttattcaaatgcttcttccaaaagttactgcccaatggtaatttaatactagctaccagtaaactaatccagaagaatattcttccaaaagtcgctcacaggctgtagtaactgaatcaagcagcagcaataatcgaatatctgagcaactaacttcaaaacatgtagtccgggagagaagaaacagctacagagaaagtaagatgctgggagattacacagcaaactaaacagctctggactacttttaagagagttctaaagacaaaattgttcttgcactacagattacatgagaaaaatggatacagattattctttttttctataatgatacataagtgatggacaataagaggccttttcccatcacattttatctccaaagaatgctcctgagcaaaactaatggcccagaaatgccaacaattttcaaagttacaagtgtggtggtgtggcttggcaaaatcaaccgttgacatatgcgcccagtttcttcttcacaaatgtaccattttttccacaactctgtatagcttgatcaacaatttggtatgctgattcagatgggggttatttaccagccgatagcatcttttgaagctgaatcacctgctgttgttgctctactggcaacgaactaagctgctcaggtgtcagttgtaggacttgctgcagaagaaccgacttaacatcgggtgtgagcttgaacaagacaagaacaactttattttgtagcgcatgaaaattatcatagtgttcagagattcggggcaattcaatgcaattccacaaaaatgaaaacaaccgtttagaacttcacataagtcatgtctcttaagattgtcaacagttcctcatactgaacaatcaaattctaaaaggataaaataacaataaacaccgggagattaaattatagggagtacctgaggcacttcgttctctggctgctggaagctaacagcagcagaattatagctccctgatggtccaccagggagcattccttgggatggagcaggataaacagctggattgttgtttacaattccaggtgtggatgttccatcctccaattttcgcaactttggatgatgagcaaactccgtcgaacgatttgcttgctcaggaaacctcatttccttctgtgctatatcaggtatagcaggtacctgtaattgggccgtactgagttggcatgtgcgggtaattaaatgaaaagtgcatattgtctacagcttgtgcctcataacttggaataacaatttagttcatctatggcatcgacaatgcctagctaagtaacttgtgctgtttgagcataaaggttcccagaggctctgcattggttatctcaaatatttggtttatcataaattaacacaaagttgattgaattacaaaggttcctttataagtgaagatcaagtcatgggtagcatgtgcatcagccaatggtagttgctgcatacccgctggcatagtaggtgtcctagggtgatgtggaataaatgggggctgttcatgcgatatcaggcttcctgaggtagcgaggtctagaggagcaacactgtaacaggcaccaaggagttgagatacaattggaggatgtatgcccaccccagactgacttccatgtggaaatattgtgcccgcaggctgagatgaatgcggatactgaggaaaattatgcagctgtgcagaagggtcctgcaggacatttgggtttggcaagcttgcagaaggtcttggaacacttgatatcatagcatctggctgtggaaatggttcgcttatgtgagatgatgattgtgccaaggagctagagggctgttggctctttgccatctgcatctgtgatttgaataaaacatcggttatctgtatgttacagaatcaaagaatacattgggtaccacaagctcagaagaaaatcagactataccatctggggcgtcaccattccaagcattatttgtgactgcattataagaagggagaaaaatgaaaccattaggcttttaatctcttattccaattctagatttagaactgaacgatgtgcaaataatccagtcaataatctgaaaataaccaagactaagaagtattctaatgtataaaaatgaaccaattacaaaatcagctcataacaaacaataagcagttgattaagtacaaaatcaatattagcaaaagttaacctgaaatagggcctttgacagctgtggaattccttgcagcagattgttggcaacatccttattttgactagttaaggactgccataaaaaaaatacattaataaactgcaattggtgcttgggcatttctaatatttaagaaacaatagtgcttaagaattcaagataaccttca

SEQ ID NO: 16912 - DNA, 2333 bp, Oryza sativa
caatagaatctctagcaaacccaatccgatctcaaggaatcctataaatcaataatattcattgttaaaagcatgcactaactacattaccgtattgaagctagctaatatctaatacacaatgtttatagtagtatattgaaagttttctgcatatagtgatatcaaacaataccactgcattataatctccagataattagaacaaaaacccacactgacatgtacaacaatgtataaattgcgctatttttcaagtcacacatcagtcaactgtatccagctgcgaacttgtgatgcacattttcttagtgtgctcattgacatttggcaacagaagattggtccacttatatcagcattagtcactggtatgggatggattcaaaggctggtgttgatagcatctcagaagattaagaatatttttgtgccagtgcagtagaaaaccaaaagaaactgtaaacccttctgcacatacataaaggtctcatttggaatttcctggttcatgcggaaattgaattatttctttgtgaaattccctgcatatcaaatggttctaaaaattcaattgggtactgtttcagcactcaattctactagcagtttcatctttttgctcaagtatatcgcataaggtgaaactacagatgcatctttcctagtgactactattcttcttttgctatttattcagaacacttttggcgaagctcttccaatgaagatatatggttttgctaggcaacaaacagcctttggcagacggattccataaataaaaggagatgtgacaacagagatattcttttttataaatggagatgccaaagataatgcgccataccagaatgataatttcacgagataaattggcagatatagcacgtgtgtgtatgtacagccaggcagctgtacatacatacacatgcttgaaacaaaagtgaaacatacgacacatggtggttggagaaaacactactattatcattcatgggaaccaaagcaatacaagctcttatcttaacataggaattggaagttgagaaatgtgtttcttctacagtagaaactgaggatcttcgactttttctctgtttctgtcagcattcctcccattttcagcaaaatcaacacgtaactgacggccattaatttcataaccttaaaggttccggcgtgcacttagagcagtctcctcatccttgtactcacaaaacccataaccctttggcttccctgtttctttatcaataaccaatctgcaaagcaccaaatgtttaagagcttatgagtagtcgaaactatcttaccacgtgttaccagattaaaaaacacttgcagctgctaggaaacttggcacattcctatgttcagagttatcagcgatattagtagcaccatgtagttcagccattaaacttcaattagcgattatttttaaatgtgcacggtataatgttatttcatagaaaaaaaagtgtgccaagcattatgtccataccagataccactgacccctgaactccttattatgtaaggagaataaaaggcatgaagttatttttaaaaacagacactagcaaaactttagtatccaacacacgtctgtctgaatcaaatccaaatatttgcagaacctatttagcttaactctaaccatcctaaacaccaattccacacacacacaattttgagggtttgtgcagtacaattaaacctgaatgagaccacagggccgacttcctcgcaaatctgcacgagctgctcctccgtcgcatcgtaaggaatgttcccgactgcaaccaaaattcaacaaccaacaaacgcatccgtcaatcgaaagggcacgagcagtaaaccctagaccaaaccaaattggtcaaacactaaaccctccccaaatctagcaccgcaaccgagcaaaacgcgcttcattttcctcctcactctcatcgacccacacccaaacgaagaacgaacaatcccactacggatcgaggagagcgaggcggctaggctagaaatcagccgaggcccaaatcgacgggaaggagccgagccgcctttgctctctctctactccgcaccccacgcacaccgtgagctccctccccggagctcagctcaggatcgaaccatgccgaagacggcgagagggaagcggggggtagggggcccgtaccgaagacgcagcggttcttggcgccggcgggggccgcggcggccatgctcgttagcagaggtcgccggcggcagggccgcggaagcggggcggcagcatccgcggcgcggcgttcggggtggcgacgcgggagatcgatgtgggg

SEQ ID NO: 16913 - DNA, 7602 bp, Oryza sativa
  unsure (1)..(7602): unsure at all n locations
tggggnnntaagctccgatcacttgtcagnagcncatcaattaatttgtgctaatctttcgccatttcaaaccaaacaaaattcgtacgtattgcgcatgtttcttactccctccgttttaaaatatttgacaccgttgactttttagcacatgtttgaccgctcgtcttattcaaaattttttgtgaaatatgttaactatatgtgtacatgaaagtatatttaataataaatcaaatgatatgaaaagaataaataattatttaaattttttgaataagacaattggtcaaacacgtacttaaaaagtcaacggtgtcaaacattttgaaacggagggagtatatgtgccactgcgcaattataccaactaagaatctccaaaaactctgatctcaactggaacatcattacaacctctgtaccaccactgaacatcacaaataaactctttgctgaacaaaacgagatggagaaatgggtagagaaaagttatgctctttatcacagaggaatttgttcgatctgtttgcttaaattcgatcggatttggaacctgaaaatcgatcgagaacaaaagctttacaacgatggcaacatggtgggacaaaggtacgcgctggttacctgcaaaattaggtagggtcggccagtcaggggagtattatcttttacgcacaccaccgaacctctacagatgatcatggccagaaaaactactcccaagatcatcaattgtagagtacatagcttgacagacagatcagcactgaaagccttggttggtagtcatacaggtcaatcatgttttcatggctgcaggcaacttctttcctatggctttcaccttggcaaacgagtcactgttaagattagttcttttgagctttttgggctgaccagtgctttgttttctactagcatgcttttttaactgataaacaatatttttaaaagaaattgtttacaagtttctttaaagaattaaatagatatttttttaaaacacttaattaattatatgctaatagctttctcggctttttttttctcaatgagctctaaagaactcagcataatcggtggaaacttctgtcagggaactttcaccgtgccactgagtcactctcatgtctgaaaattctgaatctctctctctctccctgtcttgttcttagcttctcttccttgacacaggaaactaataattcaagtatatatgcatccctctcacacatacacacacactaatgtgccaatgacaaacaaacacatctgtcctctgagacagctctaaatataacttgtttggagtgactttatctgacctgttgtatttggactagtccttataattgcattctgattcttccaatgtgtaagaagagaggaattaattcctacgggtgaagttgataattctgacgcaactaacttactagtactgtgttaatgtatacgcaagcagagattaataatatgaaaaactccgtactgtgttaattacaactccttaattctgcgagtgtaaatttagctgcaagcaagagtccatcatgtgcactctctgaccgtgcatgagtaggtacaggaccgtgcatgagtaattggactaatttatttacgttttgcttaaatctgggagctttcgtaataacaaatctctgaaatagtaaggagagaaaaaaaattgatataattaactggttcaataaaaactctcattataaaaaaaaacaaaattaggaagaacgaatctgtgttggtgaagttggttatctgcaaaaggcagatcaattatttctctccttatcatattactgttgttatacccaccaaacctgaagatgataaaatataggaacacactagaagaaccaagatgcatatcgacaaacagtgactacagatctgcaatgcagtgatgacacgttgacaccacgaccttaattttaatttctcaattattaaaatcttcaggtggcatatctataacttggatgattaattcaatatatctataataatgaaaccagttgatcaaaatgtaattaagcaggccaatcaccactgcatattgttaactccttttctgaaatcctgcatgaataatgttctcttcagtgtcaccaccatccaaccacccccaatgtctgaagaatcttagctagtcgcagtcagtctgccttaacaccgactactcccagttttcaggtacaaacaattcacatgcttaacattcttccctgctactatcagcctgtcactaacaataattaatagttgcttactaaataaatattacagcactataaagtatagcttgcttaattagctaatgagatgtgcacgcgtaatgcaatttactaacctgacgagtccacgctaaaaaagggtaacttcttggtggtagtggcatgaattgtactactgacactactagtgtactattaaggactaatcacctcattagtctatacacattctccgttttctaatgtgtgacgttaattatcgatttctgaacatagaattttactatttatcttgctaaaagaactatataagcattatttcttttgttgcgacttgttttataccacatccatcccaaaatattaggatttttagggttgaacacaattattaacaaaacagatagaattaaatagggaagattgtgattggatgcaagtgaagataagtgaggaaattgatttgtggagtgttgtaattagttgggaagagaacatggataaagatgttgttatatttttaaataaactttgaagactaaacgttactattttaggacgaatgaaatacacggctcaagtatatatgacttatattttctatatatttgtacttattttattttaaataagatgaatgatgaattgttaggtgttgacaatgtctcattaaaaacgaagggagtatttataatagaaaaaaagacagaataattaaacagagaaatgctaactataggctaattaaggagatgctaaatataggttaaatcaaggagatggctacttcacataccaaccccattagaaaagggaaaaagctctaccacgtgcatgctgcttcatcacttcatctcctacaccaaccactcccatcgcattatatccattgcttccctttcatcttaaatacttcatctgtcccacgaaaactcaacctaagaaaaaatatgatctcttttaatataacaaatttggataactaagatgtgccacatctccttctaagttaagttttttttaggacggaaggagtacagcagtagtagctacattaattatatattagcagcactcatcctctcactagctcctccttcagcttgctcgatcagctcaagctccagctgcagccatggcgaaggcggctctccagctgcttctgttactgtgcgtggcggcggtggcgtgggcgatggacgacggcggcggcggcggcgccgggatgacaaagatcaaggtgtactggcacgacgtggtggcggggccgaacccgacggcgatccgggtggcgcaggcggcgtcgacgaacgcgtcgtcgacctacttcggcgcggtggtggccatcgacgacccgctgacgagctctccggcggcggcggcggcgggggaggtggtggggcgcgcgcaggggacgtacacgttcgccgaccagagggtgatcggcctcctgatgaacatgaatttggtgttcaccgcgggcgaccacaacggcaccagcttggcgatcatggggcggaacgaggtaatgtcgccggtgaggaagatgagcgtcgtcggcggctccggcaagttccgcatggcgagggggtacgccgaggcccgcaccgtcgactccggcttcaagtccggcgagaccatcgtcgagtacaccctcttcgtcaaggcgtagctagaagatgatgagcgacatacataagcacatttatgtttgttaaacatcgtttgttgttgtaacatgcttgatttatcgattgtttatcaagcttacaataagataagcagctccgacttgctacgacggatcttaacctaaacagttgacttcactgaccaagaaagccccaaaggatcacataggagacagcttaatcggaagctttaagaggaaaagaggtccagccactacagtagtccagatcaacagtgacaggcccaaaacatcacctctgacggatttaacctttgtcaaagatgagtggtcagtgttgtctcctctcgcctctaacgggtggaggcatcctttagtgatgactatcatatgtgacgggtcgtaaaatttcactcatcacatgtgacagatcgtaaaatttcacccgtcacaggtgatattgttctctaacggactacatattatcacccatcaatgagctgcttaatagggaaaaaaatcagttcacatgttagcacccgtcacttatatgcactaatgtgaaaaagcaaaaaataaaaagttaatccttgttcatcgttgtcgtatcaacacagtgtcaaaaaactacaaacagaaaggaatcaatcatttggatctctcactgcaaactaaatgcaataaaatctcttgcggaaaaaaacatggaagatctcgatcatcacaatcacataatctcacatctcacatgaggaaccataagaaatttctgtggaaacaatactcttcggaaggggctcataaggtagacaagacctaggatggccgataggggctcgcatggctagatctggcagcttgccgacaaggattgcaactagccgccaggacctcctcctccaccgctaccaccatccgtcgtggtcttttgcaagttgaacaacaagcttggagggggcaggtggagcttggggtggaagaggcggtagccagagctcgaggatggacaggcgtccactggctcttgggggcaaaggagacgatgatcgtggcagccagagcttgaggtagaggcgtagggacgggggtgctcgtgggtgggagagatcacatgaccaataccggatccagccactacggtgttgggggcggtcaaatccagtgtccccccgacctcctgacctcaaggaggctggatatggcacccctgtggctcgatgaagaaggtggtggtgtcggtgccaaaccgagcttgtaggtgaagaggttaccgccggcgcttgggggcggccgaagctcaaggtgaaggtggtggcgatgctcgtgagtggagagaaaactcaaccaacgccgaatcgacccaccacgaggttggggccgatcagatctggcgtccccccacctggggacgccggatctggcatccctagggctcgaggatggtgtcgatagtgacaacgatggtggctgcacatactaaaaatttcttacaaatttcttagtaacaaaaatcccatacaaacttctttctaacaaaaaatcttaaccatttgatttagtcaactgaaaattgtaaaaaataataatcaagatttaaccgtaatgtgatacctcaatgtctgtaaaaagttcaaaagtgtactacctccattttagattataagactttctagcattgtccatattcatgtctagattaattaatgcatatataaatgtgggcaatactagaaagtcttataatctgaaaatatctagattcattaacacctatataaatgtgggcaatatttgaaagtcttataatctaaaatgaaagaagtagtacacatatcgttgcccgtctaattcatagacagttaatctaagttgcctcaagagcaacagctcccaatctgcaggtacaaactacacatctgcttccctgtacaaagtagcttatactactacaattagtatagtacaagaaagtaggttaattagttagctgacgagttgggcacgcatgagctcattaactaacctcatgacagcccacgctacaaaaggtcacttcttggtggtagtagctggccttcactatacggaactcccagtactaatatactaggactaatcacctcattagtctggacattaattaggtatattagttaattattaataaattaattaagcagaaaacttaattgccaaatttatactccctccgtactaaatgtttgacgccgttaacctttttaaacatgtttgaccgttcatcttattaaaaaaaatttaagtaattattaattatttttcctattatttgatttattgttaaatatacttttatgcatatatatagttttacatatttcacaaaaattttggaataagacgaacgataaatatattttaaaaagtcaacggtgataaatatttagcaatgaagtgagtactataattaagtactgcttggccaccacttctcacctcacctaccgaccccattagaaaaggcaacctgcatatgcttgctctgccacatccactctatctcactgaatttcatcatctcctacaccaaccactctccaatctccatttcttgcttcataagtactcgatctctcactagctctagctacctcctccctcctcctcatcttgctcagctccggccatggcggcgtcaccggctttcctcgttcttgccgtgcttctgtgcgcggtcgctgtggtggcgctggcggcggacgagggtgccgcggggatgaccaagttcaaggtgtactttcacgacgtggtgggcgggacgaaaccgacggcgatcagggtggcgcatgcggcgttgacgaacggctcctccacctttttttgcgccgtggtggccatcgacgacccgctgacgaccgacgcggcgtcgtcctcgtcggaggtggggcgcgcccaggggagctacacgttcgccgaccagaagacgttcggcctcctcatgaacatgaacttcgcgttcaccgccggcgaccacaaggggagcaccctcgccatcgtcggccggaacgaggtgctctcggcggtgagggagatgagcatcgtcggcggctcccgcaagttccgcatggcgaggggctacgtcgaggcccgcaccgtctactccggcgccaacttcggcgagaccatcggcgagtacaccgtcttcgtcaaggcgttgagaagagagatctacctgcaaattaaaacgctactggcaattattgagcgccgtgtttgtacgtgcttaattaattgattaggcttttcattccgagtgcattaaatattgtttatcatcatctttggttgattttccgattgggtttcagttgatctaattggagggcgaatcgattttggttgaataaattgaataggtcgatttataagtgtttggtagagtacggaattaactaattaattagctagtcaatggaagaacaattcaaggtgggagtaggaatactaataaacttattaagagtaatagaattattgaagaatacttcaatggagtaggattcgattcgttgggttgtccgtgtccagattcttttgtgggggggggggggggggggttcacttttttaatccccaatttttcggatcctcggtatatagcctggctctgttatctggggccctttgttcattcgtcacttccatcctctccttccc

SEQ ID NO: 16914 - DNA, 2317 bp, Oryza sativa
  unsure (1)..(2317): unsure at all n locations
cctttccccatggtatcagagctctgatccgttccttgcgatcagtctccaatggcgttgtcgtctagctcgacgaactccatatcactttcaggcccccttgatcacaaagaagctcgggaagccaaatcatgccctttggaaggtacaaatcagtgctgccgtcagaggagcacggcttcaaggccatctgactggtgcgacgaagaagccaccggcgaagatcagcgtcacggtagatggcgccacaaacaagacggcgaacccggtgtacgacgactgggaagccactgatcaacaagttctgggcttccttctctcgtccttgacgagggatgtgctcatgcaggtttcaacctgtgaaactgcagccgaggcttggagcgccattgaggggatgtattccactcatactcgcgccaggtgcatcaacacgcgcttcgctctcaccaacacgaagaaaggtaacatgacaactcctgagtatttcgctaaaatgaaatctctaggagatgagatggcaattgctggaggccgccccatcgatgaggaagaattgatccagtatatcatcactggactcggagaaggctacagtgaggtcatctcagctatctgcgcaagggtagagcccatctctgtaagtgatctgtattcataggttctcaacttcgaagcacgacaagccatttatagtggaacgcaagaggtcaatcttgcgaaccgcggcaacttcagccaaggtgggcacagcgacaacagcagccgtggccgcggcaatccgggaggtggtcgtggtcgcggcaacccaggaggaggacgaggtcgcggtcgcacgtctggaggaggcgttgacaagaggcccatctgtcaattgtgcttcaaacgaggacacacaactaccgactgctggtgtaggtatgatgaagattttgtccctaacaataagcatgttgcaacagcggctaccagctcctatggtgtagacacaaattggtacatcgacatgggtgccactgatcatattactggggagctggacaagcttactgtcaaggaaaaatacaacggaggagaacaaattcacaccgcaagcggagcaggtatggatataagccacattggtcatactgttgttcattcccctagtagaaatattcatctaaagaatattttatatgttccacaaaccaagaaaagtctcatttctgtacaccgcttagtagatgataactcagctttccttgaattacatcgtgattatttctttcttaaggatcgaatcaccaggagaacgcttcttagtgggaggtcttggcgccgactctatcccttgccgcaatcatccttgaaggaagcctacaatgtcgtgaaaccctcactagagcggtggcatagtcgtttgggtcatccatctatccctattgttaaacaagtcgtcaataaatttagccttccttgtttagatgcttcaaatgagtcagtttgtaatgcttgtcaacaagcaaagagtcatcaattaccttttcctgtgtcaacaagtgtctctcagcatcctttagaacttgttttttttatgtatggggccctgctccagaatctgttgggagaaagaaatattatgttagttttattgatgacttcagtaaatttacttggatctatcttttacagtacaaatctcaagtgcttgaaaagtttcaagaatttcaggccatggtagaacgtacatttgatagaaaaatcttggctatgcaaactgactggggaggtgaatatcagtctctcaattctttctttactaaaatcgggatagttcatcatgtatcatgtcctcatacacatcaacagaacgggtctgctgaacgcaaacaccgtcatatagttgaagtagctctctctcttttgtctcatgcgactatgcctttaaaattttgggatgaagctgtgcaggctgccacctatctcatcaacagagttcctagcagagttatccaaaatatgagtcctcttgaaaaattgcatcatcagaaacctgattacacctccttgagagtgcttggttgtgcctgctggccaaatctccgtccctacaataaccataaactccaatttcgatctaagcggtgtgtcttccttgggtttagtaatatgcacaaagggttcaagtgcttagaggtgtccactggccgtgtctatatttctcgtaatgttgtttttgatgaaacaatatttcctttttctgagcttcatgccaatgccggcgctcgtcttaggtctgntgnngnngtgtcccgatgttcgtacttnntacccc

SEQ ID NO: 16915 - DNA, 1835 bp, Oryza sativa
  unsure (1)..(1835): unsure at all n locations
acgcccatgagtggattccccnnctactgcaagnagntcatcagtgcctcaggaccacgttagacctcgcatcaggttgcaaagtggggttcgcaaagaaaaggtatacactgatggcactattaaatacaaaaactcctggtttactgagtctggtgaacctactactgatatagaagcattaaaggataaaaattggaaactagcaatggatgctgaatatgaagctctagtaaagaataaaacctgacacctagttccacctcagagagggaagaatgtcataggttgtaagtgggtttataaaattaagaggaaagctgatggtactctagacagatataaagctagactagtagcaaaaggttttaagcaaagatatggcattgactatgaggatacctttagtctagttgttaaagctgctaccattagaattattttgtctttagctgtgtctagaggatggagtcttagacagctagatgtacaaaatgctttccttcatggttatcttgaagaagaagtgtatatgcaacaaccacctggatttgaggatccaactaaaccacagtttgtctataaacttgacaaggccctatatggactaaaacaggctcctcgagcatggtttgcaaggttaagtaaaaagttgactgatcttggttttagtggttccaaggctgataccttgttgttctttctgaatagaggtggtgtcactatatttgttctagtatatgttgatgacattattgtagccagttcttcagagagggcaactgcagctctgcttcaagacctgaaaggggagtttgccctaaaagatctaggtgagttgcattattttcttggtatagaagtgagcaaggttgagaatggtattgtcttgacacaagacaaatatgccaatgatctattgaaaagggttggtatgtcagattgcaaacattcaaacactcctatgacagtaagtgataaactctctctgcatgaaggatctcttttgggagatagtgatgctacccagtataggagtatcgttggtgctcttcaatatttaacccttactagacctgacatagccttttctgttaacaaagtctgtcaattattgcatgcacctacaactgtacattgggtagcagttaaaaggatacttaggtatctcaaacaatgtacatgtttaggacttaagatccataagtcaggttctactctagttagtggtttctctgatgcggattgggctggtagtttggatgacaggagatccacaggtgggtttgctgtgtttctggggtcaaatctagtatcttggagtgctagaaaacaagccacggtatctagatccagcacaaaatctgagtacaaggcaattgcaaatgcaacagcagaaattatgtgggtacaaactcttcttgcagaattggggattaaaagtcctcaagcagcaatgatctggtgcgataatcttggagcaaaatatttatcagcaaatccggtgtttcatgctagaactaaacatattgaagtagactatcacttcgtcagagaaagggtaagtcataaacttttagagattgattttgtttcctctggtgatcaagttgcagatggttttacatatccgttgtcagaatggttcctggncnggtggtgnngtncaaaggagntagtcaatncaccgacatggggggggggagagttagtgtatatcccgagacatataggaaaacagaccgtttatatataaccgcgtcactntttattataaacgtgtcatttgtagatcacacaccactgtttatgtaacggaccacttattaacatag

SEQ ID NO: 16916 - DNA, 12363 bp, Oryza sativa
  unsure (1)..(12363): unsure at all n locations
tcctcatgtccctgtagttaatagatttcacgtagttgcggctacgcattgcaatgcccaaccttcttcattaaagtaatttgatagaaaggtgtgaagatgtgtagactagcggcctatttaggagagaccagtggcggagcgaggataaaattatagtggtggcttctcaatcttttgggccttataacaatctcaaacaaagtctattttagcccccttacaatagatatatggatttaaattttagggggggtcttaatggggctctaatggtttattaggggtagggggtctaaagatccccagcccccacgctgccttcgtcactgggagatacgagaattctaagaagttttgggcaagaatctagataagcctgattttttagtttttggctacgaatttttttctagattctgtagctacatttgagaatctgaactatatatttgatgagaaaagtcgaagatactaataccctagctagaatctcatatcaatatattgtgggctcttagacattgtcccttcacgatgtagacaaaggagcgaaggaggaactgggaaccggtggtcatccttccccacacgagctggccacatcatctttcatgtgtatatgtcgattctccatatggtcggcaagcaaatcgcttgcacttacatcatataggttgttgcctcgtacagtcacactccctccgtcccataaaaattcaacctaagacgagatattcgttgtactggaaaacgtcgttactcgttttagattgaatttttataggagggacggagagaatatatttctattaatgcttgttcattgtcattaagtacggatcgatctaacgtagtgtggtaattaaaatttgtacgcgtgactaaaagggcattcgcgcaggcgtatttgcaactgcctgtaaccgaaatgactgaaaatgttctattttcaatggtggaaaacaaaacttgtatgcaaattaaaataaacttctagaggcgacttcttaaggtaatcacaaagcagcagttgtttttcgtcttgacttcttgcgtgctaaagtattttgacatggatatctatcgtgttctgtcgattcgttccagttcattgtttcagctaaggtgtcagcgtagttgcagtgacattgttatgctttcttccctgcatggagtacatgtacatcacttcctttttcatttctgaactttgtccctctctttctctgtgcttgggttggaaggtgatcagattcagtctccttaatctttgcattttcatggcaccattaaaaaaaaggaggaacactaaatcaagctagatcgatctgtcggcatgtagctatgtagctcattcatgcatgaacttgggtactactaattgggaatttgttgttgcgtgcatatcatcagtgcatgcattttcgatcgatcgagatctagataaagatcatcgaacacaaaagctagctgcgcatcttttaatttttgcgtgcatttagctagctagtactagtatcgataaagatcatcgagacataaaagataattggtgtaacttttttttaagataatgggaaagggtttctagcatttacttcatcagaaattatagccaaattatttcaaagttagcaaaactttcgtctacatcactaaaaaaattaagtccagcataattcgaataattcgaatgacaagacattattaaaataaataatattgccaaatcttcattcgtaaaatgtttcgtgaccattgtttcaaagaccacttttattttcttaataatgaaaatggattatatcgtctccaacttctataatacacagccataaaggacaacgacttgcatgcgtgttgtatctgtactcttcacacttctacaacagggcttagaatcaaatctaatatgttcccctgtagagagtaatatatatgatttattaatagaagatcgagttaccataaacatttcattctgacttaaccaaataattaactggtgtaataatgaactaattaaagctatttagctgatggatatgcatgacagcttgttcagatgatccatcgagatcaggcgagatcaaaattaaagctactactgtagtaagcagcagtacgttgagcatgggctatgtgtcccagcttctcccctctttagcaagattggacgcgtccatggccggcagccatacatctgtacatttgttctagcccagcagcttcctgatgatcagatcatagatgatcgatcacttgttgacagttgacacgtgtacaatacaatattgaacaaaaaaagaacctacacgttgcacagtagtccgatcaaatcgatcaggcgtgtgcatgcatatgattgatgccgattgagatgaaatgaatttgacatttggaatgttgatttgctgatgatgatcagtctgcttttgatttggattctggtatatcctgatcatccatctagaaaagaaattaaagatgtttgtacatatgggcgggcctaaagacacttgtaaaaaaaacatcaataatccaaaccggtctatcactgtcggttcatataaatcgccatcaggttaaattgttggctttagattgaattaaccagctgaatgaatatatggtgatcgattttgaagcatcagtactgctggttcaagccagttatgagctgaagaattctacaacccaatgccatgggcaaacaatatctatcatttgtacgaagtgagcgtagctcaactagtttgcatggttttccttgtggtgcaactagcaccaagactcaagttctatatttaacacgggtgctcgtatttaaggttaactatatttcagtggtagacaacatactcgtcaacagcgagacgcctatgatgatttcgtcaatctcaagatataccggcatagtcttctcgagatgctcacagagataggatgtgcgtgtgtgatgacttcgtcaattttaaaatatgccggcacagttttgtggaggtgctcataggggcaaggtgtgcgtgtgtatttatagggacgagcgtacgcatattatgaatgtctgcgtttgtattgtgtttttaaaataacctatcattgttactataatcagaattaataaatatttgccctaatatataggacagagctaatggtttggaactggtatgattaaatcctggatgcattaattaacgttatctgcaatgatagaacagaatgaattggaacaatttctggtggtattaaagacattttacagtttttaagaggtaagacatctgatacctgaggtactgatgatagatatcatttttttaaaaaaaaagtacctccttctaaagaagtatacaatcacgtgctggtggatacttcctccattccaaaatatccaaaatataaagcataaccacttctaacccaaagactaagaaaataattaatatcatcttgtagtttggatcatcctaacagatacaatgcatgcatccaatagaattagagaacatgagaatggaggatttaaaaagtaataatttaatggataagaggtaatagttaatggcctacatgcatgcataccttatattatgaaacatgtaaaaaagtggttgtgtcttatattacagaatggagagagtaatttcttactatggatgaagttctcgtcatcgtgtgtgtgtgtgtaaaatgaagcatcgcccaccgtttcaccgataatcatatatgtatatatatggtcactgagagcacaaatgaacataacttaatttaatttgctactttccttgtgatatctttttttggcgatatagtgcttctgaaatacagcacctggatggatggaaaatgttgatgcatataaattaaaatttttcttttacaacgagagtacacacaaatattttgttcctgtgccgggcccatatatatacatatatatacatatacatatatatatatatatacatatatatatacatatacatatatatacatatacatatatatatatatacatatatatatatatatatatatatatatatacatgtatatttcatatatatcacaagtctagcttcatttgggcatagacataattcagcagtgggcgtctacgcataagaatattagatcattggtcccatccaaagaggatgcactatcaaggagaggccagcagcaaccaagttttttttgtggacaaaagttgcaaacgtatatttgggatggatggccatgcatgcatatatgacagcaaagtgtcctaataggcagatcatcttcgatctgtccttccaactcgttatggaatcatgttcttgcttgaccattaatccaaacatatatatgcctaggttgtagctagctaatgctctgtgtaattatatatttcttggtgatcatcattttcaaaatgatcatgagcatcatataggcacaaaatatatagtaccaatgcatgcatgtttcctttgtttatatatgcccatggctttgtcctgtgctagcttcagttactttttctaatggcatgctttaattaaggccctatttagatcttccctcaaaatttttcaccatgttacatcgaacgtttgaacacctacataaattattaaatatatactaaaaaataactaattacacagattgcgactaatttgcaagatgaatcttttaagcctaattgctctatgatttgacaatgtggtgctacagtaaacatttactagtgacagattaattaggcttaataaattcgtctcgcggtttactgacggattctataattagttttttattagtgcccgaacacccatgcgacaccctatataataccttatgtgacacgccaaaactttacgcccctggagctaaacaccccctaatatgtgttgcatgtgtgttaatttctagttgtctttagtacatcatcattgatggtggtgtgtttaattagtttctagtaagaagcttccatctttggggaataaagtggcatatatatgaaagctaagaaggcattgatcttcaaaaaaagaggctaagatagagaaagacaccgtccgattgttctactccatgcatatataggagatcatataagttctattcctctagggttctgaagaatcaactaggttagcttaattatacgtacatatgccctggtccctctgtttgctaagcatatacattaaaaaggcacatctgactttggtctcctccattgaacatttgtactggccattaatataatttgaaggtatctaggtgtagttgggttttttttcttattggtattggatacacaatttgatccattagatccaaaatccaaataatctgaccaatcatcccctcaacacatataaagctccctggaaattaccttaatttcaattactaaatatatcttactaataagaaatcaatactatgtatttcagtgtctactaagcaaatggttcttcaaactgattactgaacaggttgtttggcaagagaagaaaatatttgaaaaaacactcaattactcaagtagggtcaaaacaaggagattctcattttttttgtcgggtcttgtgaaagctaaagataaatccttacttctggaaattgggtagtaaataggggcgaataagtaagatcttgggggatgtttgggttgggaatttccaactctatatatcatttttcgtaagagaaatgtctcgatcgcaactgttatgaattttgttccgcttaatgtttcttttaggagaacgttggttggtcagaactgaattaactggtataatttaattgtcttgattttgtatactagtttgaatggatctaatgattctttcaaatggaatcttcatcagaatagaattttctgttagatcaatatatttatctttgattaataatggttttattgagaggaacaagtttatatggaaattaaaggttccaattaagattaataacttttgtggtttttgttcaaaaagttgtgatctaaccaaggataatttagcgagaagaaattggaatgggagtcaaagatatttttgtttgtataatgagactattcaacattttttttaatgtcatattgcaaaaatttctttggagaatagtttatatttcctttggactgaaaccccctgatagtatatctaatatggttggaaattggcttagtggtgttgagtcaaaaactaagaatctcatatttgttggagcttctgctttatgttgggctctatggttaagtagaaattaatgatgtttttgataaatctccaactaaatcttatatgcaagtgttctgcagggcaactttctggctccggttctaggcacaacttcaaaagtgtgaagagaacaaggagctcctattttctacatgtcgaaacttagaagttacagtcatgcatattttcgccgactacggatggagattcacaaatagatttcaataattgtttactccttatgtttggctttattatctaagttattttgttgcctgaatgtttgctctttttgagagaatataattggttgtagtttctttgaagcaatggccagatttaatcctattattttaaagaaaagtattcaagaatactagaaagatatgagttaattaaatcttttacctttaacggcaatataatactaaaagaaatagcagaaatgtataggaagaccggccattatctttagtcccgagtgaaataactgggattaaaaattcatctttactcccggttggactgaagatggacaggggccacgtcttttttcttttatttattggttttttgctgcatgtatctattcccccatccaaatcaacacaaatcatccacaacaaaattatccacaaatcatgcacaacaaaatcatccacaatacatacacatccacaatataccaatcaatcacaaatcatccccaaatcaaaaaaaaatctcctgcaaaatatacaaatcattccctacaaataattcacaaaaaaaaatccatagtcgccctttgcgcccgccgccgccggggcggccctccgcacgcgatggccaccgctgcacggctgcatcccctcccagatccggcggaggggaggccgctgcccttcacgcctgccgccatggggggtagcccaccacaccggccgccgcttggcgcggccccgcacgccacagccgccgtcaggcgcagccccatcggctcttcgtgacttagaggcagagaggggaggagcaggaggaggaggagggagaggggtagaggaggagtggaggagggaggaggaggagatgagataaggaggggagagaggggcgctgcgcgtgaggagataagggagagagagaacgcgcgtcgtgtgggccgagagagatatttagtcccggtttgtattatcaaccaggattaaagttctatatttagtcccggctggtagcaccaactaggattaaagttcattgggggccttccaactattaattcgggactagaaatgatcgatttttagtcctggttggttaagatcaaaaagtagcgctcggctttttaaccaggactaaaaaatatttttttagtcccggttttttaagcaaccaggataattatggaatttggtcgaccgacaaaatatggtttctctagtagtgtagtgataagatcagcttgagatagcttatggtgtatcaaagacaagacaataaattaaaaagctcacatggtggttggatgcattattgttttttttatattggaaatggtaactggatgcgttattgttaatagacattcatgcttttctgatagaacatgcctactcacagtatcccaacaactaatcaaggcacttaatcccaagccatacaagctaacgtctactcctccgtcccaaaataatctaatctagtacttgctaggtcaattttttttagaacggagaaagtatatatcgtctcacaaatttcaatctctgaaagcatttaaagcatccattagaaccatttggcatctctgagctagcgttcatagaacttggcttggttagactaagtacatatcgtatcatgtgagatatgcatgcatcgatcggtgggcttatttatatacatgtcattaatatttatgagagttcttgcaactaacattttgggtgaatttactatcatattaattactctctcagtttctaaatacatgagagtttgtcctaaacgtcacatataaaaacgaagagactaatttgatgttagggtttgtaatttacaaaacataaagttccacgcatggcaatcatagaagaattcgatgtgtcaacgatttcgcgctctataaaatagggagaaaatcaggaagaaaataaaggtggcatggtgactcccgaacgatcatgattgtgcacgtcatatttaatttcctcctccaatttgttggatgtagagtttttaattactgtattttcatgcaaccagattaatttgcactctctcctgtcctgaatatttgactttaagaaaaacattttatcaacattttaaaacattaaaatcaatagcttctgaaatgcttcgttaaaataaaaggaaaaatcgtatacatggatttgccttgaaaagtagtactatgtattaaacttattagatttattctaatgtagaattgatggtcagagttcgaatggtttgatggaatcatgtttgcaactgtcaaatagtattaattatcagagggactataacacccccactatatattttatatatccatccaaacatatgcttttgttggtgtgtacttaagttattacaccctaaaaggtagagattccaaagaaatcaaatgcttgcatgtcattggcaccggccacttggtcaatgttttcatgttctcttatggttcactcaaaaaatcagcactaatagttccggacaaccttctctacttgtcattaaaagctgccagaaagttctgggcctcttgccaagaagttccgggctctatatttaactgctaaaattttaagtaattttcagaaacatatattcaacccttaggtgatatctccgggtttcagaaacaaggggacatcatatccccttgagagaaaaaaaaacatctacccacactggggtggatctatccgggtctagggtagttagagttcaagccataggcctagaacccaaactctatgcaaattccatttaaatatcagaaaatcttaggaatttgtagagagtttggataagatcaatagaactgagcctatgtacccacatgcctgcatgtatgtaagcaaggacttatttttttttctttttgtcttcagtcgttggctacctaattaaacttattggaggatcacatcgcaaaacctaatcgatcagctgtttataacgaatttgttcgtcaatattccacacttccacaggatagctagctaggacgaaaaaccaggagctattaggcatcaaaccagaatttgttgtacatgctttcttccctcctggacgtattcttgagatcctaattaaagacatatattctaagctacattattgtggatgaatcggcaacgtgcagtttatatttttgaccagatggtattcatgtccattgtacatctccaactttagaaagatcacgctgactgaagtagctgaaccaatatgcaaatattgtaggaaagcgatagagagtgtaaaaaaatcgtataataaatctggtcgtcggctacattattcaaacatgcatacaaattaatgtatgcatgtcaactccagccaatagtttgtcagccatatatatatataccgttaaagaaaacggcttgctcatcatcatcatcaatcgtagactttgtcatatactctctccatccctaaatatttgacaccattaactttttttaaatatgattgaccgttcgtcttattgaaaaaatttaagtaattattaattattttcctatcatttgattcattttaaatatacttttatgtatacatatagttttacatatttcataaaagtttttaaataagacgaacggtcaaacatgtttaaaaaaatcaatggcgtcaaatattttacatatagttttacatatttcataaaagtttttaaataagacgaacggtcaaacatgtttaaaaaaatcaatggcgtcaaatatttagggacggagggagtatatgttgcaagtagtattcgtttaatatatataataatccccctttaggtcacacaaaaaacattatagatttaagatcagagaatgctggccaccgttaattaattgatatatatctgcatatgccgttctacatttcatatttaatttgaatatagttatatatgctctcaagttgatctggacccatgcggcatatatacaatgttccaacacactctcagtcatcaacatgtactaaaagaatattcaagacttaccctaatcacatgcatgcatgtctctctctaatttgatactaatctgatcaccttttgcgctatctaacacgctacacattcttaacatatagctaaacaggtgcatgcacacatgaaattcaactatataagtatatatctttggccacttgaattggaagaattggaagcattgtcaccttgtggctgtacgtttatatatacacgtgttcgatcatatattccatacacggatacactgtacatgtgtgctgcacccacattcatatatataggtagatattacatatgcattgatcacacaacacacatgtatctcttgtagctttcattttcgtactaggtgcaaatcctcatctgtaaagaaaggtagcatttttaaaaagggatcgaattaaattaaaaaggttggagatcgatggagatggaatttcgtcccatgaggggatgtcgtccctcgcttcttcaagtcatggcatgttctccaaatagtaccaaatagagttcaatgtgttgtttgtgttacaactcatataaatcggatttgaacttgtattcatataaatcggatttgaacttgtatcgttcttgagtgatatattacatataaaccgatttacatacctgattaactttttaaaattaaattataaccgtttagattatatgcaagaaactatatatatgacatctcttaaggagcaaaattattttcccatcgatggatatgaaagcactcagtttgtcggtataaatagctatcagcgtcaaactatccgttaggaaagacatttgccgacacgcagtctaccaccagcatctacgagggatctacagcagtcgggaaaagtttttaccggcagaatgatccaaatatatatcactgatctgcatcatatcgtacctgatactgttcgaaaaggccggcatctatctatctatctaactgcagctgaatgatccgatgcagctgcagctggtatatatcgagcacctaaacccacttcgatctgcaacttgcagggaggcaccatattcgattataaatttcgttttattcgatcgatcgatcaagagagagcattagcacatgcaggcacgcgtaaacgtttcagatggcgacgatcgaagacgacgacgacgacgatgatgatcgatcagttgctctgctgctaatgctgatcagttgatcgatcgatctttcctatcactttcgcatgcagagaattaataaagtttagttgagatcgatcgaatcgttttatgttgttgttgttttcttcggtttggaattgattaaagtagtatcagtactaatcgatcgcctgatgtattgctggagatttttgttgttttggcgttcatcctctgtgggagaaatttataaaggactgatcgatcacaaaagtgaaagtcggtcgtcaattaattaattaattaatccttgttgatctcacatgcagtttgagattaagcttgcatgtgtgtgctagctattaaaaataaaacaaaagacttacttgcatcagggtttcccttactaccggttatcgtgatacgggcttaccgtcagaataagatcacggaaaatgcccgataattaacccagctaattaagttcaaagagaaattgcccccggttttcctcttttagtggnntttgtctgnttttntgaatgttttctcccttcccttgttnctgntctgtnntgnngtgcntagncagtnnatncatncaatcccaggggggtgcggcgtgnaatgaatacacagagaaataatatttatccatctccaacgctatatcataactaataacagaatagataacacgtacattcacgaaaaaacaacattaacgcctactanattataaca

SEQ ID NO: 16917 - DNA, 4591 bp, Oryza sativa
  unsure (1)..(4591): unsure at all n locations
tttgaatatttagggatgaagggagtgctttaaatgtttctaccagaagagagtaattaatactcctgccattctataatataaggcacaaccacttttctaaaggttcccataatataaggcatacatgcaagcatgtatttaactatgacatctttntcctttaaacttatactttttttaaatcattcactctcatgctatctaatcttattggatgcatgcattatatttattagaatgatccaaactccaagatgataataattttttcttggtttttgggttaatggtggttgtgccttatattttggaatggaggaagtatatttaataaaatagtttggcgtaatcaaatgacatatcaaatgtcatgactaacgttgagaaaaagaatgggacatatatcatcaatatcaaaccatctaggaattaatattttatccatgaataagtttaggtaaattgatcaaagaccacgccatactcggccggactcacatgtaaaccccataacttagtggaacattatcctccctatcatgcacgaggttttccttatggttttggtgagggttattggcttatcgctattcagtggtaaccgcatggttatcgtgaaaaccatgaggttattgttagaagccatgagaggttttaaataccttggtaatcgtgataatcgtgagattctgcagtcatagtaatgtatatttattgcatgtattgacctttcatacaagagttttgttggtacaatgttatatcctatattattcactatggttaatcgctatgctacactcagagtataatataaagtaaatgtaaggatttagtcaatgatacggtggatgttctccaatactttatcattttatttgcacttaagaaatgtttagattcgtcactgagcatgtcaacgacacacaaagagatgttatagataaaaagttaaaaaaaaccgtgagccatatataacccatattaggatcaccagatccaacaattaattattagataaaaatattccacattaaaatctcaagtaccatccaacccttcggcaagtaaaaagctaatccactttatctaccatcttaaacttattagtcgacgagctacaatatatttcaccgaccgacaaacttataaagaaaaaacggtggatggcgcgcgcgcacgagtcgagcacgagcaccactatgcacccttcgtcacagaagatccggtgcccccaatggtagtagtagcagctgctgctgctgctgctgctgctgcttgctgatgccaccacgctaaacacacccccaaaaaataaaaagaaaaaagaaaataaaaaggaaaaaaaaaggaaacgaagcagagcattcacggtgtgcactgcagagtgcagagcatcgcaccgctctcccgccaaaaaaaaaaaagctggtgggcccacccctccactcgccctcctcttcccgccacgtgccccctctccaccctttccacccagtgacgtggccctcataaccttcgcccataaatacccctcccccttgccttgctcctcctcggcctccactccaccaccacctgctccgccattctcgccgatcagttcatccgatccactgctttgcttgcttgcttctgctaggtttgattgcttcgtgtttgattgcgcggtgagatgcctccgaatggccaggacttgcatggcggcggccgccgcggtgtagtcgtgctacctcctcctccttcgtctccggcgacgccgcactcgccctcgccgtcgccgccgccgtccaagatggactgcttcttgtcctccgtctgcacgccgctcaatctccaggtacatatcgatcgatggtacggatagatgctgctctgtgtggttgaggtgattgattgatctttggttggatggatgcttgatgatgtgctcagttcatcgacgtggcgtaccgggtcaaggtgtcgaccacggcggcggcggcgaagggggcgccgccggggaggatatcgcacgccgggggaacaggtggtggcggtggcgcgcaggaggagaggacgatactgaaggggatcaccggcgaggcgaggccgggggaggtgctggcggtgctgggcccatcggggagcggcaagtggacgctgctctccatcctcggcgaccgcctcgccggtcgccacgccgggacggtgctggcgggcgggcgctcgccgtgccgcgccgtgcagcggcgcacggggttcgtggcgcaggacgacgtgcttcatccccacctcatcgtacgcgagacgctcctcttatgcgccatgcttcgtcttccggacttcttactcgtagtcgtcaaggccgccgccgccgaggccgtgatcgccgagctggggctcgcgccgtgcgccgacaccatcgtcggcaacgcgttcgtccgcggcgtgtcggggggcgagcggaagcgcgtcagcatcgggcacgagctgcttgtgaacccgagcctcctcgtcctcgacgagcccacctccggcctcgacttcaccgccgccgcgcgcctngtcgncacgctctcgtcgctggcgcgcaggggccccaccgtcgtcatgtccgtccaccagccgtccacccgcgtctaccgcatgttcgactccgtcctcctccttgccgaggggacctgcctctacttgggcgccggccgcgacgccatggactacttcgccgccgtcggcttctcgccggccttccacgtcaacccccccgacttcatgctcgaccttgccaacggtaattaacccaaaacactaattatactctattattattactttcttactttattcaacaaaagcagggaaaaaatcaggaaacataaatttcactaaatttgctcaatttgaatgaggatcaaattaggcaagttataaatcaagggattatcttttaattgggtgtagtagatatgaatggtgaggattagaccaatgatcacaaaggagacaagtaaacacacctggagagtaagtgtggagtgcacccaagaaaaagttcatgcaagagaggagataaaagttttttgaagggagaaaaaaaaagaaagagtggatggaggtgagtgccctagccttctcaccttcataccttttgtgcaaagcactttatggttgaaagatcacacacccaactcaactggacacctgtcatggatggaggagagtggaattagggcactatctaccttaccttaccagcatcagtggggctggaccgctgctggacatcactcatatcgggcccgaacccgctaccggtaaacccgctagcccggtcaccgaacggcggccgggctagcgggtaatgtcatattggatatccattctgtttccaccaatcttgttggttgtggtggctgcagaagatgatgagatccgacactagtggcagctttcagttggatctggttcctttgctagcttaattagtagttagcttgggcagcttttttttaagtatgagaattagcagcttctcttttaccttgggatcaagcaaaatcaatggagcatatgggcatgatatgcagtgtggatatggttccaagtgcctgtctcactagactaagaaaattatgctcccccctggctcatggtgatggcactttagacagaaggaatcatttttttggtaccaatacttctccttttggaagggtagagagctaagctatccccctttttggcccctcctttggcacctggccacttaagtaagtgccttgtagccagtctagcatatcaaagcaatggggcagagagagagagagagagagagagggtgtctccatgatccgattatatcgaggtcaaccgcgtcgtggcacgattgggtctaccgatccctaggtggagggggagcggcgttcatggcccgatcaaggtcccgtttggcagaactcctactcgtttggaagccatatcgtgcactatcagcttgggagttgggaatacacataaactgcaaaatgcgcagaaaaacaatttaaagaaaataaaaaacaaaaaacaaaaaggaaaataatgaatggatggaattttcaggagtgattattttccattgtgcctacctttatttgatctttttctgattgttactacattgttaagaaattatgatcaatcatcctacttatgatctttgacactgaacatttctgctctgttttttttctatgcaggattcgctcaaacagagtatgataattgcaacgcagccgatggcggcaacgtgaagcagtcgctgatctcgtcgtacaaccgagtgctcgcgccgcgggtgaaggcgtccatcaacgccggcgacgtccacggcggcgagcagcagccaccgccgccggcggcggagagctgcagcgggtgcacgagctggtcgaaccagttcgcgatcctgctgcggcggagcctcaaggagcggcggcacgaggcgttcacgtcgctgcggctgttccagatcatcgcgccggcgctggtggcgggggccatgtggtggcggtcgtcgccggcggcggtgggcgaccggatggggcctcctttctttcgtctccat

SEQ ID NO: 16918 - DNA, 21345 bp, Oryza sativa
cgtgctaacggtgattcgtgattactccatgtcgttcatcagttttaatttttttttctttcttttttctgtttttctcctgatccattgatggatcgaggtgtcaagtgtattattactgccaaattaattaaattaaactaaaaaaatgatccggtgtaagtaaccatcttcagttggagtgaaaaaatttgagcgccattgtcttctccgacaccgatctccctcttcttcgcctccattcttcccaaatttaactaaaaaatcaccgagttcaactttgcgattgagcgtatgaaaatttccaccttatttcgacaaatcttggttgaatttactgtttcgaatttaaattctcaaaaaccattgaaaatttcactcagtatatgctttcatcccttgtcaaaacctcgaaatttcacgattttctaccggtttttgtcgaaagcgttagccttgaatcacccctttcaacttgaagtaagtagttcatcgtaaatttttgtgaggtttcagctaggatttcccttagaattttgtttggaatgtctagaatcacacgattgaagaaggctgattctacagtgaagtcacactcggcccatcatttcctgggtaaaattatgtgggctcacatagaagacaaaatttggcccaaaactaaaattcatcttagtgcactctgcactctccacatgggcctcaacttcatctcgcttaattctctctacttactgggccacctaaaaatagcccattaattgttcatatcgattcattccacaagaagaatcaaaattaaacaatttatctgccggcaaattaattattggcacgacaggaaaaattcaaatcactagtccttagtttaatctaatttatagtgtagatgcgtggttgatccaaaaataaaggttaggtttccgtacttacatgggacggaacgtatagtatatctgtatatgtatgtatatgcgtacgtgtacagggtacacgtgtatagtatggaacaatctatacagtgtgtggtacaatagtgtaccaaaagtcggttggtttggcctcccccaggagtagagtgcaatgtaagcatatttatttatatttcttttcgtaaattaattatgcgcataaacaaatttggtgcataatttagattattaacaagacggtgttgtgtaatgatgggatggtccatgcaatgcgtacgtactagcatgctaatcattgaagttatgttaagttgggagaaagggtgcataactattacgaaaagttaattaatatttctttgatggatcagatcagatgctattttttatataaaaaaaggaaatttcaaaagcgatggcgccgatctaactcagatatgaatagacgacgatgcaaagaacgtacactatcatatcgatccaaaggcactatacggatcaaaacacaaatcataatggcattgattatatatgtgcagtacgtattttactctacttgtagtgtgtagtatcaaatttcaatgttcagatcgatctaccagactactactatatatgggttgagaactacgaaaataagttgctaccaacttgcatcgattacattattgatatcctctagaaattctacatagtgtaccaacaaaataattatgcctggtgggtcagaaaatattattcagggagtatttgctaaataggttggaccgttatatatacaaggacttattctttcatgtacagatgtactcccatttctcagattgatcagcatcgctcatatcctcttgaagaactgagaactaattaatgcctcctttgaaacaaagaaattaatttcacgagaatttaacaggattatttaggaattaaactaatttgtataaaattcctgcattgcggagaagcatacagaagagaattcgggctgttaaattaacgcaggaactctaagagttagccaactgctcgccattaattattggttcactgcccagcagtcaaattgccagcttggacaattaaacaacaatttgattgacctttatatttttgtcctagaacatcctttataggttttgacaaccttagtgaatactagtagttagtacaggttagttacaatgactcatgcaaactatattgaccgtacgtagaaagttctttttcttagtgaaccagtgacatttcgtccagttttgatacctatatctctgcttgtggttttcatgttaagcaaatggtttctcattttcattgaacaaaatggtttttattgttaagcaaatgactcatccccattcaatgttaagcaaatggttttcattttgttcatttattatagctatctgcttggggttttcattaattgaacggggatgagtcatgattgaatccgggcaggggcggatccagcgtggatgctggggggactagagtcccccctaccccgctgaatcattattgttagaaggggatatgaaaggggaagaataggtagaaaatgaaaagtaaagggtctgcaaaaggaagaaggatatgagtcccccctaaaatcttgttctagatccacccctgaatcccggcctaatatcatttgaaaattaaactgaatttgctactacagtctgaacttctcattttactatcacatatatgttgatttggccctttatttggatttgatcatgtttaatttgaacaaaatctgtgtttttatgcagaactcgatcaggtcgagtcaagactcaagagctggcctttatgttggtggtcccatggtaaaactgtgtctaagcacgtgattaatcatcagtaaacgcatagtactgacgacaataacagtactgcaggttaattaaggatgggatctcttcgaatctacagtatctgctaccgtggaacggcatacactcataaattaacttgtacgagcaattttcagagtaataactagtagcagagaaaatagagtgaatcttagtctaggcctttatcaaagtttcatcatgaaatcacctttaatccatatatattttcattttgattcatttttcttatcttttatttcgagcaatctacgattgaattttggtaagaagagatccaggatctaaaactgatgacatttagtcctaaataatgtaccaaactctagcttctcagatctgaagtactgatggtgattctcttttctgcagctgcctggatgttagatcaaattaagtactgtgtgctttgttgtaagaattacttcttaattactgagttccttaagataaatacatcacgatttcccgacaattaaactaatttcgatctgtacgcaagtgacaattacagtatgagaacaagaattgaccggcatgcaagtgacaattacagtatgcatgggcagcagagataaactaaagcatcgatccatcaaaatgaattatgtaattgcaaaagtcaattatgcccggtaattagtgcagtaaactagtgcaagtaatcagccatgtgctcagctcgatcgaactagcaacctgacatatgtcacatatatatccatccatgcatctactttttctgaatggcagcttccagctggatatcatgatcatatcttgatcttaattcgcctacactatactgtgcttgcaatcgcttggctgcgttgagatctcgatgaggtttattgctaaattattagggttgtctgcccactctcaccagcattggcataaaaatatgcacacacaactacttcacaagcatgtactatacatttgtccccacaatattaaaaagaaaacattcggatcgatcggctgaagttgaatgcagtggagaaaggttttttttagttaattgtaggacaagtttggtataaataaattagggtaatatttgcttgaaccaaaaagtattcgagaaacctgtattccatgcttattttttggacttaggatgcggtttttatagaccgtggatgatgacgaagaaaagctgattttatggccattatttaagggcacaaacgaataaattaaacatcagaaatatgataattaagttgattaaaaggtattttctaaaatattgatggggaattattttacaaaaacatactatttaggaacttacttaaatataagaatttttacatgtttcttaaatgcttatattttgaagcagatgaagtactttatatgtaggaacttgagaagcatactgtgataatccataaggtagtgagaacatagcacacgggttagagttattatttgtgtgactatattttatatgttgtatatgggccctatggtgaagtttggagctgtttttcctccactgcgaggacgaattatggaaaatattattgagaatggtcgcattcgagaatatcttttttaatggagtgctaccttaaattttttgtatcatgaacttcatcgatctgagctgtatgtatgcatgattaacccatattttctagcctttttttttcttttataacattattgaaggccatttctcatatgtatggctaattttgaaaaaaaaaaaggttgtctatgtgttatttatgtgcataatcaatttctccactatatatactaaaccgtgtgaatccaaaccttattatcaaaatgtaaaactaacaatggggaggttttttttttaaaaaaaagatgttttatacatatatacaacaacaagaaccactatgaacatgcttaattttttatatatagatcgccataccacaaggtgagatgtactatctccatttcaaatcaccatcagaacacaggcgaaattcgaagaaaatttaaaaaaagaagaataaaaaagagagaaaggtaggaaatctcttttcctttagatcccaaataggagtaataacactttgagagtttttgagttcacacacggattatttatgtacctaaccgagagcccatcgatctcgcccgatgcgtgcacgttaccgcccggcccgggcccggccctggcccgcagctcgtttgggcccagacggacgcgccgccgccaccggtcgtcgcacgacgaacgcgccctccgccacggccatggcgctcttgcagccgtacaggtcgaggagagagccgaagacgccgccgccgcccccggcggcggcggagagtgaccagcggcgctaggaggatggcggcggcggtggcgccggcggcgcgggaaaaaggtcgtcgatggcggtggtggagcgctccctggtgcactcggcgagcgcggcggcgaaggggtcggagtgtggcgcgtctatggcgccgccgcgctggtggtggtggcgccgtcggtggtggtggcgggacgacgggtgtgccggcgcgcggcggagcggcgccggggggagagggagcggcggcgtgggcggggagttggacgggtggagggaggtcttggggatgccggggtggtgctcccacgagaacgggacgacggaggtggccgtcggcgtggcggctgtcgcggcggcggcgctggtgttggtggtccggccgcgaggggacggggagggagaggaggcggtggaggagaaggaggcggtggagagggagcaggaggaagaggaggaagcacggtggcggcggtgagacaacggcagaggtgccggcgccggcggcaatggtggttgcggcgccggtggcgcgtgagtggtggccatggccggcgaggagacgagggaaggcggggacagacaagagtgacagaagcgggataaatacggtggccacatttgcacttcagcccttcaatttctccaaaacttttatgcttctttagctcttttctataccattaatgagttaacatcctctaccataataatactaccattatgtatatgttactataataatagtgcatttacataataatagtgtcattatgatataagatcatcacccaataatagtatatatatagtacggagtagtatttaagtgaaaaggaattttacggccactgataaaagtatctcgaggtatataaattttacgctaaaattttcttatcttacttagtatctaaatgtatcaaattttataccagagaatatagtacctccatgtcccttttcaagaatggaaatattattcttaagatgaagctactaagtgaattaaaagtaataaaaaagaaaactgattttacacaactgaaattgcactcattttgctttgtgcctttaagttaggtaaattaaatgtttttcccccaccatgacccagtagtattttttttacatactataaggacatgttaacttgacttacaaacatgtttagctgaagaacgtgtctcggtccaaggatgaaaaagaaaccgtggcatgtcataattgtggcaacaaaagaaacaaccatattttattttctagagttttatttagggacgaatggtcaaatgttagttaaaaagtcaatgacgtcatatattaaaatatggagagagtataaaatgtgctctttattatgcttttctcatgtttcagtttctttgggcggaaataattagtttgcactggtacagaatgctctatctgtccaaacaaattttatatacagttaactgtttatagaccaaaggtaatgtcataaactcatgtggagatgtactaatttcaactgtagacaatttagttttatcgaaaactgtagaccatttagaagacatgacacaattaaacaagaatataagatcctctcatacgcaacactgaaaatagtacaaatcacatgttttcattatattggggcagaggccacagagagctgacgctgtagcagttagccagcgcatttttcaattagctgtttggtttgattcaaactgtttgaaattgatgctggttttacttcgaacagttgttttataccaaaaaggacataaaacgtactcgagtactgctcaacattaggacttaattagtagtagtagttcataatgtgccatatatggagattgtggtgtaatttaaaccagagcttaggtcagagtgagcacaatttcttcctaagaaaagatatccatacaaatttcaggtatattttatggttgttgcacttactaactacaaccaaacaaagatactacactcttattttgatattttatctcttagttcatactgaatttgtacacctctttgctggtagcaaggcgttttcagttatgtgatagatcaagagaagccctgacttgatttttgctcttgtttaattctcatgtacaacctgacagttacacttgtaggtagagctcctacttatatagtagatggctcaactctggtttttatttcagatataaagtgcaggtgatatatgccacgtgtgctcctgtaaggatttatctttaattgcactgcactgaaccgtttgcattactgtacactaataaatatgtacgatggaaagtacatatacgtacataaatacgcaaaaaatgaggacatttgagctgtattcttatccgtagaagggaggacgagtgagaccaaagggagggtttgcttctgctgcctctgtttcagtttcatcagactttcagtattggataatatgggaagtgtgcagtgcaatgcaggtagttcagcttatttttcatgcttatttttcaagagcagagtttcttgcttatttttcatgccagtagttcagctgaatttaccatcttgtaggtcatgttggttcttgatttcttgtgcatttgtaagtagaattcgtgctaacaatcccatcatttcacatataactgattataagctctagtgcttattagcgatcaaaatataatttggaaataaaacttttatatatatgttcatggtgacttaaaagccaatataaaaaattaactacgatgacaaaaataccaaaaccaactctgaacttaagttttaaaatcaaagttttggctgcggatgatatgctattatgatttaagtagtagattgaagtatagggagtgagatgatgagcagcagtactagctagtacagtactactatagttttcagacaatggaagtgtattaatttcgttatctgaactaaattaaacaagacgttactctcctttgaccacattttgagtaggagcagagtgcaatgaatgggagctagctggctctgcagaatctttagtgaagtgcctgaataagctaagaccaccacagagatcactgcagtaacgcctcatcctccacatgatcacttgcgtgcctctggaagacgtgttcttgaggctcggcgacgatgctggaacaggatgggcgcagctgacctctgaaatttttgagccgttcttcaggaagtagctaagcccttacggtgcaagaaacacagcactgtagtgttgcatttctgaacttgcgttggatgggcaaatggcacacccttctctttatgcaaatggcataccttcaacgatccccatactttacgaatatcgtctgcgaatatagcccgtcgacaagatttactagattttcaaagaaacttttagatagaaaattattgtaaaaaaatacaccttttagtagtccggaaaaccaacttaatggaaacgagagggctaatttcagctcatagcagtgtaattctaagggtaaaatggtttttttttgggtaaaaatggtattttgagacactaaagggaggtctttggatacaaaccaaacagtatggcaaaaaagagaaataaacgattgcatgagtttttcaatgcaaaaatgtaccagttctcttatcagtgataaatttacgctattacattatttagctatgcacctaatatctggaaaataacttgccagcaagttggatgatcatgcatctagtgcagtgtggtggtgagccgtctgaagcacatgatttgggacctctcacctctggtcctctctctgatttgctaaatttctactaattaatgaccatcctgttaaaatgcacatgtgtatacaaaggacaggggcactttatgtatggcctctgcatgctttctttccatcttttcctaggttgatatgatcatatgatgttgttaatgtaagtttttacattagtgcctatcacggtatcaatcaatcaatcactcatacacctacatgcctttctgtttctcttcttcatttcttgcttttaatttgtcgtgtttcctgacctactcgtgcgtcggcgttggtgcgtgtcctgcttttttgcgccaatcatcaggctctccaactctttgctctgtcgatttgtgtgaacactatttataattatgtagcggtcgaaataattattccttcatctattaagataggagtttgatgatgaacaatccctacatctgtactagcagctagcggatcagagatatctgaccatttgcatctgcactacatttgtttgatttgatcctttaacctaatcaagtcaacactaatcagaagcagtagggtagggtgttaatacaacacattgatagacaattttctgaaccaaacaagggcctgattggcatagttgtccggccaaacagttttaactccagctaaaatgaaagtagagcgaggtgaagcgctcttacaaaattaactaaagatgtggagttgagtttaaactgctccataactctagaccaaacccaactctttaagctaaatttaggagttggagctctatcaaacatgccctaattattaagcaaattactataggagattatctacttgattgcagggacaaaataaatatcttaaaaaatgaacttaacaaaataacttaaaataagccgtctgaataatgcagtggaataaagtttttttttttacaaaacgtatttttcacattgtagtgcaaataatccatttcaataatgtggtcagtaatgtcagatacagcaatatctccagtgtatctccctttctttccccaaatcttcagtgaaattctgtgcccttcacattcatctgatttgtacatttcaaccttcggagcactgatattcccagtggtcagtcaactagtagttttgcagcctaccacgcactgcacattacaattaagtagtgaaacctacaaattaacaatgctaatctttgcttagtgttgcacttagcatatcataatcaaattcaacaaaacgtttggttgcctcctacttgcagcctctccccatctgtttcttgacgcagcggtcattttttgcgtgtaattttcagtcacaggcatgaacaactggacaagtcatcatcatcatctcgtcagctacaagttcggtagcagattcgttgctgcgtttttttcacaaagatcagccaaagcagtgatgacaaaattcagtactatgaattgttcttagctctgaactatctggtactgttaggtgaacaaccctgccgtttgattgcaatttttcaggagtcaggacacatttgatgctactaatcgatcggcagctagctgaatatagcaactcctacctgcaattacatggattaatgctctactccaacctgtgattacatgaattaatgctgattggattaacttgattcagaagtatcaggcatggtgaccctgactgacatcactctctggcttctttactataatggctgcgtgagattggcatgatcttgatctgttaataattttcatttgcattatttttttctgatattgacttccattatgagcctgaatgttttactcgagtgaatgaaactgcaattttggtgtgctttcgttttctgatccacagtctcatgtttgactgcgacattaaattatgtcagaactgaattcactaatccgtcgtttgcaccctttttatggacgaatgcatgattcaggcagatggtgagctgacagacaaagcacatcttcactgaattttgttgaaacagctactgattttgacatacaaactgaaatgaccaagtttcagtcatagtttacatcattcgttctgaaaaatatttttgcacgtacgaaaactgaacactgttccagataaaaacaactcaggttcatttcaaacagaagcaggtaggtcgttcgattcgacgaattcaatacaaccaaccctgtaaaatggcgagtatcaggaagcagaatcactcgtacattcaagtactaattaagaaattaaggatgatgacgttcgataacactgtcgcactcacatcagtttgaacaaatcttctctcccctagcatcgttagtactgcaggttcatcattactgctgctgttgctagtagtagtattcgcgtggcagtgaagaaaaaacccatttttatcttgaaaattgggggtgttagcttctctgccaccttcagagaaattcagagatgcagttattagtgattggagctgctagctgattgatcatgaagaagcagaagcaaagttgattagctgatgaatgaatcactgaaaagtcatagcggtgaggttattggattagtacggtgagatgagatgacaccaagatggagttggagagctgagaagtgactttcagggtatattgtaggatcgaatcacaagaactaagctaaccagagggagtgaatggttggtataccaaaaaaaccgaaaaacttttagtggaaataaaagttaccctcgaattcgacggatcgcggtctgaccgaagtgtatgcgccggtctgaccgcctgatgaatgtcggtctgaccgatgtagatcgatcggtcgaaccgccgagaatcctgctgcgcctgtcgccgccgccggtcggaccgcccgaatgctaccagtctgaccgccgcttgccgccggtctgaccgccggtagatcgccggttagaccgccgaaacccggtaaacacaaatcgaagaattcttaaagtggatgacgactttattgattctctttgtgtttacaaagtgcaccaacagcactccttacaaaaatttcgactaaactcgaaaccctaactcaaaactcaactcaattgctctcaaaagcgataatgggaagcctcacgctccccctctatttatacccgaggtaggcagcctaaagccacgaaccaaactcatactaagagtcctaaacaccttaggaaaccctctagtataagaaagaaactttacataaccaatcgtaccaaatttggactccttccaaattcgactccgcatcccatacgcacacaatacctccatcatatgccatatggaatctccatcaaccacatgcatcaactctagcttaagtatcccgcatgatctctgaccaccacggatgttgtcttatccccaagccgactcctggtccatcaccgcaaatactctcccgagacatcaagtcacctacatatgaaataaacaaagaaaccatattccgagaccaagctatctccaacttgactcattagtagcaaacaacagtattacatacgtatagtatccatctagaagccataatcaacagtattacatacgtatagtatccatctagaagccataatcatgaaataatcacggatatccaaacaaacaacccgaaaccgaaaccgacacagcgtcggccggtcagaccgtgggctggccggtccgaccgctcgatcaccgccggtcttaccggcatacaccgcctggtctgaccggtcacataaaatgatagaatcctgcgatcacctgtgaaatccaatcatctccaaaatcacttcgtgaataaattccaaataacaaaaccaataatctccaatacccaattgctcatcacagaataataatcaaaaacacctttgattttacatatacaatacagtgtcgtcagagggtttgatcagttgatgatctagtactccctccgtcctaaaatataagcatttttagtatagtgacaagtcaaacattttcaactttgactataaataacaaaaaaataaaaaagatcaatcatgcaaaattgatgttactagatataccattaaacaaactatcataatatgtaactctttttatttaaatatttttcttttatagatattattggtcaaagtagcatttcagagaccgtgtcagagtccaaaaatacttatattttggaacatggagtacgtaaatacttatattttggaacatggagtacgtttataggattatgaatttcttgacttttgtcgtcttaactaggattggatggcatgacatggtagaatgactatatcaactgttataaaggtactacttccgtgttggtgcaggtgccgtagtatagtgatctgtgtttgacatgtaagtgaattgtctaccttttctaatcagctttaagcatagaactagttgatttatgtaactcaatatagtagtataggagagagtgtcttgacttcgaatatttgtttgctcgcaattaaataaaaaaatgtaacatgcttttgttcgatacatgaggatttgggttaagttgattggtgcatgtaactcaataaactgattgagtcctcgggtttaaccattgacctttcacaaaaaaaggtatttttatgtaaaaaaatatattcaattttcattaccaaaagattaatgatcagaagtaactaataaccttttgcaataaaccgtaaagaaaatattccacatgaaaatatatagaatttcacatgcatatattctcataaagttagtaggcactcgtctagaacttgggggatgtattaccgacacatcaatccattttcttgtccataggtcaggtcagcttctttccatgatcagtcacaataacagagaaaatcctataggagcaagtaatattctgtaccaaactaggacttgtgcaggcaagatgtgatttccaaatacatttgtctacagtttgtagccatagtagggctggaattggatgttctaatagctaggtggccaaggtaatgaaattcttgcggtaggatgcaatagagtggcgtgataggctgattatggccaaagactatgggacaaaattatgcagggtttcattaatggttttccaatgtcgacttctctcctcggtcatgataaaatggcatacacaatgtaggtgcttattaatatttaatgttcaagataagatcctatcaaacttttaaaacttttgccatataatgacttttaggttttttaaaaaaaatgctatgggtatatttgcccaggttttggtttgaaatttccaaaaattttggaccccagcgtgaaactatttcgctcggaaaaaaaatagaaaaaacaattttgatcaaagtttactcaaatgcggtcaaaatattttgaactttcctaaaatccggaaatttccggcactcccggtagatttatgcctaaggaaattgtgtgccctatatttgtcttgaaaaaataattaaattaaattttgttctaatcgttaaatatttatgaccagtttctctacatacgcttgaaatattatcgaaggcttgaaatacatctccatatttctagggtctggtacacatccaacatgtgagggtgtatttttaaagataggtagagtacatcatcaatttaggatttaagtttggtgggccgcaccagttatccatctggtcgcatgtgggtctctaagtaaacatggtgtttatgtatttccttcatcccaaaatatacaactatgtaattccttcattccaaaatatacaacgtcgatgactttttacgtaacatttgatcattcatctcattaaaaaaatataaaaatattatttattttgttgtgacttgttttattatcaaataaactataatcttaacttatacttttatatatttatactaatttttaaaataagatgaatactcaaaacgttacgtgaaaagttatcggcgtcatatttttgagacgggtgtagttctatattggagaaatatgaaacaatcgaagcactgatctacacaatacatgcattccaaaagacgagtcttattatgctttgaatttatttttcacttcaaacacgagcctacctgttacatgtaaaatagtatgattccacttatacaaattacttggaatcccaaattcacctaaatagcagtttgtttatttaatattcttttacaaaatgacacccccttcatccataaatataaatgattataggttatttggcagagatcaaggttaaataaaataacaactttgatgcccacaaaactttagttgattgggaaagatcatgcgtagcgatcgatgcgccgatgcaattagtagtgagcaatactggttggattgagaaagtggtacttcaaatttctttatatttacagataaattttaaatttaacctcacatattttgtatctgtggacggagggagtcccgagggagtagttacaaaatctccacggtgttcgcttaattagattttgcatttgtttaagaaaaacaagattggtcctttacgagtagtgtggggcatggaccaaaataggcacggaaaaggtcttaagggaaaaacatgatcatggcgactttgacatttggtgaagaatctctggagttggcaataggtcagacagcgtgacaggcgtatgttgttcaccatttttctgaagaaagattttttttttaaggaagttgttcaccattttgagccgacggaaagtttagaatggatagtttagtggtatagtaaaaatagtatggatagttagtatggccccattatcaccttaaattaatagtccagatccaccctcctttcaccacgaaaatataggtaaaatatgctatatttcattttaaaacaaagaaagcacatatttagctggattatgccacaaggctatatgagttatggatggacagcccttcgatgtcgcctgagctagtgaactcataatagtaggacactgttagcaagaaaaaaaaacaaaacatcaccgcataattaaagagtattggtctccagatctcaattattaatttgcgagctctactattaataaaaaaataatctactactaatcgttagacggtactacctccgttttaaagtataacaactctcaactacgaatttagacatatgcttgtttaaattcgtagaaaaaaatagtttaatttagaataaagggagtagtataaatagatataaatgataaaaaaatataaacagatatgatccattgaaaaaatatggaaagtctgaaatatatttcaggtgagtgaatactttgaaatctcagccgtttcttctgccgttggatgcataataaagggtggatgctaaaaacccgcaaaaccaactgggtgtattaatggatctgtttgcaggctcgttaagcatgtgacaaggccagaatatacaagaaaaaagattgggctttttgtattgcccttgtctatgggctaggctttgtgtgcattgtcgggtttatgggctttgtgagctgggctttgatctttgggctttttatgtgctaaaagtgtgcttttgtgggctttgcccgtgtagctacatttattgggctttcatggctacaatcagaaatcctaaaatataacaaattataactataaatttggacagacaagtatttgttcagattgatagctaataaaaagcttactatattttagaacgaagagataattattactataggataaaaaaggcctttcagatatgcaaaggattattatcttcaatcatgctccgatgctcgccctcttgttataatgatattatcagttcccttttcgggcatgttttttgcaatttttccgattcaacattctcccaattccacagataaaaattcatatgaaattctcaatctgcatgaacatatcctatcccctttttatgtttgaaatatcagccccggtgctttgtttttcgctagttttggatgagagaaattaacttgtagtacctgatttgctaggttcaaattacattatccctccaccataaaataaaataaaaagttatatattcgaaactggacgtaggttatgttcacattcatactaccaccgtaccaaaaaacttgttcttttgagttttcgtttgtaatatttgaccattcatcttattcaaaagattataaaactattatttattttgtttgggacttgctttattatcgtaagtactctaagtatgacttttttttatatttaaactattttttagtgagacaaatgatcaaacgttaaaaaaaaaatcaaaacgatacctaatttgggggagtatctataaaagttgactaatttagggagggagctactaaattaaaattcagattaaatgcttgctactatcaaaattacactttacatgacaccgaaaacgttgcattaaaaaaacatttaccccggggcttgtgctgtgtcaggtgtggggcccacttgtctgtcgttgctcgctgagtccgacgtggactcgacgcggccacccttatccctgcgctttttccagcctacgtggcatggatggtcccacacgcaccatttgcactgcacttgccaatagtccatttatctctttttttttgtttgttttctcttgccagagaggaccaataatttgtggccacgaatccatcgagcgtcaataggttgggttaaaactaacagaaatcaaatctcacaagcgtcaattttgtagagaaattaaaaggagatctttttaccaagcactcaatcccattggcatcatatccatgaatttataatggtacaatcgcattaagctagtgcccaaatttattggactggaaacgaaattaccaactgaactgaaaaaatatattttttcagcatggttgaattattttgcaaaacgtatatgttttattttttatgggacatgtattttccgactcaattcaggtcccgtcgctgtctccggtttggaaatttctttgattgtctgttatacgtattttcacgaattgtgattatcctaatcgttcaagggaacatgtggttgattttgtaaacttaatcgaagttggtcaaaatcaacttttagtttgctttgcacgagaggttatttattggtcaacagtatgtaaaacggtttattaaaactttggtcaggtcatgagaacatgccttttttgacattgatgaataaagtcataaagatgctacttatcactaatttacatcacaaaagaattaccggccccaacaaaataataatctaagaaaaatactttttcagaaaaaagaatatagatatgattttcatcgacccaatcgaaatatattaaaataaagcttcacctgaaacattctaaaataacatgttttcgtaccaagagagcgagtatatatatatatatatatatatatttattaaagcatgtcccatggtacaataatctcgaattagtggttcaagaattttgtcaaccaatgatgacacctaatcggaacaaaaataaaaacatgatactactactactctctccgtcccacaatataagggattttgagtttttaattgcaacgtttgatcactcgtcttattcaaattttttttgcaaatataaaaaacgaaaagttgtgattaagttactgtagataataaagtaagtcacaaataaaataaataataattttaaaaaaatttgaataagacgaatggtcaaacgttgtaagtaaaaacttaaaatcccttgtattatgggacggtgagagtacttaacaacccacagaaaaataaaataaaactataaaagcaaggaaaatatctggagtaaggaaataaaaacaagaggcaggagaagctttacacacaagcacaatagactatataaaaacaaaaaagaaacaaccaaataatataataataataataataataaattccctttcccttcaaaagaagaagcagagcgacctgcttttcaagaagccatggccgcctcctcctgaaatcgccgccggtttccctctccggctctcccccacctaaatgcatgtcgcccgccggtggcggtcggcggccgtggcgatctgcctgctgccggtcgtcctgccgctggcgctcctctgcctcccgctgctctgcttcgccgtgaccgtcgtccggttcccccgccggcgtcggctaagtatgtccgcgaggaaggggaaggcgcccggctgctgcttcgtcaacggggaggagcgaacgtctccgtaaaagaaggagggcggcgggatccgcgcggcgctgctgctccagtatctggaggaccagatggagctcgtcggcgtcggcaacgccggctaggcggaggagggcaaaaaagcatcggccccaattggagacgagcatcacgagcttagctaagcttggagatcaagattaatttgacgattttttttttgttgttgttgtttgattgatgatatcctctgcttcttggagaacccaccttcgttacatgcccaaaaaaaattaagaaaatatttccttttctttgctcgagtttttttttttgttgctgcagtagtagatatatattattaggagaggtgtcgttgagagcatgtgatctaggagtatttgattagatgattcatgcaggtgatgcctgacagcttcatctgttagacaattggattgggagttgattgttcctctgccctgtttatcctctgctttttttttgctcatctgtcttcttgtttcagttattaagcctaagtatatcatctgatcctatagttgcagtttttttttttgcaagttagttgcagttgttgagagctactcttgattagttgtaacatcccggcctagggcttaataggattaatagaatactcataccaataagttacaacttcttttccggaagccaatctccaaagaactctagggttaagcgtgcttggcctggagcaatttgggatgggtgaccgacctggaaattctttccgggtgcacacgagtgaggacaaagtgtgtagaaaagacatgtgaggcatggtgcgcatggcacatgcgctggcactggacacatggacgtggccaagagagtgagggcagtctatgacctatgaaagctatcagatgtaagtgggcccggacgttacaaagtggtatcagagccgactctcgcggtttcacgggcgcgtgtgtcgcagttgcgcaggcatggtgcgcatggctggtgttacaaagtggtatcagagccgactctcgcggtttcacgggcgcgtgtgtcgcagttgcgcaggcatggtgcgcatggctggtgtagaccgggagtggttacacagcatggcacatgcgctggcactggacacatggacgtggccaaaagaggacgttcctggcctatggttgatcgacgggggcgtcgatctctcttaagggggtgagggtgtaacatcccggcctagggcttaataggattaatagaatactcataccaataagttgcaacttcctttgcaacttcttttacggaagccaatctccaaagaactccagggttaagcgtaagacatgtgttggtctgtgagggcagtctataacctatgaaagctatcagatgtaagtgggcccggcctgggggaggcgggacgttacattagtacttccttcatatttgaatgtaccacaccggtgacttttcgactaatgtttgaccattcgttttatttaaatttttatgttaatatgaaaatatttatgtcatgcttaaagaatatttgatgacaaatcaagtcacaataaaataaatgataattgcatagattttttgaataaaacgaatggtcaaacggtggacaaaaagtccacggtgtcatacattaaaatatggatgtagtactagattaattgtgctagagacgcttgatagcttcatctattagccaattagactggaagggttttgctcctctggtgagtcatcctctgaacttttgccgcctcagatcacaacagatcctagatataactcttgactgagcttcaagagaaagggttagatttttgagtgtcaggatggaaatacatctattgtatttatggcgtgtgacacatagctgtgaagaggggatcaccagtttatcatctgccttttgctacccgacttataatcgtagagagtgaggatttaacagccgtgcttctgcatacaagataacgatgtgtacccgttatattcttgttggatccacccagaagcgtcatacttctactgatggatcttgactaatagggcgaccttttctttttagttctcacatagctccacacgacacatacttttgatttacagctagaagatgtttcatgtggctatcagatgccctcacgctttcttatacccaatagacgg

SEQ ID NO: 16919 - DNA, 739 bp, Oryza sativa
  unsure (1)..(739): unsure at all n locations
ggttagctttataagcatcttgttgagctttgtctacgttttcttgtgtttctctaacgtcatcgtttagtttatacgtatctgtatagtcacgtagacgtaaaccatttagccaagatttttcacctgttgtatcacggttcaacaagaatccaagttgaataaaacctgtttctactgggataatcgttgtattagcaaactcagaagagccactaatcaaatggctgtacttggtgtacgtagtaggtacttgtatatttacgtgaccattcaaatacaaatatgtggagccgtcagaagttgggctaagtgtatgccctactgggaaaatcccatctgaactatttgggtttgcaactgcccatggcttgtttaacgtaatcttgttagctgtggtgtcaactgcaccaatatcatatgtcctcatctgcattagctgactatacgttccatcgggataagtatagccgaacgagtttttataaccccacatgataatactacgttggtagtcttgcggtgcctgtccgttccatagactaacatcttctacaaaaacctctgtatccccgactttaagtggttttgctagttttgtaaatttaacaggggtagtagagttgtagtttcgtcccccaagagaagggtacgtaatacggttaccatctacgtcatatggggcaatcatagcataacttctaccgactcctaataagagctgntcactcnnccatca

SEQ ID NO: 16920 - DNA, 24074 bp, Oryza sativa
  unsure (1)..(24074): unsure at all n locations
ggcccaatcaaatatattccactttggcataagttcacattggcttcctcaaatatatatagntttaatctaattcttatctctcaatcgctcctctaattattaaaatcgatgcaaaatgacccccttgatggttttgagagcggtttttttgctaatgtagctcattgacttagtttgaccggctgattcagtgtgagacccatatgtcagtgcatcctcctcttctttctatttttctctctctcctccctcctcttctcttcttggtcttcttggaggcaggggacgatattgtacatgcatgggtggcagccgagcttagcgcctacggcgaggccgtgtgggtcctcgacgccaagcaagaggtgttgagcctgttggcaccggtgacaccatgtgcgtggtgcgatgtcatcggaagtgaggagccaaggagctcaatcacccgctccacggtggtgaagggaggcgaggagccaaggcgcatgggcggtgcccgagctctgcgtctatggcgaggccgcacgggtcgttctcgacgccaaacaagaggtgttgagctggtcggcgctagccacgccatatgtgcggcgtgatgtcatcggtaactaatataaatgaattaattactaatgatatcaatttttttttcagaacagatatcaattagagtagttaattgatggaaacccacctgagttcgtcgccgcggtatcgcagtgcgcgcgacgacaagcggcggtgtcgcggggctagcattaatttggtcccttttctatagtgtacaattcttgttccaaattaatctatacgctctagaaggatgattaaatttggaaatatattaggatgtaattttttttggcacaaatataccattgatatcgctaaatctttgcacgaatataacgatggcgtgacgagtcgacgaagagcgccacggtctcgtgggacgcgagatgggcggtgtcacagtgcgttggcccgaaatggacaacgttgtcgtagaccaatcttcaaactttgaagattagtaattaaagcaaaccttgcatgaattaagtcttccttattacacggggcacatatgtggtagaaatttagtactcccgacattccatatggcttgcactagtcaacacagtgcatgttaaactgttaagccatatggaatgtcgggactggtactttgataatagaatatttatacctttttttttcataaagatgagtggtccaagtttatacatgaatagtatcttatatcaagtaagagggaacggagggaataatagcatcaacaattaagccaacctagcatgaagatcaatggaagacataaacgttgtactcgacaatggcatcaagtccgtttgggtcgagaaagtaggtgcgggcttgggcatagccacgagcgaagcgaaagtggccggttccgcccaaaatcggcatctcatggataatgtcggatatgtggttgctgccaagcactatgaccacgcttccattatacgacccagcggtgagcacgatattcatggcctgcaagaagcctatccgggcttggtcagacgagacatacatgccctgggcatggcccacgagctttgatgcgggatcgggccgttcggtcaatgggtcatccatgacaaccaccatccccaagaaggtcaacgatgtgttgtttggggggtttactaccctcaccgctgacggtgacggactggtcaccttgtcatggaagtattagtgtaagtgcgtcggcactaaactgttgcctaaggcgttgggcctagacctgtctttcatgtcagccttagtagtagtggccaacacaaataagagtacactcatcaccggcaatcctcttgccattttgatcttagaatcgaatttgcgttaatttgagtcgagtggatgatatactcatgacctatttatggaggcaagggataggacaagtgtgaagcagtgattgagggaatcatggatatctattgtctcctcatgagcaatggatatttcattgacctgtccttgtagaccgagtgaacaaccgaaagagaataagagattgtaatgttttgcatttaaattgtgtatatgtgtggacagtattgaggtacatatatgaaaaatgttactatcactaaaataccccaaactagttggctatttttagttctccaaactgaaggatgcgttaagttaatttggcacattatacgtacaaggaaagactgaaagcaaggtcctaaccagcagcatcatagctagtcaatcaatgcccaaagtccacacggtgcaatatcagttgtgcacaaaaatatgctcctagagggaaaaaatatatgtttgaaccaaatcctagaaaaaaaaaatgaattgcgtgatgcattaagattttcagcgccaacaatgtagtataaatgaacaggaagcaatggtaaagaaattaagcacaaaaaaaacatgctgtaaaaaaatggaaacattgacaattgtgaagatattatttatgtggaatgtactacgttacacttctcacatagtattacctccatcccataataattacatttctagaaattagagatagattaacatcaaacacaatttatcacaataaccatatatatttaataactacactgcatgcgcatattctatatgtctatacttgattaaaaggaaagttgagcaacacattcgatatgtaaacttaattaaaatgaaggttgggggtacacattccatttgttgttgtgtcccatcttaccagaaatacaattttttaagataaaatttgaatggtagaaatacaattattatgggacggagataattcttctataaaaatcaagcaatataattatacttgcgtgtagtagtatgcagaggaaatagttaacatttggcaacaaacatccatgaaattgctgtataaggcccttaacaaacttgttgcctctgtagaaaaaaaaaaacttgtgttttcagactactcgagacaatcacaaaaacttctgtaatatggcatggttggcattatcgttctaaaaaaaacagtttgttcacattcaggtttcataattgtttacatatgcattttgtacccgtttctacaacgaggctttgatgaagtggcttaacaaaagtttgttctaatttatctcgttttcttgagaaagataaattaacttgcacatctaaccggggaaaaaattagcaggatggacataaattaacttgcacatataaaagatgattaaaaaaaatcaaaatctcttatactgtgaaacggaggcagtaccttaacattacaacttaattaaaatccaatggcaacatgatatagtttgaaaggttcgctcaagaaaagaattattgtgagttcacttacgaatttaagcatctattgcagctggttgcagtgactgcggcacatcacatggatctatcgagcttaattcagttggaaaccacctggcccgggtgaccgtctccaagaaactgtgaagcgacaaaagaaaatctcacaagaaaacagttcatcataagatgcaaacaaattttaaagtggtttgcttgcttggatttttttttctggtattcatgcccccatctccggcggccggcagcgccacagccaccgacactagcatgggcctcttccgcacggtctgtcttgctcgtcggtgcagaagaggccgtaaataggcccatcgagatatgggccgtttcatcggtactctctctgtttcacaatgtaagtcattttagcatttcctacattcatattgatgttaatgaatctaaatagatatatatatatgtttagattcattaacatcaatacgaatgtaaaaaatgctagaatgacttacattgtgaaacggaggaagtacgttttatatttgatctttaccttacccatgaattaagactcaaattaatttagagtaaatttcaactaaccccatgtactattatggtctaaattgtacagaaccacgtgggttttgacacgtaacacataaccttgattattatggccatgaagttttacaaaaccacactattgatcattttgaattataagctatttattccttatataagtgttacatacatgtaaacatacaattttgaattttgatataggagtatgtcgatttggttaacgccatgtgttgatggactatggtgcccacctacgatatttgtagagtatgaaaaacgttgagatcatatctagctagcagacaagggacaagtgtttatattggttcggggccttaagatgactaataaccctacttccatttatatgtatatcagggaaaaagtagattacaatcaacgactagggctttggcttcctccgaattgtatctcgatattgctcttgttatggcttgtaattcaatatcctccccttattgggaccctgtatttatagggatgatcatctttttctcaaagtagaaatcagagaacctgaattagatatggtccaagaagaccttattttctctgaatatgactttgacatcttctatccctagaaaacaatttcctttcggatcaccgtattaccttaattgactatatattcctgtatattattaggtatgtggtactttcatatagcacaaacccaaatataagaggtatgtcttatccttaacagttaacactaatagtgtggttttagaaaacttttggaccataattatgtgtcacatgctaaaatctatggttttatgtaaattggctcatgataagtggggttttataaaatttagataattttttacctagcttaatattactgttacaggaagatctgtgatcgagacaagagttgttggctggaatagacacaccacataataatctctatttggcaagcattacaacggcagcttaattttaaaccaaacaaaatcttgatctttttaaaaaaacaaaaaaaaagaagtaacgacagcacgtacgatgcatgagaaggtgagttgttataatcaagcccacagatatatcatatatagcggtatacccctgccgatcaatggaggcacgtgtagaagaggcatcaaaatttaaataactaaagcatgcatttccaccaagtatctccatccatcctaaaatataaggcagaagattttggtgaataaaacatatcctaataccatgaatatgaatagagagttgtccagattcataaggcttgtttgggggagcttaaaattttgagaagcagcaactgagaaactagctagtgagaatctggagaagctgggaaacccagcttctgtcttctagttcattttccagattctacaaccacaaattcttagaatttggataaaaagctggactgttttggtgagcttctggcaagtggtaagtactggagattctaggagaagctacagctgctaaaagctccccaaacagacccatagtagcagaatgtgtctcatcgaatatcatagtcctttttatattttgggatggagaaaataagtgttaaacaagattgaagaaatctaaaccaagccagctgatcttcacctactgcatctactacttctgtcagcttcctcagagtccatatatatcccaacttgcagcgtgtatgccgtaaaagtatctagtatggactatggattacttcattacaaattaacccattacccatcatatgcaagatcagtgtaatcatgtaatgtaaaggcacaatctcgtgctgttttcccttaaaagaattgtaatgtaaagtgaatactaaactgatgaacacacaagatcagctaaaatcaattaactaatcctccattgctagctagatgtattgcatgccgcatgtgcagatgtgctagcttgcagagctagttgtcttcgtcttcgtcttgtcctttgtctagagatttgtctagggagtagagacgacgatgacgacgacgaaatcatcgaactaaacacaaccaccaccacccccttgcctttttatgtagatcaccctatagctacctagctttaattatatcgataaattacctgtgaagaatatggatattccatatctacatgccagttataatttaatcggatatccggtaccaaatatagatagaatatctttatgaagactcgggttagttttttacttgtatgtcaaggaaatacccgagatcttagtcggtcacaattgtattttatctataatcccatattccgttacgataagagttgtattttgtaaagcggactccttcccctatataaggatggtccgtgtgtctctcggggcgcgattcttttttccaatttatacaatcaataacgtactcggcggaatcatccccggacatgagtagggtattacttcatgaatatgaaggcctgaacctgtataaaattcattgtctccaaaaccatcaactttcctagcttgatagccacccccttttattattgccgaaatcttgtttcgacagttggcgcgccaggtaggggcagcgtcaagtttttgccgactaagtgcgatgggttccgtttctggcatcgacaacttcgccttccctcccgggcaggcgttctggttcggcagcctcaacttcatcaccaacgacttcggcaagatctctctccttgactcggattcgaaccagtcggggagagaccaggtccccgtgccgtttggtattccgaactcggccgaggcctactccaagatcatatcttccgagtcggcttcaaaccactcggacgagatccaatctactcctccgcgaccagatcaagacgacgggtcctatccttcaatcttgatgaaacttcctgatgacttggctgccgtcttcacagccaaaacatctcccactcggagatctaggcgagctccggcatcggccccgatctagtctagatccagggaggttggcgttatactccaacctcttgggacagtctcgacggaagagatggatggctacctcagctcccccggcgtcagttcttgaccaaccaagatcctcgactacgacgacttcggctaccactatgaccacggcgacctcgacaacttcgacgacagctatgaggataactacacgcccctcttcttcggcgtattcatggctgccaacgaaacggaggaacagcgccgagcccgagaagcggaccaagatcgcgcacggcaagaagctgaacgtcgccgactggaggaagagcgacagcgacaggagcgagaacgactacagcgtgagcaacaagatcacgaaaggattgcaaaggaggctgaagatcgacggcaacgcgccttggaatccgggcggcgagcgagatagctcattgggcaacaagacgtcgacggaacagcggtctttcgcatcccccagcagaacgcggttgcagcaatcactctcctcgacaccctcctcaaggaagacgcactcaactaagctgatcatgttgtcaacatcttgaaccagacgaagaccatgatcgctgcctcggttccagccaactctgcaagcacccgcaccccgactagtagccaagtccctcatcttcgatctcaagactatcaccagccaagcctcagcattgccggcgccggatctagtcgcaggagcagaggacatgatgaacggtctgttcgttcgcctcccgaacgatatagggagcgtcgagttgaacgaccacactccccacatcgaaggcgccccatcgatcttcgcgacaccatcaaccagcgccgcgcagcaagaggccaccattcaccagatcgttatgacgatgatgtggacggcgttgctgccttcacaagcgatctgcgtcgagtggattggccagccggctttaagccgactgaaatcgagaaatatgacggcaccaccaaccctgagtcttggctcaccgtctatggtctcgcaatccacgcagcaggaggagatagcaaggccatggcaaactatctgcctgtggctctagcggattccgcccgatcctagcttcacggactaccccgtggcatgatcggatcatgggcagaacttcgtgatcacttcattggcaacttcagggcacctttgaacgccccggcacacagtttgatctctacaacgtcgttcagaagtctggagaatcccttcgagattacatccggcgcttctccgagcaacgcaacaagatctccgacatcaccgacgacgtcatcattgccgcctttactaaaggcattcgccacgaggacctagtcggcaagttcggacgcaaacctcccaagacggtcaagcagatgtttgaaaaagccaacgagtatgccaaagccgaagatgctattacggcgtccaagcagtcaggcaccacttggaagccaaagaaggacacgccgaccgcaggagggagtggaagtaacaaccgcaaggatcgcaagtgtaagcccgaagaacttgtggcaacaacctctccatcttcccgacaacgtccccgcgtcaacacattcgacaagataatgaactcccaatgtccgcatcatcctaactccaaccacgtggccaaagactgcttcgtctacaaacaatttgcggagcaatacgtcaagaatgcacttaagccttcaaacggagagcaaggcacatcaaagaagaaagacgatgaagacgatgccccgactggttttcaagatcatcgcaaagaactcaatcacatcttcggtggacctctggcttatgaatctaagagaaagcagaagctaacagaacgggagatcaatgtgattcagcccaacatgccccaataccttcggtggtcagaaatagcaatcaagtttgaccgctcggatcatcccgaccgagtggtccacccggggcggtaccccctggtactagacccagtggttcgcaatgtcaagctccgaagaactctcatcgatggtggcagtgcactcaacatccttttcgctaagaccctggacgatatgcagattcctcgcacggaattaaagccgagtaatgcatccttccacggtgttatcccaggattatcagctacaccactcggccagatcactcttccggtcactttcggcactcgggagaattttcgcatagaaaatgtttgtttcgaagtcgctgatttcgagacagcgtaccatgctatacttggatgaccggccctagccaaactcatggccgtcccacactacacctacatgatgatgaagatgcctggtcctcgaggagtcatatcactacgaagcgacatcaagcaagccgtcacatgtgacaaagaacgttgcgagatggcccagacccgcgagattacactcgaccgagaagagatccgactggctacgaccatggcaagcgaaggagaagtgcccgcaaccaagatgctcaaaagcggagaaagcaatgctaagacgaaaaagattcccttagatccctctaatcctgataagactgctgtaataggcgctgagttagattgtaaataggaatgcgcgctcatcacctttcttcaaaataataaagatatctttgcatggaaaccatccgatatgcctggtattcctagagaggtgattgagcactctttacatgttaaggaagacgccaaacccatcaagcaacgactccgccattttgcacaggacaggaaggatgcgatcaaggaggaattaaccaagctgttagcagcgggcttcatcaaggaagtccttcatccagactggctggctaacccagtcctggttcggaaaaagacggggcaatggcgcatgtgtgttgattacaccgacctcaacaagtcttgccccaaagacccttttgggttacctcgcattgactaggtggttgactcaacggcaggctgcgagttactcagtttcttggactgctactcgggatatcatcagattcgactgaaagaatccgactgcttgaagtcctcgtttattacacccttcggggcctactgctacatcaccatgccctttggattgaagaacgcaggagcaacctatcaacgcatgattcagagatatttctcgactcagatcggccgcaatgttgaagcttatgttgatgatgtagtcgtcaagaccaagcagaaggatgacctgatcacagatttagaggaaacttttacaagcattcatgctttcaggatgaaactaaaccctgaaaagtgcatcttcagagtaccgtcagggaagttgctcgaatttatgatatctcaaagaggcatacaggccaacccggagaaaatcaacgccatccttaacatgaaaccgccaagctcccaaaaagacgtccaaaagctgactggttgcatggcggcactcagccggttcgtctcacgactcggcgagcgggggatgccctttttcaagctgctgaagaagactgacaattttcagtggggacccgaagcacaaaaagcctttaaagacttcaagagacttctcaccactccaccagttttggcctcgccgcatccacaagagccgctactgttatatgtgttggcgacctcccaggttgtgagcacgatcctggttgttgagcatgaagaggaaggccatattcaaaaagtccaacgaccaatttattttgtcagcgaggttttagccgactccaagacaaggtatcctcaggttcaaaagttattatatggtgtcttaattaccgtcaggaaattatctcactactttcaaagtcactcggtcacggtggtcacatcgtttccactcggggatatacttcataatcgcgaagcaaacggacggattgcgaagttggccttagaattgatgtctttggacatatcgttcaaaccacgaacttcgaccaagtcacaagctttagctgatttccttgccgagtggaccgagtgccaagaagacatgccagaggaaaagatggaatattggactatgcattttgatgggtcgaagaggcttacaggcactggagctggggttgttttaatctccccgattggagaaagattgagctacgtattgtggatacatttttctgcgtcccataacgtggcggaatacgaggcgctactccatggattaaggattgccatctctctaggcattcgccgattaattgtccgaggggactctcagttggttgttaatcaagtcatgaaagagtggtcctgtctagatgatactatgaccgcttatcgacaagaggtacgcaagttggaagacaaattcgatggactcgagctcacccatgtccttcgacataacaatgaggcagccgacaggctggccaattttggttcaaaacgggaagcagctccttcagatcagatgtgttcgttgaacatctttacgaaccaaccgtgcccagaaaagagacaattgaagccatggatactcaaggcgtgagcatgatcgaagccgactggaaagaaccgttcataaaatttttgagcaaacaagaacttcctcaagacaaaaatgaagccgagcggatttctcggcgcagcagactttacattattcatgaaacttatctgtacaagaaaagtccatcaggaatactgcaacgatgtgtgtctttggaagaagaagacaattgttgaaggatatacattctggtatttgtggtaaccatgccgctgcacggactattgtcggcaaagcttaccggcaaggttttttctggcctatagctgtatctgatgctgacaagattgtgcggacgtgcgagggttgtcaattttttgccagacaaattcacctaccagcccaagagttgcaaaccatcccgttgtcctggccgtttgcggtctgggggcttgacatggtcggcccgtttaaaagggcagtcgggggttacatgcatctctttgtggctattgacaaattctccaaatggattgaggctaaaccggtcatcacgattacggcagataaagctagatattttttcattaacattgtgcatcggtttggggtacctaatcggatcatcactgataatggcactcaattcactggcggagcatttaaagacttttgtgaagacttcggtataaaaatttgctatgccaccgtggcacacaccatgagtaacggacaagtcgagcgtgctaatggcatgatacttcaagggataaaagcacgagttttcgaccgactacgtccctatgctggcaagtgggtcaatcagctgtcgtccgtactttggtctttacgcactactcccagtcgggctaccgggcagtcgccgttctttttggtttatggtgcagaagcaatgttgccaagtgaagtggaatttgaatcactacgattttggaacttcaacgaggagcgttatgaagagggccgagtagacgacatcaatcgattagaagaagcccgtgaagcagctttaattcagtcgactcggtatttgcaagggttgcgccgttatcataatcggaatgttcgatcgcgagcctttttagtcggcgacctggttctgaggaaaattcaaaccacacaggatcggcataaattatctcccttatgggaaggaccgtttataattgctgaagttactcggccagtgtcacatcctgattttcgtttcaggatttataaattatttaataaattaataatagaatttatattaaatgttcattaatttacaagtgaagttaaatgtgggaaataaaatttcctaaatataaagcatggttggatttaatttttattaaattctccatggttaattatactctctggaattttctcggattcttcggagctcaattcttaattttaatcatacaaagagcatttcagtaattacccacatattaaattaatcattaaatggtctaattataatttttttaagtactttgagtgtccaagtattttcagaatttttcttgaaattatttgagcattggaagtatttttaacaattgaaagatcatttaagtgattattttaattggaaaaagtttttaaatccttccctaagtcgttgggccgatttcggcccaactctttctctcttcgcgcggccgaatcggcccaatcggcccagctggcgccgaccgccccctcctctctctctctgtcaaagtctgttttgcctccctccttcaatcgggccgaggaaaatgaagcccgtcaaaagtctactttgcctccctgctacagtgtcgtccctaaccttcagccggctgcagccaggccgagcccgagccgccaccttgcgccgcctttcgacttcaaatccgctccaatccgaccccgtttcttccggatttttgaggggttttgatcctctcatccttctctatcttttcccccaagaatcggagcaaatcgttgggtattttatccgaatcaaactcgttttcgagtttatctccaaaaccgagttttgattttcccggatcgatttcttgcgggaggagtccgatctcttcaatccaaggctataaataggaccccctagtcctcctctttcgtttgccccctctcccgtcctctcccgtgacccgtagagccgtcgccaccgtgcaagccgagtcgccggccgtcgtcgttcgtcgtttggcacgagggtgagtatcgttgggttcgtctcgtcgtcctctacgtgttcatgtcctccaaatccgcagccggtcgctctatctccggcgaggtcgccatcttggtccggccattgatgatgtcatcatgacgtcatcatcgtttttctttttcctgtttttctaatagattaaatcttcggaaattcataactaaatcatggtaactcggttttgagtggttcaagttgctaaattcatctaaaatcatgatctacatgtttgtttactttatatgtactgtttatttggtttttattagtctttttcttcgttttgcgtgttagcttgtcgtttccgtcgttgcgaaggttcgtgagtgcgtcggaagtgatcaagaagattacttgaagaccgattattgcaaggcaagtcacacagatcctaaacacaatcctttgagcatgttgatcctatatttaaattctctatttatttcaactgtgcatttattttcgaatgtcaccgggtggtgtgaacttattcctttgttatggccaatttacattgattactttattccttgataccttgggttattataacttgactagttgggctttatatattggttcagctagatattagttatgattgcttagccatgcttagaaacattagcacactattgggataacttatgactcactattatttaaggatggcttaatgatagttcacgatggttaatcgtgattggttaattaattacttgccaactaaaacttgataatggtgggttgtgagcatatggttttgatggttgtgctcatgacaattaaggaccggttcgcgagctactgttgtgaaacatttaccgtgccaaccacaagccagcatgggcaacggctttatcttttgtatagcgtgattcattatagtgcgccagactgagaagtggcgagaagtccacgggggtcgctggggagtccatgccttgtttataagggggtgattatgatccaggaaaggtgcgctgtaatgggttatgttgtgcaaggggtattgtcacaactcctttccgaggtaccgtggtggtattgaggcacatggtgacatgatgtggggttgtgtcttgtgggtacagtggtacacctctggccagagtaaaactattcgaatagccgtgcccgcggttatgggcgggttgagcaatgtttttcgtgattagtctcacacctctcacgataattatggatgctataactggtaataatttgcttagctcctggtttggagttagatctgtacagccgggtatggttgttcaggatggttgggcctgtgcagcatgggtgtgctgttcagtgttgattaaaatttttaattaattactctactgttttactactcttaactctttgctaaatgctgctttcgcaaatgagcctatattatgccatcctttggaatccttgtgcacttgcatatttgctgtgtggcttgttgagtatgtcatatgctcattcttgcaataatcaatcaacctcagttgaagataaaggatccagaaggagaagacgtttggcttataccccagttgagctgcctgtgggagtggagccggagcttcgctagattttatttttccgctgcagttttcttcatggtgaggactaagtgcctcttaagtaagtatttatcgttttagttaatgtgataaatctatatattaaattgtcagtttgtgtacctcggctgattcctggacgagggtttaatgcacaaataagttcggaaattactagtgaatttccgggcgtgacagccaggttcttatcgactcaagcgcgaagatggtactcccatcaacaattcttagaatattgaacaccttcatcaattttatgcttaggcattacgtttgtatctttcctctttgactgctaacctcaagtttttccttgaagttttcagtcggggggctactatgataataattgagtgtgatttttatcaattcaatttgcttacttgatttatcattgccctgtttggtctttcgacttagtcaatgaggactgaaggtttttaatagcttttgcgggttttaggctcaataaggctagataaaggcttttaagaaatcaaaagctaagtatggaacaccaagcatagcataaattcatcagtattgtacaaattgagcctccatcatcattaattatcaaaatcattgttatatcaatcagtatcagttttttcatcatcagacttatcagatccagtcggccgaaggtcgacttcttggaatctttcaaccacatcagcagcaatcttgtcagcggctttctgtgcatcgttaatgaggtcaagagcagcttcttcgctcgtcccgtctgcaaagccatcaatggcatccatatcaacccttggataaagggatttggtcatcgccaatgccagacttgctcccatacttccagcttctttgatattcttgaaataagtatctggagcgactctcagcttgtcgaagatttcggcagtatcaagtgtactcgaaccggcgttattgaagaacattgcctggatgagtggagtagcggcattagcgactttatccctggctccttcaagcttgttgatcttgtcaactaagacatcaaactgtgcttgagacttgatcttgcggtctgcatcaacagattcacattaatgaatcagcatatagaagataatggcttttgaggtattgattattggtaccttcaacctcctttaaagccgaatcccactgtcttgccagctctgccttgtcattttccagagtttggatctgcttctctagttgagatatcttggcagcttgcactacattaacttcggttaatcaagattacagagataacagcacaaatcagttgggcagagtttgcgcgaacctttggatgagccactcagttcaaaattggattcctggagcttagcaatccgatccctcagatcgtgttcattctttctggcaagttctctggcctcgtgcagttgactcctggtggtttcaagggttccaagatgaggaactagtttctcaagggttgcggttttcgcctcgtttctaagatgaatcctctgcagagcagtttaatcagcgctcgagccagacggcaaacatgatggctgaggtcaggtgtcaaggaacttacatttacaatgcaagtcgcttggttgagtgccttcttcagtaggcagacttcttcatcttctttttgccggtttattacaattccttgaggttgcaagttgtcatcccaccacttgaccagaatgggagagcacgaatcttcggcaaagtgtatccacttgaccacggtgaatttcttcttcatcaccaatcattggtcctaatgtatccactgacaaaggttagacaattgatcagagttatttgggtcaacatggtttcagacaaagtgtttacccgtaatgatttctggacgaggacgagtggattcggatgcccttaaaggagatccagatctccagtcattgctggcgtcttgtccgcgagggttgtctgcttgggtttcaacttctagaatctcttggcttggccctgcgtccgactggtttccagtcgggggctcctgattaactccggcttcggcttcggccgactggtttccagtcgggggttcgtcgctgggttctacattgttgctggcctacagattatcactcgggagatcttttgcagtcggcccggtttcttttgaggaactcgcctccatgttggtcgggtcagagtcttttccagatgggtctatatcagatggtttcctgcaagtttgattgtcagtactattatcgcaatgggtacgcatcaatgcaatgaagatcgtaatatgagttgcacctagaagacttcctgatctttggcacaagacgactggatgttttcttccttggagtagcctgcttcggcagtttattggttgcctctcggtctccaagctttctagcagtgtcgccttcgtcgtcacttagaaccagcttcctcttgcgagaatttggctggccgactggatcaggagcacttggttgagtttcagaccggattcttggtcctccgcttccctgaccagtttggcggtgaggtgattggcgttgagcgattggcggatccgatttcatcagagcaaattcctgggcgtgacatcctttattgttaactgattcaacaaacagataagaccgtattctgtgaaaagttgaagtgttcggttacataccggtggaggaggattaaaggcattgaatggcacgactggcagcaagtgtgaatagctgacaacgatagcattagagaagatcttatacatcctttccttcatgaccttgaagtcaagagaatctggatcttcacgatttgggtcgtgcttgccgtcaaattcgaaggctgtgcgagatctctctttgattggagctaaccgacacttgataaagtgccgtgtgatctgttctccctgaaggccttgttctttcagctttatcatgcgctccatcagttccactgcttgtgcagcttcgtctcccattggcagtgagttccaagtatcccgataaactggaggaagacaggagtactcggggagagcaggctcagggttttgaacataaaaccaatttgcatgccagcctttgtttgaggtcttgaagggcatggagaagtatttttggcttagcgttccccggagttggaaaccagcacccccaacaacacatggtttgcttttgtttggctggggcttgaggaagaagatgcggcagaacaaggcgaaatgaggcctaatgcccagaaaagcttcgcaggcatgaataaaattggcgatatgcactatagagtttggattcagatgatgcaagctaatcctgtagaagttcataattccccggaagaaccttgaggttggaagagaaaatccgccatagaagaaatgagcaaataccacgatttcgtgtgtatcgggggtcgggaatgcttcgccgaatgctggtcgccatccgatgatctcctttgctggaagaacgccgtgcgccaccatctcctttagattatcttccgtcacatcggaggacgcccactggctctcgaagctttctctctcttccgccatgaatgtggactggatggtttgatttggtccgagatacggctggaaagggatggggaattggagcggtgaatgcgggtagaaattttgtggagtgtttgaggatggattggagcggattgctgaaccctagcttggccggcgcagtttgtactgtagcaggaaatggggaaaatggtgagagtctcggcggggaagacgaagagacatttttcacttcggtgatattagagtatcgggagcgctagcaggcctgggccggcacagtacttcagcccaattttatttccagcgtggcccattgtgatccttagggacttaggcactttttgctttggcaatttgtgctcacaatgatgtggtccaatgctgttaaaaccctttttaatgcggtttgataattctttggaattaacacgatgcaaacaaaaggtgcccgacagaaaggtgttataccatttttgtaagctttattaggctgcaaaagctgtttgggttgatttgagatgactggtttactaatagttattcttttagcatgttatatgcttattttggttattgtaagggtcacagcctaggctattagacccattaatcaccgtgattttttatcatgtttggtgaatcattttaagagtttcttactcggattcctatcaaatatgtctatttttggaccttttgagtgttaatcactcggccctttcatatttttttatccttgatatgttcaaggagtgttgataaaaccactcggttcttgactacgtgtttagtttttcaactaattacatagtcgggggctatacctaattaggtgcatctactcgatgcaccatgttttattttcgcccttcgcagtctttgattttagcactcggcaaactggagcaagttgaattgaagcactcggattgctgttttttgtttcgagaaggttgttttgtcaactgcgaaggtctcgggggctactgtggagaatatggatatcccatttctacatgacagttataatttagtcggatatacggtaccaaatatagatagaatatctttatgaagactcgggttagttttttacttgtatgtcaaggaaatacccgagatcttagtcggttacgattgtattttatctataatcccatattccgttaggatatgggctgtattttgtaaagcggactccttcccctatataaggagggtccgtgtgcctctcggggcgcgattcttttttccaatttatacaatcaataacgtactcggcggaatcatctccggacaggagtaggatattacttgttgaataagaaggcctgaacctatataaaattccttgtcttcaaactcatccactttcctagcttgatagccaccccttttattattgccgaaatcttgtttcgacattaatctagctaattaagcaatggcagcctcgtcgtccttcgtgctcgcggcggcggcgctactcctccaggccgtgacggcggcggcggaggcggcggggcaacaaaaggagatgcggatgcgtgtgtactggcacgatgtggtgaccgggccgaactcgacggtggcgaaggtggcggaggcgccgacgtcgagggcctccgcgacggtgttcggcactgtgtacgtcatcgacgacccgctcaccgacgggcccagcctgacggcgccgtcgaggctggtcggccatgcgcaggggatgtacgtgagcgccgggaaggagacgatgtcgctgctgatggcgatgagcttcgtgttcgccgccgatgagccgtacaacggcagcagcgttgccatcttcgggcccaacccggcgaggccggtgagtgagatccccgtggtcggcggcaccggcgcgttccgcttcgcccgcggctactgccgcgccaccacgtactggtacaacgccgccggcgacgccaccgtcccgtacgatatccatatccgccacgattaactgattcattattattcctttgtgtcaaaatataagaacctaattaatatcggataggacgtatgaaatatctaatccgatcatagaagtttatattttaaaacggagggagtaattagttagccaggtagcgatacgttgtgtgtcaattactactgtatcatgtactacctctccatcccgtaataaagttcattttaattagcaccttctatttagcataaaataaatttatttttagagtaattattaaattagaatttattataataaaaattattattttaaaataaggtgaaaaatagttacattgcgatttgataaattaagagtaatttagctttcttggttttatattggtatacatgagatggatgaaaaatgaaattattttaggatgagaatagtattaggtacatggggaaaatgattttatctctcgagggatatccctagtttcgtgcataccacctaatagtcataaaaaatatgaaaagaaaattagcaacatagattaatataaaatatatcactccacaaacataagcaagttaaaatttaacttctacaagttataacaaaaataacaaatatagttgcgaatatacgataactatttttagtttaatttgttatttttgttacaacttgtagaagttgaatttggtcttgcatgtttgtggagtgatatattttgtattaatctatattataaatttttttaaaaaattttataaatatttagatggtatataaataacgaaggatgttccgtcgaggaatgaaaatccgtatcctagctacatgttgcatgcgggcatggaacccaaaacaaccatcaacattttaacaaaacaaattaagataatatgttacgttgtaatgagtactccttattaacatagacgtcacgtcagtcatacttcgagcttgatattattttgacattttatttaatgagaaaatatattatagttgactttaccgttgagtatcgtgattaaaactctggcctcaaataagatacgtcaagcgatatgggcggctgttaacagtgaaatttgataatcggtaaagacgccatccgcttagaatcattatcggctgcagcatctcggaatcagccgatgggagttatcaagtcgccaatagtcggattcctgctatattcggttaaggaaatcaatctattaaagggagcttatccctaagtgaccgagtttaaagaggatacggcatggcagtttatctattaattaggaatagtttgttagtttccttttatctttaggaaagtgtgtttagtgtccgataaggactttatattttccttttatatttaggttagtttctttcttatctttaggttagtttctttcttgtccgacaaggacttgtatcaacccctgggtataaatatgtacacccggggtctatgtaatctatctccacgatcaatacaattcggagcatcgccaccctttttatttctacttttgtttttacgtttcggcggaacttggcacccgacgcggggctgcatcgtcttcgatctccggtgaagggataagtccaatattccatcggcccaggcaattgtatcgtttacgtcggcgtcgttgaaggctgcatcagtacattcgacctcttggattgctctggtttggatgatatacttgcctatctatttatcatatatctctgttaatctagtcttagcatatcaatttagttctatcggctgcttctcattttagggtttctgccggtatcggctaaatcgcgttgctagattagattagcttagacatctaccaccctgaaaactcagtcaacggcttgattgtctagatattatatttcttttcatacttagtgctgcatcagttaagtttgatctactaagtcgtgcttagaactataatctctagcctgcttcttgattgccaataagtgtttcatcggggtttcagccggtgagttatctggacgttgcatcggctcataaggattgcatatacatataagttggatttagccgatgacaacaaaggcttcattgtttaagctaatcttgtggatttcatgacatcggacctccagccgatgtgtgctttgaccttcggatcgatgcttatttatcatatcattatttgctgattggtttatacttgattacattgttattttattacatcatcgtcagccgattgcctttatatcattatctacattggacatatagtcgattgcttaaaccctatcgctatcggctggtatcggcatcggctattatcggcatcggctggaactactccatcggcttgtcggccgatcggctgttttaatctactatttgcatatcttgtcagttgcaggatcaaactgactggcacgctcgcatctcaccaatctttggacctgcactggagttaagcagatctcccaggccgatgtgttcgattttttcgtcaacagctttagcagtccctgactccccctctcattttccacacgtatgtttttcaaactataaaacattacgttcttttttaaaaaaaattctatacgaaaattgattaaaaaatcatacttattcatttattttaaaaaatagctagtagtgcttaattaattacgtgctaacgaccgcccgttttcaccaacgaaggcagcccatggtgtctcacgttttatgtgggccaattaggcccatcaagtagccgtcatggtcaaagactcaaagttgaccacagccagccgttagatctaatctgaacggttcgcgttgtctcggaatcatcgcctgcatcacacttgacctgtggacctatggtgcgcgcggcggctagcgaaaccgccatggccgcggcgacgatcgagatcccgcgctcgccggcgttccggctgcttctcgtcaccgcggcgaggaagaatctcctttcgggcggcgatcctcgcgctcgccgactcgattgccggccgacgtggggagcaacgcatcgctcgattacacttacacaatccgagtaggaatcgaagtaaacctctctgtatttaatttgcaaggtaaatttgcaaccgacccatcgagcgatcgatctccgaacgaattcgatggcttccacgtcgaggaaacgttcggcgcgtagcctgcaagaagatgagcagacctcatcggcggcagaagcgccggcggcggtgcgagaagaccaagagcagctttccgttgcnggcattgaagcctggaggtttcgggtctcgagattctactggntttccgcgttaaagtcgaccccaccgacgccgacatggttggctgctatcttctaccgagcggg

SEQ ID NO: 16921 - DNA, 6373 bp, Oryza sativa
  unsure (1)..(6373): unsure at all n locations
agggcgaggtggcgatcctcaccatcgtccgcggcggcggcggaggcggaggcgagctcgacgtggtgtacaagcggcgcaacctgagcttccaccgccgcggcgagagctcctcctccggatgggtcatgcacgagtacgagatcacctcgccgccgctccccgccaccgtgctctcccggatcagggccacccccagggccaaggacaagaagctgtgcatcaaggaggagccctcctgctccacctccgccgccggcgagcgctctggccctaacccagaccacaccgccgccggcgccggtgacagcgccactgccaaccacaacaatacaacgtcggcggcgacaacaactatggcagcggcggtgtagtctaatattatccagaccagccgggtccgagccaccaatatggttacggcgagcaggtcgccggcaatggctttgtggccggcgacgggtggcggcggcgagccattgcacttgtgtgaggactgtgacggcaataacgtttatggctacggctctttgacagggaagagccgctgccgcgagctgactggacaatgtcgctggcctcgagagcagtcgatccacctccaatggcctcaggagtgacggatccaccgtcggcggcacaggaatggtgacctccatcgcctctccccgtccctcgcttcccacggttgagctttgggtagtggcagcacgcttcaggctcgttggatctggtggagctcgacgtgggggacaatgatgacagcttcatcgcctcttctcatacctcgctttgggcagctacgacgctagccttcaagcttacccgatttgacggtggctaggggtataaattatcttggagattttatggctaaaattcttttgcaggagaacatcttcacatgtccgcttacgaaaataagattttgcatgtggttacggtgccagcccataacaatcagtatttttatacatgtttggcgtctgtttgaaaaagctgaatatatatgatcgtttgagaaaaagctttctgtaggagtgcctttctctttagagtgttgtctgttgtagacattggctttaacgagctgtaaataagtattgtacagttacaatttctgtacgatttaattgccaatacttggactatagacaaaatatttttggactgaactataaactgatttgtttttctgttgacccgacttgacccggaataagcctagcacaaacgaagttaaactagaggccttgtcagcaagaacttctaagcgttcaaaaaaaaatctgttgatttttgaacatacagaagcaacataactttgctataattctgttatcacaatttggatagacacgtacagacgttccaaagaccaaaggtgatgatcggagcatatttaattacatcaatagatttctagaacatatataccgaagaagcttggaaattaattaaaccaagcatgccttcatctcaccaaatacctatatacgcggctacgcgtgctaatttcaccttaaaaaagaaaagaagaagaaaaccccagagatcgatgcgagtagttcatacgtaccaattcacagtcagcacttcacctactgcatctgttgccagcttcttcaaaagtccgatcaccgacccagtccattcctaccctctcacacgccaaaagaatttaaaataaattaacatatccaacttgcatgcatgcacgcaagaatgccataagaatttctacatgtagttaatccaagcatgcaagaattattgaagaatgcaatgtaaattaatcaaagtctaaattgaacacacgatcagctagagctaaccttaagaaggtgtcagaagataatatattttttcatcttttagagaaggtattatgagatatcgtattttttatgtaaaatttggtatatcttcaactactagatattccatgataccaaaatttttatgtgtaaataatttagatatctcaagatgggccaaaagtgatcatttttgcatgcggaactctggcccgtctaccaggaaagttatgaaaaaatctctctttttctatgctagtggagcacccgcatacgaaaattcaacttttgcatgcgggtgcttatatcgtccgcacttaaaaataaaaatctgaaaaaattaaaaatcgcaaaaaaattctagccaccgccgccgggctcctccctctgccagcagatccgggcggtgcccgccgcccgctggatccgcgtgggagccgctttcgccacattcgacgtgtgacggagcctgccgccgtgctccatcgctgccgctcgccgcccgactgttccgtgcaaggaagctgtcgttgcctccttcaacgtgcgggggagcccgccaccgtggtccgttgctaccacccactgcccgctgtcagccacgccatccgccgcccattacgaggccggcggaggcggatccgctcgccgcttgccgtcaaccacacagcccgctgctcgttgtcagccgcgtcgcccgccacaaaaatatatttaagaggcccgcctgcgaaacgggcgtctctttgagaggttcgcctgtaaaaataagcttattttagcgtgcgaatccttaagaggaccacttgtgaaaatcgatttttgcgtgcggtcctattaaggagctgtatgcgaaaatggagtacgattttttacatactggactagttacggtctgtctgcaatctaaagaggatcttgtctagaaaaattatttctgtagtagtgcataccgccatggcaaggaatggctcgctctttcatctactcgctggattggagacgtattgtttggcggcggccggtggcggtggcccgtgcggtggccgggcgcaaggaggccagcagcccacggtcgggcggcgacaacagcgactggattttttttattttgtgaatttttgtagtgaatgatgaatggtttgtatattttattggatattttttttgttgatttggggatgatctcacaagatttgtagattgtggatgtgtatgtattggggatgatttttgttgtgcttgatttgtggaaatttttattgggcatgattgatgatttgtgtggatttggctgggggaatagatacaagcagcaaaaagaaccaataaataaaagaaaaaaaacagttgggatgtggcccctatccatctttaaagatggatttttaagcccggttatttcacccgagactaaagatacctatctttagtcctgaattcgtccttcctgttgtaaaacccggagtacaggggttcccaagagggagtaaaacccctttctccactagtgttaactaatttatcctccattatatttctaacctgactgtttgcatatatccgaccatttttgcagtcgccttcctcgcggtgtagacgacgatcgaagaaccttcgaatccagcacacaccaaccacgtccccgacctccccctttaaattcacccatgcacacgtcgtcgcaaatcacatcacacagctaaagctagcttaatccgaaccaagcaatggcggcctcctccctcctccttggtgttcgcggcggcgctcctcgtccctgccgaccgncaacggcggcccaggccgcaaaggaagacgaaacctgcgggtgttctgggcacgacgtggtgaccggcgggcccaaactccacggtggcgcaggtgncggaggcgccgacaacgaacgcctcgacgacgggggtcgggcacggtggtggtgatcgacgacccgctcaccgacgggcccaacctgacggcctcgcgnctggtcggccgcgcgcaggggatgtacgtcgccgccggcaaggacgcgctgtcgctgatgatggcgatgaacttcgtgttcgccggcgacggcccgtacaacggcagcagcctcgcgatcctcggcgccaacccggcggagcgcgccgtgcgggagatgccggtggtgggcggcaccggcgtgttccggttcgcgcgcggctactgccaggcgaccacgtggtggttcaacgccaccaccggcgacgccaccgtcgagtacaacatccatctccgcctcgattaattcattcattcattctcattacttgagacgatgatattgaagatgatgatcgtgttgatcagttcattttactgccggtttttgctgtgtgttgaccagttgattactagaatatataagctgggtgtggtgtcatatgctttttttttccctgtaaaaaaacgctagctatgatttttgttgttgttgttgttggtaggggtgtattcttgaggatgattattgtttataagttcttaatgtgttttagaataatgagagcttcattagcttacctttgttacaattttttattttgatggatggtaatattcctccaagatttttgtgcacgccttggttcacctaacactgaccatcccgtcaagataacatatactcaaaataatcatggaaaattttccccactaaccgagcgtcgtatccacacaagtgttgccgtttccgactctaacaatatataaattttagttttttctaatttattcgatcttcttgttgacactaaatagttggtcaattccagattaatcgataatatttttcgaacagatgctaccaattctatccgtttctatccttagggagcgttcgttctgataagttagggtgagaaaatacatcatagtccacgcacacgcttcccaaactactaaacggtgtgtttttggcaaaaaatttctataggaaagttgctttaaaaaatcatattaatctatttttaaaatttaaaatagtttatactcaattaataatgcgctaatggctcacctcgttttgcgtatcttcccaatcttctcaatcccctatccctcaaactcacccttagagcaagtttaatagtatagcccactactagctccaattcatctacaactaatctaatagccaattcatacaatagttgcttactatactattaatatatggtcccacatgtcatgcacacattacatcttgaagtctgtgctgcagctcttctctctcttattataaaatatgtttatagctggcttattttgttttcactttctgtaatgggatcagcattaatacattttatagataatttttggtaaaattctgcacgaaactcagcaataacaaggtacaccatcggttttatattattaagtcatttcgattttttttttctattcaaacatttttaagtttgatcagaaaagatatagcaacatttcaaacgcaaaataaatatattatcataatatatataatgttatatttaatgaaactaatttggtgttataatatgttactaacttttgttataaacttggtcaactagtaaaaagttgtaatatgaacgaagggagtatttcatatagctgcttgctaatgtaatacatatagaaaacatagcactgaaacatagtcgacgacttaatttaatttttcgcagaaaagcatatagcaatcaaagatcaattaagccccatgtaaatctgttactaattctcataataattcctggcttactttgatgcaacgataacgatcagtatcaccttccaattatctagacaagatcatcgccttgcaccggcgagctgttcgacgcggactccggcgacgtcgacggcggcgacttcgccgggcagctgatgatgtcgcgggcggcgaaatgtagccgaagaaggcggcgtgtggcgacggcgtctaaaaagatgacggccattccggcggcggcgctgaggtgcttggcgacggtgaaggcgacgagcgcgacgtatgtcacgcggaagatgccgcgagcgcgcctatcccggtgaggacgccgacccacccggcgagcgcgccgcacgtcgccgacgagagcgcccacacgacggccgccggctcgccgccagcgcggtacagcgcccacacgccgagcgccacgcacaggaccgacagcgaggagaggccgcacgtggtgccgtagtcgtcgccgccgccgaccttctcctccccggcgccgtgcccggatgttcgccctgaacagcaccaccggcgtcggcggtggcgaccgcggcgacggcgcgtctgtcgtcgtccagctcgtcgtcggagttggccgtgacggtgtcgtaggcggcggagttcatcttgcgtggtggcgttggtgtttggtgcgacatcttggcgacgagagcgaacaagctagggctacgtgaaattatactatgaaattaattgctgggatttactaaggtcttaataatcggtggataaaactaaaccccggtaaaaaggtagtaatattaccacgaatattttggat

SEQ ID NO: 16922 - DNA, 5492 bp, Oryza sativa
ttttttgatatatttagtaaaacatgttcgataaacttggtgaaacaacgcccccgatttttaggcgcctcgcaactatattccccaaaaacttaccacagtgctgtcaagtactcctcttaagagggtataccaaagtgggggtgcatagtaccgcttgaccagtccgacgtcctacacatgaagggctggaaggtatattttaaagccctcattgttgtggaacccttaacttgtcttacaatagcctaaattccatcatgtagtgcccatagaacgactgaagtttaggccttagcttggtataaccaattgagagatcgagaactttacaattctacattccaaaggaggcctaggagcagctccagtgtttggtgaaatcgatcgacgcgtgtgaaaaaaaatcgaactgaacgtctaattaaggtggtttaaagatggttgaaagaaaaaagataaatgaaaagataaccatgtaaaaactgggcccgtttagttgcccaaaaacttttcccaaaaacatcacatcgaatctttagatatatgtatggagcattaaatataaataaaaagaaaaactaatagcacagttaggtgggaaatcgcgagacgaatcttttgagcctaattagtccatgattagctataagtgctacagtaatctacatgtgctaatgacggattaattaggctcaaaagatacgtctcgcggtttccaggcgagttatgaaattagttttttcatttgtgtccaaaaaccccttccgacatccggtcaaacgtccgatgtgacacccaaaaattttcttttagcgaactaaacaggctaagtcatataaaacctttagttttcctacaaacagtcgtactccctccgtaaaaaaaaaactttttttgggacggagggagtacccatcacgactaacgagagagcatcatacttgtcatctcctcatttattagtaaaagactccatcactcctgtcgatgataaaaaagaaaaaaaaaagaaaaaaatccacatattgcttcccttccatagtttaacgtttatatatattcacacacatacatggcacgaacaatttaaaatgttccaaattgaaacagggatgctcacaattaatttagacgtcaacaaagatgggactcaaaatcgaatcagaggcccatgacccctagagcaacggcaagatgggcaatggcctgaaacgctgaagcaaccttcttgatgggagagtctgacgctggcattttcgtcgatttgagcagggcaagcatcacaagtttcccgccccaccagcaagccggaagcgtcggctgctgtccgaggttggctcctgtaattgagatatatcacaccaaaatgacatgaaaaaaaagtgaagatgttttgtatttagttgttggttgttaattgaaagcattttacaccaaaatagaactgattgatcacatggaatttctgatatatcatttatgtatgtactcgatgcaactagctaggcctaatactttattcatgtggatacttaaaaaaatctttaaaataaatcgatatatggggttgggattacttagttttgaaatcctgcatccaccattcttcgatgctcacagtgatggaggcatggagccagaaattatcaaagaataaaactaagttagactcaactaatcagttgttcttttttttatttccaaaatttacatggtgatttgagagaattttaacaagattcgggaaacaatcctatggctcaaagtcctagatacattggactgcctccactcctggatgcgtatgggctacttgtagcagatatggtggtacatacaacttacattgcgattaaatggatcaaatataagttacaatgtaattatactataattatatatatatatatatatttagaagaaaaaatatcgataaatgtatagcaaaatcgttttgtcatggtgactatattgtcatacttgtgatacgcaacaactgaccttatggtgcacatgagctcattgtagtggtcatagacggcgagggtgtagccgaggacgccggccatggctaagccggtgagccagtagacgaagagggcgacgacgaggctgtggaggacgacgccggcgatcaccgggaagatcacccaccacatgcccaatcccgtcacggccatcgccgacttggcgccgtcggcgacgagttccccgcgcagcagcgtcccgttcacgaaggagaccaagcacaggaagtacgggccggagaacaccgccgcgtcaaacaccaccaaccccgccggcggcgggaactccggcagcatcatcatggtgacgatccccgcgaacgcggccgtcccggcgacgatgagggagaggaggcacctcttggatgactcgcggtgggccctctccgcctcggactcgtacgccggcgtcgcctcggcgatggcggagtggtggtggcggcggcgctccgcgacggcgtagcccagcacggcggcggtgtagaccgtgccgaggaacatgcccgccgcgccggtggcgtcggcgaggaggaggaggaaggcaacgcggacgaggacggcggcgcgcgctgccgtgctccacgacacggcggccgtccacacgaggaggtagccgccgatcagcggcgacagcctccacacggccgcggcgaaaatagtcctcctctttctcaaagccgccgcggccgcggggcagcagggacgccgcggcggcgacgaatagcagggacaggacgcacatggcgacctgggcggcgcggggtagcgccgccgaggccgagcttgccttctcctcgccgtcgtcggcgacggcggtggtttccatgttagccggcgcctcgatcgtcaattagggttttcgatagcgaacatacgtacgtgtacacgtattatgaagataacataaataattatataataaaatcgaattgcatacatattccgtatatattctgcatcaaagcaattcttttctatggaaaatcgtgttgaagtttctactttacatattcatgtgacttcaaaaattaattaatactttgagcaaccatataagatggatgaggcgtgatcaaattcatatggaaacatatatatatgatttttcttcttttgtaggggaaaaaaatccaagctagctcatctacccgtgttctgtagtcaaatttggcacaaattaaagtattaaaaaacatgcgtggatcagacaaattaacttccaatcatacatcttgcatatatatgtctagaccgaacaatcaacaaattagcgatcacattcttatagaaaaaaacatatacacgtctggaacatgcatggaacagcgggaaactattttaatccctcgaggggatgtcccctcgttatttgcatgtccccttattgcgagatacaaaagttgaatttgaacttgcatgtttttgggtagtagtaatatatcacgcgttaatacatcttcttaattttttttaatttttttataaacatttgaatgacatgaaaacaacgaggggatatccactcgagggatcaaaatccactcccatggaacggtaaatcaaaatgttccaggctaaaaaaaggtcgataatttgatctattgaaactacacaattaataattgaggtcaagaatatattcatggatccggcacattaatttctagaacaatgacaagatgggcaatggccagaaacgctgaagcagccgtgttgatgagagagtctaacgctggcactttcatcgatctcagctgaacaagaatcgcaagcttctcgtccgacgagcaagccggaagcgtcagacgccgtccgaggttggctcctgtaaaatcacagctaaaattaatcatatgaaacagcaagcaagatgtgtgtatggattatatatattgatcgaccgatctttaaacgtatttcacaactgactctctgaacgtattgtgaccagggatcgcaatttcggtcccaccgggaagtgattatctcaaccagaattttaggtttctctcatatttttgtgaatttggtcaaaatttagtcaaattcagttaaattatgctaaaatttcacaaaaaaaatcggtccaaaaattaacaaaaatcccaatatttcggtagaaccgaaatgagcgaagttttggacgaaattgaaatcgaaaaccctgattgtggccgtgtttaattcaacttctcacacttgtgactatgagctaaaattagtttctttttgaaaagatcatattatatactactccctctgtttcatattataagactttctagcattgctcacattcataacgataagtcttataatatgaaagacgtcaattgttcgattttatcatttactccctcgtctaaaaaaaaagccaaccttagtatggatggaacacttccaattaaggacaacaagtctgtcccatccacctagtacaacaaatctgtcacattcatgtcaaggttggttttttcgggatggagggagtaactttgactggtatagttatgtttaaaatttttcactagtccatacgaaatttctatggtcgaacaaagacctaattataatggtgtagatttgtagttaccttatgatgcgcatgagctcctggtagtggtcgttgacggcgatggtgtagccgaggaagccggccatggcgatgccgaagagccagtggccgtagatgaaggcgacgaaaaggtggagggcggcgccggcgatggccgggacgatcagccatgacgcgcccaggcacgccatgacgatccacatggtgtcgccggagatgaaggacccgcgcatcagcgtgctcgtcacgaacagcgtccagccggcgaggtacggccccgacaccgacgccgccaagcacagcgcgtccgccgccgtcggcatgccgccgccgccgccctccgccggtgcctccttccccaccacccatgacgtgaggacgagggacgcggcgacggtgaccttcaccaagacgacggcgacgaggatgccctccttgccgtgctcgcggcggtccctctccgccttggtctcgtacaccggcgtcgcgtcggcggcggcgttcgaccgggggcgccggcccgccgcgtggtgccggagctccgcgacggcgtggccgagcaccgcggcggagtagaacgggcggcgaacatggccagccgcgcggtgagtcggagtggccccaccagggaagcgcggccttcgcgaggaggagggaggcggtgacccctacgaggcgggtgggcgtcgccgacttcctccacacggcgggccgcaatgaggaagatgtagcccgaagatcacctggcgacagcctccacactgcgggcggggaagttctcttcgtcgccgtcgccgcggggcagcaagtgcgccacgtccgggacgaacagtatggacaggacggacatgggcaccattgtcgtagatggacagcgccgccgaact

SEQ ID NO: 16923 - DNA, 5502 bp, Oryza sativa
  unsure (1)..(5502): unsure at all n locations
agtcctttctcggtggaacagaaatgccgtccctggttacaatcgttaaagacgtcatttgtgtaaacgtgtacggatgggcgtacaacatatatagtccacccacgcttatggcagaagttgtcaatctcgcgggtgaatccattcattaatagtgtggttttgtgaaaatatactaccaaaatatatgtacttaagtaccaagtgttagtgtttgtggttttctataacttggaccataaaacgtgtagttttgtgaaatttactctagaatatatcgataaattgttttcttgtgtaaatacagtcggatttgcatatatattaattccgtatatatttgcatcaaggaaataattgttggggtttagtttatgaaagcaactgatggaatagtcaatagtggatgtgaaaactgaaaacaagatcagaatatcagatcatgtattgtattnnnnnnnnnnnnnnnnnnnnaacacaagatcagaatatatagcagatcatgcattgagtttgaggatagctgaaaactgggtgcctcatgaggcaaagaattagggttggcaacggggcgggtcgggacgggttaggttggaacgcccctgcccccgtccccgctctccgacttcttccccggccccacagaggtggtcgggcgggaaatatcacccgtccccgcccctgcaggggacccacgggtagttagcgtagatcaaatcggattgtactaattatactcagtgtacatttgtatcaagcggtctgctacttaattatagaaaatcgtgcagaaattttctgctcaaaatatatatattcatgtggttgatttccaaattaaattaagttttttgaaaaaaaaaagtgcaaccatagttatatggttatgcgcattgatttcttggggttcctatatatttattgcgtacatgtgcccagcaaactaagataagcatgcgcctatgtcagcgttctttaacatgatcaacatttgtgacagtggcacacgtgtcgtccataatgattccacgtaatcagagttctttttttttaatgaaaccgtttgatttagcacattgcatttttttatggtttttgctttctaacatctaaaactatcgattgaattctaaaaactcaatttaaattctaaacattttaattagaatacgtctcaggcaggaaccattaccggctaattaagttctctagcaaaacactactccctccatttctaaatatttgatgccggtgactttttaaaatatgtttgaccgtttctcttatttaaaaaatttaagtaattattgattcttttcatagcatttgattcattgttaaatatactcatatgtatacatatagttttacatatttcacaaaagtttttaaataaaatgaacggtcaaacatgtgctaaaaagtcaacggtattaaatatttagaatcggagggagtattaattgactttggacataacgtttaatcatttgtgacgtagtttgcataatatacgcacacaaatcaataaattacctatgtgcctcatattctttataagaaaatcgtagaaatgttccaaactagcactccctccgtccaaaaaaaaaaaaggaatagtatttgtccagattcattacactagaatgtcacatctactagattggttttttacgggggcgaacggagtaaaacggaaccgctacggatcagctcttcacttgacagttaattaaataattggggtcaataatatactccgtattcattccgtattcatggctccgacacttgtctaggacagtgccaagatgggcaatggcctgaaacgctgaagcaaccttcttgatgggagagtctgacgctggcattttcgtcgatctgagcagggcaagcagcacaagtttcccgccccaccagcaagccggaagcgtcggctgccgtccaaggctggctcctgtataatctcagcaaaaaaatatatatatatatatgaaacggcgccaaacaacactttgtagtatatacattgattgattattaattaaagatatttcagaagaatatacaattgtatataatggtgcatctgtatatactaccttaaaagactttaagtggtgctatatcacccactaacggacgttataaagttgtgatcgaaaggaattaaagcgatttatattatgtaataaagggagtagtccttagttactctatccatattttattgtatgacactattgattttttaagatacgcttgaccattttttttttcaaaaatttttatgtaagatacgcattatgtaattttaatatacgtagtatcatctattttattatgacttgatttattattaaatattatttaaatatgatataaatatttttatatttatataaaaaatttaaaataaaacaaatggaaaaacgtcggtaaaaagtcaacgacgtcatatattaaaataatacggagtacaggaaacacttttaatcacctaggtggacatccacccatttggtgcatgtcaactaaataggtatgaaaaaattcaaaaaatttgacaagatagatttacatgtaatatatcacccccacaaacatgcaagttcaaaaatcgtcttctacaagctgtagcgaaaataccaaatcaaactctaattagtatacgtatattcgcagttaaatttgttatttttgttacaacttataaaagttaaattttaagttgcatgtttgtgtagtgatatactatatatcaatctttcttgtaattttttttaaaaaaattttatgatcatttagttgatatgcacttaatgagtgaacattcactcgagtgtttagaatccaccttcagtacttaccgtatgatgagcatgagctcctggtagcgctcgttgacggcaaggctgtagccgaggaagccggccatggcgatgccgtagagccagtggccgtagagaacggcgttgatttgccggagaacgatgccggcgacgaccgggacgaacagccacgacatgcccacgcacacggcggcgacgcacatggcgtctccggcgacgaaacacccgcgcagcagaatgctcctcacgaacagggcccagacgccgaggtagggccccgacaacgtcgccgtcacgcacaccacgatcgacgccggcgacggctcgtcgtcgtcgtcgtgccccgtcggctgcggcggcggcgcgtcgttctcgttcggctgtagcgaccacgcgaggtaggtgatcgcggcgggcatggcctccacgaagaagacgatgagggcgatgaacttcttgcaggtctcgcggtggcgccgctccgcctgcgactcgtacgccggcgtcgcctcggcggcggcggcggcgtccgatgcctcggatgcctggtggtgccggcgctcggcgacggcgtagccgaccgccgcggcggagtaggccgtggcggccagcatgggcgcctcgccggcgagtggcccgaccagggagtcggcgtcggcgaggaggaagaaggcggagacgcagacgaggagggagggcgtcgccgtgtccctccacacggcggccgtcacgaggaagaggtaggcgcataccagcggcgacagtcttctcacggcggcggcgaagttctcttcgtcgccgccgcggggcagcacgtacgccacggccgcgacgaacagcagagacaggacggccatggcggccatggcggtgctgggcagcgccgccgacttcgccggcttcacctcgccgtcagcggcggcggcggcggcttccatgtcagccgcctcgatcatcatatattacgaacacacgtctatattgatatatatgaatgatgaagataaataaatgggattctcaattgcatagatattccgtatacatttgcatgaggactttttcctattaaaatgggtgaatagttaaaatggtcccctaagttttatctgaggctcagtttagtccctgatgtttcaatctatccatattagcccttcaatttttcattttagttcaaacttattcttgaaccaacaattctcttcataaatgacacttatacccctcatcattcacatatataagagaaaaattgcatgcttgaattttttttatagataatacatagataatacaaacgtatacgatagcaattgcttaagtttcatgtgcacctgttaaaataatagaaagtacatctgtaatgttgtttattcatgttggctttctcttttctaggatatagttgtatacaaattaagggcaaaaagaacattttttaatagaaatattgactagaaatagccatatggcatattaagtgggcccaaggatgatttcaagccaaaataaatatttggaggagctatgtggacaaaatgaaacgtgaaggaccaaattgtgccttcggtggaacttgagggactaaattagctattcaccctattaaaatcatgcagaaattgtgtgctttacatatattattcaagtgatttccaaattgaagtttacatttttacagccatagattaggcgggaaattaatttcctacgaaattattatggaatcactcagcctcaacacagaatctactaattcaggggaaataaagtgccatcatagtgaagtaatttcctaatacgaaattttctttagcagctggaaataggaacgacttcaaacattcatgaggaaaaaaaagacttgtttcatggtaagaactgcaattatacttgaccacctgattgtaccctacagtcacaaaagaaaaatctgtatatatagatgtgcctttttatatatacaattggcacgtttttaccctggcaaaagttgtaaatatggtggaatgcattcatattaacaaccacttaatttgcatctcaatctgtaatctcttcttgctaacaaaaacgaaaaaaagaagaggcaaattttcgatgcctaatttctgttcaaactgacaatatggtctggctacttagaggtgtcaaaaatgccaggccgtttgctgcctaagtgctctagctagctggagtattatatcatggttcagctcgctgacacatgcagtcaggcattgggagggtgtatatggaaatggaaccatttggtttcctgactccgaaacccttcgactcgctgtgccgatgtatgtcctgcatttggcgcttgaaccgatcccatctgcagccaagaaaatatagttgggtttagttcttgatcaggtgttcactggtgtaaagtggggatcaggtgttgactttgaggatcgctgaaaatagggcgtctaatgaggcaaattttttttatttggaaacttaaaagggaaacccggaaccatttttaatgtgttttaatgggtggtggaactccggtccaaatggcttcatttcattgctctacttcttgaaattagtaagtgggaacagggtattagtggcaatgattagtaaggtgtcacaaaaagttatagttgacatggat

SEQ ID NO: 16924 - DNA, 1787 bp, Oryza sativa
  unsure (1)..(1787): unsure at all n locations
agagctttagaagaagatggtagaataattgaggaacctgcagaactgaaagctcacatatatcagttctataaaaatctgtttggtgctgaagttgccccaaaaattttcctaagtcaagatatgtggatgcatagagggaggctaagtcaagaagagagagagcatctaatcagaccctttacctttgaggaaatggatcaagctttaaaacaaatgaagactgatacagcccctggtcctgatggattcacagtgagcttttacagagccttttggccccagttgagggatcaatttaaagaaatgttggatctactatttgaggggagactggacttgtggagaataaactatggtgtgattagtttaattcccaaagttaaagatgcaaacactatcaaagctttcagaccgatttgccttttgaatgtctgctttaagctaatcaccaaaattctgaccaataggctgacgctagtagcacataatgtaattggggagagtcagactgcctttattcctggtagatttattttggatggggtgattattttgcatgaggttttgcacgaagtgaaaaaaactcaccaatctggcataattctaaaattggattttgaaaaggcatatgataaagttcagtggagtttcttgtttgatgtgcttcagaaaaaaggttttgatgataaatggatcaagtggattaagtcagcaactattgatggaagagtagcaattaatattaatggggagattgatcaatactttaaaactttcaggggagtcagacagggggaccctctatcacctttgctttttaacattgtggctgatgccctttctgagatacttttaaaggccaaagaggctggtcatctggaaggcttggtacctcacttagtgcagggggggctcacgcatttgcaatacgctgacgacgctatcctgttcatgaccaataatgatcagaatgtgataactactaaatttatccgactctgttttgagcccatgtcaggattgaagatcaattaccagaagagtgaggttatagtccttggggagagcccagaagagcctaagagagtggctggcctttttagctgcaaatgcggtaagttccccatgacttcccttggcattcctatcagtgagggaagcctgacagcagcagatctggctattccccctgataagattgagaaaagactttcaacctgcaaatgtggtttactttcttatgggggaaaagcaaaccgtgtcaattcctcacctatgtatatgatgggctttaatatgctccctgaacaaacccatcagagaatggattctattagatcaacatttttttggaaaggaatagaaagaaaaaggaagtatcccatggttaaatgggaggctctttgcagacccaaagattttgggggcttaggttttcttgatactagagtgatgaataaggtacttttgtgcaaatggatttttaagcttgaatcagggcagaaggacccctgctgtgatttgctaagaaggaaatacatgatgaatgggggaggctttttccagtcaagtactgagggatgctctcaattctggagaggtttgcatgaggtaaaacactggttgaaattgggcagctgttatgatttaggggatggcagtgctactagattctgggacgatgtctggctaggagatacacctctgaaaatcaaatttccctacatttacagtatagtggctgttctgntgnggtcgagtcgaatgcatgtcatnntcaccat

SEQ ID NO: 16925 - DNA, 723 bp, Oryza sativa
  unsure (1)..(723): unsure at all n locations
ttattagcatcttgttaagctttgtctacgttttcttgtgtttctcaaacgtcatcgtttagtttatacgtatctgtatagtcacgtagacgtaaaccatttagccaagatttttcacctgttgtatcacggttcaacaagaatccaagttgaataaaacctgtttctactgggataatcgttgtattagcaaactcagaagagccactaatcaaatggctgtacttggtgtacgtagtaggtacttgtatatttacgtgaccattcaaatacaaatatgtggagccgtcagaagttgggctaagtgtatgccctactgggaaaatcccatctgaactatttgggtttgcaactgcccatggcttgtttaacgtaatcttgttagctgtggtgtcaactgcaccaatatcatatgtcctcatctgcattagctgactatacgttccatcgggataagtatagccgaacgagtttttataaccccacatgataatactacgttggtagtcttgcggtgcctgtccgttccatagactaacatcttctacaaaaacctctgtatccccgactttaagtggttttgctagttttgtaaatttaacaggggtagtagagttgtagtttcgtcccccaagagaagggtacgtaatacggttaccatctacgtcatatggggcaatcatagcataacttctaccgacncctataagcgttttactcatg

SEQ ID NO: 16926 - DNA, 46128 bp, Oryza sativa
  unsure (1)..(46128): unsure at all n locations
ctggaccnggtgagattcgtttcacgctggagcaatcacagccacgaccctcgaaaaccactagagtcgacctgcaggcatgcccactctttgatcctccaaggcatgaaagtgcataaacaattcgaatggcacttaaccttggtgtaaatgtaaagatgatcacaggtactcttccaattgggaaaagaaaatccagatgttctattttttttatgtttttttatcacatttccaaaaaaaaaattatttcaggttgttatggtggtgatagttcatgttcagttattatatggtggatcagtaactgcaattttcatctacaatatgatgaacaactagcataaatgttcagtactgcaacctgttcaatcggaaatgcattattataatgtgccataaataagtaactcaattttcttcattaaaaaaaattaaaaaatccattgctcttctgtcattgtttggagccatgggaccatcaccagttcaaagagtctttagctctcatttactgaaaagaagctgctgttctgttctcttgaccattgtgatctatttaatcataactagtgaacatgcacatgcaaggcacgttttcgtaatatatatctttgctgatcatatactggtacagtattaaagaatcatcataggcaccggtaaaaatataattattgcattggttattcatgaaataaacctaatttgttattttattacatagcaacggaatgggaaaaatgtaaattatttgtcatgatagatttcatgtccacttccagaccagtcgctttcatgagatgaggtagcgtcctttagctctgatttgaccgtcctacatctgatggcattattgaggtattcatggatctgagatgaggtagtgtttttcagctctgatttggctgtcctacctggattctgatatcatttagtaggtcgtctctaacgtatggatgcacatgtatataatacgacacatttagtattatgtattttgtatatttaagtagaagaaatgaaatatgtgcatgtacctcgaatggaaccgtacacctcacttttttgggaatagagagttacagacaagctgcaaaacaaccaaattgtgtaccaacactttattaaattattttgtttgtatgaaaaaaaaaattgaccagattacaatgtcttcaaatcgcctgatcgaccctaatcgcacaggcggccatttacataaaaatggttgagatgcaaccaacattaatcatttcaactcaaaattgtattttgcacagtatcaaacacatactggtaaattgttcctttagtcaattcacataccacttggcatgtgtaagattatacattatacaaacagcttggagagcaacaacagtgacaattgtaatatacagtcatgaacagcaataaccttaatgtatctaaaaaaacatttatcaaaaaatcagtagtaaccctgtggtgaaaacaactttagaaaaacaactcccacagcacgatactgggagagccacttaccatggtttccctttcaacgagctgaaataccaaaggtccgaagttacatccatttcattgatttgacatcattacatgctaccgctgctaaagtatttccaacacccaaaaacgcaagttctactttctctattctttctatttaagtttttctattcagtaaggactaaatatatgaagtatctgagttagaaatatttgattgtgtcttggaaatgctattagctcatattatcatagatagtattattttacctttataccagagattagaaatgtacttttttactgttgttggctacaattacgatttgcaaagctcaaagaactgtctatttagtgcattttgctcttggaaggtacaatctgattttgtatttcgttgttctgattctaaaaaaatatctataaaaaatgcattgttccttaaaatacaatataaagaaatggatttctataggatataaatgcatagcaatcaaactgaaattcaataagccagtaatttacatatattgaattaatgaagtgagtatttggatgtacctgcactgtctcaagatatcaacacagtaggcatctctagtacacagattcatctcaccactgcaaagaaataaagttaaataaaggaacagacaaaggtgaaaggaaaaaaaatcgttaaatgaaatccaaatctcaaaatactctacctcttctttgttgtctcctcaacccctaaacttcacaaaagaacaagaaatcctaaaaccaccacagttcctgcaaactggaaaagcaggccgttgcatgatcctctcatattgcgttttatttcttatgaccaacgtagtgtcgtgcgccaaaacttgtttctcacctaccatgacctgatgtcaccaatgtagtgcacctcgatgacaagatagacaatagtacagtccggctgctggttgaactcaagctctcacattaaaggccctatatgatcagaaaaatacctctacttctgccccttttccaatgtgggaatttgtatagaagaattcaacccctctctgggtgcaataacttttgcctggctttctcttcaaaaatcgactaccaacaaagacaaattttcccacgaagaacattgtggaaacagcaaaatacaaaatctgcttgcatcaagacaaagatggcgatcacttattcttcaagtgctcctttgctgaagctttcagcgaatcgatgtttgcctagaaggcacagtaaagaaaagagaaactttatgatatatatatatagtagaaatgtgaaataaaaaaaataactctttttgcgggcaatccaaaaaacacttttgtgaaatgaacaaccgataatatataacacaacccctatctccctcggtttactcaggttgctagcgctccagttttctcggtgcatgagtatgggcgatctccggtgatctcgtccatggtgacgccgtcaccgccgggaggatggaaattctctcctggtgatgctattcgtgaagaggcttggcgtcgcttctattcgccggtccatttctcatcgaaattcagttcgtcacctttccggttagttgtggatcttccccgtgctagctttcgtctcactacttcttcggtggctgtggcccttaggactgctattggtggatctcctgccgatcttgtggtcactcatcttaaggatcgttcttactccttcgtggtctgttcgaagcaagtgggtttgtggatttatcgtcttaaatcttacacttgcggcgattttgttcttcgtttcttcctttggagacagggggccgaattggtagtgggaatttgattcttggagtcgggaacagaaaaaggaatgggtgcttgtggctcccaagaaacgatctacctcttccctaagacggccggatcgttcttatgctcaagttgttcagcaccgtgatatcctgattaagcaggttttttcaagtctaaaggactccttcttacgtgcctccaagcctgaccaacaaagaatttctgttttccaccggcttgataagaggaaaacagtttttatcacttctctagcgacctccaaggcggccgacgctgcgtagtcgtctattctggcaacggagttaattacgcatgcgaaaggtacacgggatcctaatttgtcgcccatttcaaatttggaaaacactccttgcggccgttgcctggaaaatggccattctcgggtttcttgttctgggccgcttagatgtcgggcctgtctcatgccgggtcacttagcccgtttctatttgaccactaagcccacaaaagcccaacaccctaaaaagctgaaccgtcggctcggactactactgtttggaaggccaaaactaatactctggaaatctcgccttcttcctcctaaaaccattcttctcccaaacacacagtgcttcccacccaaagcttccctttgctcccaatggccaatcttaaccataatccgcagcgcttcctaaggcagggtcacgctgtgaatgttgggggtgacttccgtatcccgcgggtcgacctcactatcctgcagcaccatgctcggcgccatgaagacttctatgtggccattgtagagccaatccccttggagcaggactgggatcatcatcgtgccctcattgccaactttgtacaagatgagctacactatgaggttcgtaatagcttccagcacccgtctacagtaggtttcttccagatgaagtctgctatgaatagggatgctctggtcctctctccgcccgagttctatgatggggttcactctgttacttttgttaatcatgaccaaggtcctaattggagggcggctaactaccatagagagggctggttcatgttcctagattttccgcttgatttcattgatcgccatcatgtgcacctggcagttacctcttttggtctgttaaccttttgggcggatgcagacagaatgttgggaagggtttttgttagggcaaagtacagggaccaggattttgtgctgagaaagattgttctctttgatcctcttggtgctgggggtgggggtgaatcttggacaatctcgattttcatgctacagggggattttattaatttcccccctgaagaggatctcccccctgccggtccgcagccgggccctgatgatgcagctgatgaggaccctaatgatggtaatgtttggcagtttggcaaccctaggaaccagggggctagaggttgggatgaggcagtgcagcaacattaggctgcaaatgaacagcaagaggatgcctggggccaagaccatctgatggggcaaattgaagaaaaccttggtcaacttattctgcctcaacagatggccacacctctctgatcagctaggaaggcaaccgtctaggatcctattctagacccacaagtctaggaattcttagctcagctgaacagaattgctagagatgaaactccaaggcacccctacttttatcaaatgaaaggcatattggacaagattgactttctctgtaaagcaaagggcatcatgcagactttgatccaggacaagcctatccctgctgctttgagaatggccaatcctttctcgacattggtcctgccaaggaagtacatctttgattcctctccctcagtgggccaacatgaacctgaatgggctttactgcctttcgagtctaattcccctcctctgccggaaagggtgattgaggatgttctaccaatcagtgtgaggcccccttctagcccaatcagtgtggcccctattgccctgcttccccccaaggcaccggtaaagaagaaaagatgggaagaccattctttacagtccttacagaagacaaagctctagacttctgcaggacatggcaaccaaagaattgcagatggatccaagaatgggcattgggaagccaaggggcaggtctgctaaaaagcttaaggaattagcaggtattgcaaaactctttattaatagtagtatgcaggagtctgatttcaatgaaacttcttatagtgatatgaactctgactcctctccctctaattgttcactttcggtcatacaaaagatgggggtagacatgtgcaggctctctcctaaagaggtggcagaatccagcctggggggtgaaagaagacagaagatccccaggccaaacatggaggataaataatgacgaaagattcagtcttgttgataggcctatgttttccatttatcatgctccaagggtctgtaatttgtttactgtcaaagttgttttattagatatttgtcctgtcagactgccaagacttgtgtgaatgtcttttggtttgtttttcggttagctgtgctagcctgggtacttttgcccctcccacaatggtgtgataatgaatagtaattttaaatcttggaatgtcttgtgctggaacatcagaggaatgaatgccgaaaataagctactgtctttaaggcagaatattgaagggagtggttgccaggttttatgtctgcaagaaacgaaaatggaaaactttgagctttctgacatcaagaaatttgcccccaagcgctttgcctcttttgcttttgccccctccatgggtgcatcaggtggtattctaattgtttgggcatcaagagttttcactgggacacccaaagaagttaaccctttctctgtgactgtggagttaacttctagattcacctcccaagtttggtccttgacttgtgtgtatgggccatgtaatggccctcaaagatcagattttgtgacctggtttaaaaacatccatattgatgctaaacagaactggcttttcctaggggactttaatttctacagatctatttatgatagaaataaagtgggagctgatatgaatgatattttattttcaatgagatcattagttctctaggattgcttggaatcccattaaaagggagaaggttcacctggagcaatatgcaacaaaatcctttgctggaaaggcttgattgggttttcacctctacatcctggactttaaccttccccaatacaactgttctccctctgaccaagaatatctctgaccatgttccatgtgtggtaaagattgatacaaaaatccctaagtctccaattttcagattttaaaacttctgggttgaagcagagggtttctttgatgtggttcagcaagtttggatgttagatcctggttttgatgatcctgcaaaatgtatctccttcaaattgaaaattatgaggaagaaactgaagctttggactaagaatttgtccagaatcatgctcctcttgagtaactgtaataaaataattgattttcttgatcttctagtagaagagagaaacctttctttatttgaatggaatttcaaggaggtagttaaacatcgtatcttaaaacttctagaattctggaaaatatattggaaaaaatgttgtactaatagatggatgatgctgggagaagaaaacaccaagttctttcaatctattgccacaggaaaggtacagaataaacacaatttctcaagttttgaatcatagtggtcagatagtttacctgcatgatcaaaaggcaaatttgttctatcaaagtttcaagaataggatgggtatctcttgctccccaacaatggactttaatttgaatgagcttttttcatagaacagatttggagtgtttgattgacatgttctccacacaagaaattggtaatctcatcactatgatcccagtagataaggcacctggcctagatggtttcaatggttatttcatgaaaaaatgctggcatatcattgcacaagacttctatagacttgtggcacattttcatgctgaatctacatatttatagatcctgaataattcttacatcactcttgtgccaaaaaaaccttctccaaaaacagttaatgatttcagaccaatttccctaatgggtttgagtcttaagtttcttacaaaattgatggctgacagattgcaaggtgtcattctcaaagtggttagtgaaaaccaatatggattcattaagggaagggccattcaggattgtttagcatgggcttttgagtatatttatcaatgtcagcagtcaaaaagagaaataatcatcctcaagacaattgaaaaagcttttgatacaattgaacacacggccatcttatctgtaatgcaaagcatggggttcccacaaaaatggcttaattggatgcaaatggtattctcctcgacaagctctgtagttctgttgaatggggttcctggtatctcttttaattacaagagaggagttaggcagggagatcatttgtctccacttctttttgttctaggggctaaactcttacaaagaatagtaaacatggcttttaatcttgatttaatttcaaagccagtcaatgaaaatgatggaagtgggttccccaacatccaatttgctgatgacactttgatcctgttaaaagcttcaaaaaaagaaatcttctgcttcaaggcactactgaacatatttgctcaatcgattggcctaaaagttaattatgcaaaatccagtctttatcccctcaatctctctgaagaaaagccagatctaattgcaggatttctgggatgttctgttggaaaactgcctttcacatatgtgggactccctgggaactacagggcaaagagtgattgattttcccccctggtagatagagtggaaagaaggctgacatcaagttcaatgttcttacctcaagggggtagactgactttaataaactctgtcctatcatcaatacccacatactacatgtgctccctacaattacccgtcactattatcaaggccattgatactgtgagaaagaattgtctttggataggaaacaaccttaaatccaccataaaatctttggcctcatgggaaaaagtttgtacaccaaaagaaagggggggggggctgggtgtggttaatctaaaagtccaaaatgcagccttgcttatgaaacatcttgttaaagtttactctgcagctgatattccttgggttaatcttgtggctaattcttacctggtaactaaagtccttcatctaataaacaaaggctccttttggttaaagaacattattgctcttgttgatgtttttagaggaattgccaaatgcaacataaggacaggcactacagttctattctggacatatgtggaatgatcaattcaaatgtcagcaatatcaacacctttatgcttcatctctatacaaaaacaattttgtacaagctatgtgtgccaggccattggaggattctttcaagttaccactctcttatcaagcctattgtgagtatctcaaccttcaagatgaactaacacatcttcacttggaacaaggaaggggagattcatggagtttcatttggaataacagttgttttacccccaaaagattctataaactcaatttggctgccattcaagcacacagacctctgatctggatttggaagaccaagtgtgtaatgaaaataaaagtctttgcttggttattcttctgggacagattgagtacaagagatatgttggataggagacattgttgcaaagaagatgacgatctatcatgtgtacggtgcagcactaaccaaagggaaactagagatcatcttatcttcaactatccatttagcactgcttgttggcagtttctgggaatttcatggaatgctaatattgaattttaccaaaggatagcttttacaaggtggcagttcaatgagcctggttttttggaaatcttcttcgtggctgcctggcacatctggaaacaacgaaatggcctcatcttcaggaatttgcagccaaccttccaatcttggaagtctctttttacagatgaaattcttctgcatctctgcagaatgaaggatcccctgaagcaaactattgttaattggttacaatctttatagagttttttcattttctcttgtattttcctgtaaatattacctgtaaaatattccttcaataaatgaaaatcacactgctgggctaagccctggcagtactttcagtaaaaaaaaatataacacgctttgatgtttccacacatcaagtgttattcagaccatttcatgagataaaccagtagcacctaaaaacacatgaacaattatatttagatgaataatagcattccgtggatactttctgaatgctagcaatatatatctagcaggctagaataaatatatgcatacaccgagttaaagagattagtgtaaactgagttacgctcctttcataaatgaaacagagcagagcataatccatgtgaaaaactgaaaaccatacagaaaatggagctgaattgataactattaagccttttcgtttgccctcttagcttccgttagaactgcacataaacaaactgaacaaatatccaaatttgtccagtaaatgcataaagatgcaaaatataagcagtggtcaactggagagcaggtccatatttgtacagtaagtgcatctgaattcagagtcatggcaagctttaccaataccaatatcagaattgaaagtcatgccaaaaaaattaagtgaagcaccatatagaacctgcagcagtgaaaattaacaagttcgtgctgaactttgtaaagtagcatctctgcttgcaatattaactcagaaaggaaagatcttaaatttgatctggctaaattgctagctaggatcctgatcttgtcatcagaatcaaataaactcccttgaagcactgctgccaaataaaaccaaacatcaacgtgaaaaagatgccaatatagaactctgaataaaataacagataaaagtagtagtcctgctaagaatatctttaatttcatttccaaatgacacagccatgtatatatagacttttgcagcgtcaattcttggtaacacatgaaaatcataaagacaatcatagcatgtaaaatggctctgagtaattgagtccctccaagcagaccaataccatgcaggaaggaccagaaaagaaaaagctaattttcagtggtttcactttctgttagagtgctcattccgatcttgatgttgcgtgcctgcagtttcattcagctgcatgtccaataccagtacgtagctatcaaactttaggttgtcatttaacaacttgacgttggtctagcattatcttttatgtaatcacaccaatgtttgatgcaaactcagtatttgatgtaatcgatacgtattggcatctagtcagataatagtaacaccaattaaaatttatatttagtagcataggaaatatgcatcatacatacaaagtgcttttaaatacgagcacacaattcagcacaaaatgcagcacaaaaattgcacataatggcacaggagggagaggatgccgggagtgcattcggcaaacctgcacgaggtcgctttcaaggatgatgtctaggaagccggatctgcacatgacgtagttgaggattgagataaactgcaacaggatgatggaaataaactccgatgacaaagtgcaccaggcgatggacctgcacccatcggggacgggtggaacaaatcggcgagggcgcgaggcggcgagggcggacggacctgaaagcggcgcgagcagagaagcagggagcaccgtggagtagtgtgggcgtgtgaggaggaggaggaggcggcggcaggcggggacggagattgggtgcggcacggaggagaccggcgacggcggcgaggcgggaagtagggcggctccagcgggaggcggcggcggcgagacgcgcgcgagcggaggggcggcggcgggctcgcacgaggcgagcggctccggcgggaggcggcggcggagggagcgcagccgcgcgcgagcggagttgcggcggcgggatcgcacgaggcgagcggctccggcgggaggcagcgacggtgatgcggcccgcggctccggcgggcgggcgcgcggcggcggtgctgacagatcaggcgcgagggtagacagcggcgcccggttgtccggcatgcgcgcgcgaggaggcgagtagggcgtgtagctccggccggcacgtgcgaggaggaggcgagcgactcctacaagaggcggaggaggcagtggcggcgggggaagtggtggtaggggggagcgggagagcaggcagacaagggagcggcgaccgggattccatgagcggcggccgacggcggtgaaggaaccgtcgacacgggagggggttgcgggaggaatcgggagggaatgcgggcgaaggggggagcgcgatcagggaggtgcgacgtggtcagccgatggtgtaaggtttgtttgggccggatgacaggtgggtcccacacaaaggattgcatgattgttgatgaacacgaactttttatatctatactttctatagcaaaatgccgatgcttcgctacggtgtattaaaactaaaaatatttgtttttaaccgaagttattttcacactgctttggtattttttgctcactagaaaaagtctcaaataatagagagaaatatagtagctcataataaattattattcaacagtgcgttgcaacggaataattttaactaaaatcacaataaatatttttaggatttaatttgtgatatgagtaaggtattcttgatataaatatgccaataaacaacatgttgaaaacaatatatttcttgtttaccagatttaacatcaacaaaggttttgtagcaattaaaaaaaagactaacttcctcttgttgggtaattgtattttgttgggtaatttttatttttagttttttcctatgaattagataggagatataattgagagagctaaagtggacttgttgcttttttttaaaagaaaaagactaaccataccgaatgtggcccaacaactcaatcgcacgtcgttagtgcttcatgggctgcatgcggcccagtagtgctgcatcccagagatggaggccagcccaatgcgggattgatccgagccgctcattttgatggatggctcggatcagtttcaaatccatcaaaacagctggtaccaaaactgatgcgaacccgctacggtttgtggcccgatctttcgatgagaggtaagggataactcgattagatgaagacgacgttcacggcccgactacaactgtccaaagacgctgcgccttagcaaccgatacaccgtctccaatggtcgccgcgaacttgtggtgcgcgtcaacccggccacgagggcactcgtcctgcaagtaatcgaagaacaagcaagaacaagtaggacaagcactgaaattgctagataaagatgaaagtttcactatcaaactcaatatggtggggttccgattacaggcagacgggcggtttagccaacacgcgcgctgcgagctggtagcaagaagctatctctaacatcaaaacccgcctgttcttggcggcgactagaggtataaaaagaggggaagaacgaccatagggtcgtgctccaaccctaggacgcgcccctaatgggcccaacttggatacacagcccattgggccaaaagaggtgacgcaacaccatggacagaaaatagtcgggagtaaaatgacaattgcggccgctccagaacagatatggacatgtggctggatccatttgaaagtagacttgataagctttccatgaagtacttgcacgcccaaatcggagtttgcatgaagtcgtggcggccgtcagaagttggcgctaccctgcagtccgaatccaccccgcgcgaatcctcttccctttggatcctctccatcgttcctgagtaaaatacgagtgcacgcgtctccggggtataaagacgaggaatatgaactcaagaaagaactcacctgataatttagttgacgtgcacgagcgcgggtaataggaccatcatgctgtacatggggggacgtggatgtatcgatggtgttgatgtcctcatcatcctccccttcttgcatttgagtcgtcctcgactcaagctcatcttcttctcccaaatacggcttcaaatctgcaacgttaaatgtggaactaaccccgaaatctgcaggcaaatcaatcttatatgcattctcattaatctttgctaacactttaaatggtccatcagctctaggcatcaatttagactttctcaaatcaggaaatcgttcttttcgcaaatgcaaccaaaccaaatctccaggttcaaaattcaattcccttctacctttgtcaccagcaaacttatacttagcattcatgcgctctatgttttctttagttgtctcatgcagttttaacatcaactcagcacgttgcttagcatcaaaattcagtttttcagaagatggtaaaggcatcaaatcaattggagcacgaggcaacaaaccatacacaatctgaaaagggcacatttttgtagtagaatgcaaggaacgattataagcaaattcaatatgaggcaagcattcttcccacatcttgatatttttcttcaaaacagccctaagcatagtagacaaggttctattcaccacttcagtttgtccatcagtttggggatgacaagtagtagaaaacaaaagtttagtccccaatttagcccacaaagttctccaaaaatggctaagaaattttgtgtcacgatcagaaacaattgtgtttggcacaccatgcaagcgaacaatttctcgaaagaacaaatcagcgatatgagaagcatcatcagttttatgacatggtatgaaatgtgccattttagaaaatctatccacaaccacaaaaatgctatcacgccccctcttggtcctaggcaatcctaacacaaagtccattgaaatatcttcccaaggaacagtaggaacaggaagaggcatatacaaaccatgtggatgtaagcgtgacttagccttttgacatgtagcgcagcgagcaacgaacctgccaacatctcttcgcatctgtggccaaaagaaatgactagcaaggatgtcatgtgtcttcttggcgccaaaatgtcccatcaaaccgcctccatgcgcttcctgcaacaacaacaggcgaacggagctagctggaatgcatagcttgttagctctgaaaacaaacccatcattgatgacgaatttgttccatgttcttccatccttacaatgcagcaacacatcattaaaatcagcatcatgcgcatattggtctttgattgtttccaggccaaaaatcttgtagtcaagttgtgtcaacaaagtgtatctcctagacaaagcatcagcaatgatgttctccttccctttcttgtgtttgataacataaggaaaagattcaataaattcaacccatttagcatgtctacggttcagcttcccttgactacgaatatgcttcaaagactcatgatcagaatgtatgacaaattccttgggccacaaataatgctgccatgtttctaaagttcgcacaagagcatacaattccttatcataagtagaataattcagaacaggcccactcaacttttcactaaaatatgcaacaggttttccttcttgtagcaaaacaccacccaatccaatcccactagcatcacattcaagttcaaaagtcttattaaaatcgggaagttggaggagaggtgcatgagtcaacttatctttcaacatgtggaaggcgttctcttgtgatgtgccccaagtgaaaggcactcccttctttgaagcgcattcaatggtgcagcaatggtgctgaaatcctgcacaaagcggcgatagaaccccgcgagtcctagaaagctccgcacttgtgagaccgttttaggagtcggccaactctgaattgcctcaaccttggcttgatcaacctcaatcccctgcggagttacaacatagccaagaaaagaaactcgatctgtgcaaaaggtgcacttctcaaggttaccaaataaacgtgcatcacgaagagcattaaaaacagcacgtaaatgattaaaatgttcacccatagacttgctgtaaatcaagatatcatcaaagtagaccaccacaaattttccaatgaaaggacgcaaaacctcattcatcaacctcatgaaagtgctgggtgcattagttaaaccaaaaggcatcactaaccactcatacaacccaaactttgttttaaatgctgttttccattcatcacccaacttcatacgaatctggtggtaaccactacgcaaatcaactttggagaacacaatagagccactcaattcatcaagcatatcatctaacctaggaataggatgacgatatcgaatggtaatgttattaatagctctacaatcaacacacatacgccatgaaccatctttctttggtaccaaaattaccggaaccgcacatggactaagagactcgcgtacataccctttatcaagcaactcatgaacttgacgctgaatctccttggtttcctcagggttggttcggtatggcgcacgattcggtagggaagcacctgggatcaagtcgatttgatgctgaatgccgcgcaccggtggcagccccggtggcacttccttgggaaacacatcagagtactcctgcaaaatgttagcaacagcaggggccaaagaatgctgcatatcgtgaagtgaaatcaaagcatctttgcataccaaagcataggcaactgaaggtgatgcaatcaactcattaatatcagatttagtagcaagtaagcatctgggtttcaaattgattgtctcaggtttcttgccatcagattgggcttttttatcactctcacatttggatttggcagccttagcaacatcatcacgcaaaatatcttcaggagacatgggatgcaacacaattttcttatcatggtacagaaaagagtactggtttgacctaccataatgcatagaatccctatcaaattgccatggtctacctagcagaatattacaagcttgcatgggcacaacatcacattcaacaacatcatggtaatttccaattgcaaaattaatgtgcaccagttttgttaccttcgccttaccactgttgttcagccattggatgtagtatggatgtggatgcggtttggtgctaagtgcaagcttctccaccatctcgctgttagccaagttgttgcagctacctccatcaatgatcatgcggcaacaacgctctttgacgacacactttgtttggaacaacgtgtgtcgctgattttgctccgccttctccatttgtgcgctaaggacacgctgcacaatgagactctcatagtgatccgcaaatgcagccccaatgtgctcttccggtggctcattatctgcatggtcagccgcaagcaaagcaagtgtatcatcatcgaaatcactagcagaggagtactcaccatcgttttttactaccaaaactcgcttgctagggcagtcacgctgcacatgcccaaagcccttgcaacggtggcactgaacatctctcattcggcctgtggatgccattgaagaagcactcggtgctggctgagcagcctttatcgctgacttgtcaccagatggaggaggtgctgctcgactggttgtgggtgtggaagatggagaagtagtacggccggccggaggagtggtgcgtgtctgccatgatgaagttttaccagcagaaaaattagccttggcactagcacgtcgtccctgcacttcccttttagccttacaagcaagatgaaacaatcgggtcatattagtgtaatctttatagtctacgatgtcataaatctcgcggtttaacccacccaaaaatctagccatggcagcgtcctcagtttcctctaaattacaacgaagcaagcccatttgtaactcctgataatattcctctacacttttcgcaccctgtctcaattgttgcaacctattcagcaagtcacgtgcatagtaagaaggaacaaatctagcccgcatgacccgtttcaaagcatcccaagtttgtggcatgttattaggatttttcttgccatgttctatccaccaaaccgaagcaaaatcggtgaactcactcgtagcagctctaactctagtgttctcaggaaactcatggcatgcaaatttttggtcaacagcaatctcccaagagaggtacgcatcaggatcatattttccatcaaaaggaggaattttaaatttaattttagaaaaagcatcatcattgttgcgtacctcgcgtcggcggcgaccacccatacctcgtcgattgttgtgtagccgtcgacgatctcgagcatctcgatcatcttgttcagtgtcagcaatatattcatcctccaaattatcctcgacgtactctccgtcaatgtcatcgtcattacccccaccattgcctccagcattgagagcatcaaaatgcctcacaagagcagcaaggctagtgtcaatgcgggcgaccgctgtctccagccctgtaagcttagtgttggtggagatctgcgtggactccaattgtccaatcttctcatttgtcacctgcaaatctgtatcaagtccttctgtgtgctgcttcacttgccttgtaaagtattggatgatgcctttggtgcgtggggaatgagatgcaccctcctcatctttatcctctagacctgccatggtttagaaatgaaggacaacaaaacaatggaggatgtaatgtaagccctacacaactattgggatgtagcttttgcaagacgctcattctcacttcactcgcagcttgtctcacaagctcttaccagttcttaccttgcccacaggagggggacagcaacccacaagttagcaaccgtggaacgaggtgtatcggtgctgtagcaacaagacctgtcaagctgtagtcgggtttgtggtggagctgttggtgggctgaaagcaatgctcaagagaaaactagaaaccacgttagccaaagcaaattgaataatcgctcaagggtatagtgtacagtgctggtcctaggctagttgaagtagagacgcgagcctaaccacaaaggatgccacaaaacacaaacccaaacagcaacgaaaacaagaaccggtggtggaaggtggtgacaaagggggaatggtggggtgtgctcgctggatccttttttttttttttgcttgctctctctagtgctgaggagagagacacaactttttttttatttttttcttttgatatttttttcacaaccaggagcacactagaaccaaccacagaaaatcttatctcaaacggacaaagtatgaagcttgtagaatttttttcaaagttctatgcgaataggtcccgaagcttctcgccacaaaaacagaattttgcaagaggaatttggcgattttaaatttgccgaacccggcaatgccagggagaatcggatgtaactttttttgtagatgtccgtggatatattataagcctaatttcgagtccgtatgaaaaagatatgactgttttaaggaaggtcactcgaatcagggttctatttcctttctagtggcggcaggatacaaggcaactcacaaaagctatcggcagcaaatcaaacacaaatagaaagtgatttagtgggtgactgcgacggtggtgacggtggtgatgacggcaaaattgatgaaggtggcgatgtgcggtggtggcaagaactcgaaactctaatcgcttaacactaagaccagcaaattaacacaaccgatgcaatcaaaaactcaacaagccttaactaagcagtactagtaaaaaggcacaatggtctataggatcacgggaaaactaatctactatttttttttggtcttttctgggctataggaaaaaaaattaatgacgaagggaagggtaaattctctcaccgatgaaccacgctctgataccacctgatgcgaacccgctagggtttgtggcccgatctttccatgagaggtaagggataactcgattagatgaagacgacgttcacggcccgactacaactgtccaaagacgctgcgccttagcaaccgacacaccgtctccaatggtcgccgcgaacttgtggtgcgcgtcaacccggccacgagggcactcgtcctgcaagcaatcgaagaacaagcaagaacaagtaggacaagcactgaaattgctagataaagatgaaagtttcactatcaaactcaatatggtggggttccgattacaggcagacgggcggtttagccaacacgcgcgctgcgagctggtagcaagaagctatctctatcatcaaaacccgcctgttcttggcggcgactagaggtataaaaagaggggaagaacgaccatagggtcgtgctccaaccctaggatgcgcccctaatgggcccaacttggatacacagcccattgggccaaaagaggtgacgcagcaccatggacagaaaatagtcgggagtaaaatgacaattgcggccgctccagaacagatatggacatgtggctggatccatttgaaagtagacttgataagctttccatgaagtacttgcacgcccaaatcggagttcgcatgaagtcgtggcggccgtcagaagttggcgctgccctgcagtccgaatccaccccgcgcgaatcctcttccctttagatcctctccatcgttcctgagtaaaatacgagtgcacgcgtctccggggtataaagacgaggaatatgaactcaagaaagaactcacctgataatttagttgacgtgcacgagcgcgggtaataggaccatcatgctgtacatggggggacgtggatgtatcgatggtgttgatgtcctcatcaaaaaccctaaccagagcttcagtttttcctctcccaattccctcaggctgaaatggcgaaggcggcgatttttggcagtgcgacggcgacaaggcacccgctccccgcgagcggcggcggcaccctccccccaacgagcggctgtggcggcgccctctgtcccgtctcgcctccctcgccccctcctcctctccctctcatctccctcccgcggtggcagcgggttggcggcggcgtcgacgttggcggtagccgcgggcggatctgagggtgatggcggcgtcggcggcagccacgggcagatccctccgccccctctcgcctccctcccgcatcggatccgatggcggtagcggcaaccgtgtgtggatccggcggcagttgtgatggccgagggtggatacgttgatagcagctcctcccatgactgatctggcggctgctgctccctctccccagcgtggcgggtggctgctgcttccctccccggtgtgttggcagcagctgcccccctccccagctgcccctcacctccccgacatggagccaacggtggttctctcggtatagctgtagtttgatttttgatttgtgaatattctgaggattttatgatttgggatgttgatacagtggagattgtttattttgatttgggattgcaattgagtgattttgtgattcatgtgttttgggaattggggccaatgggattgggagcaatcggctcgattagccgattgatcgagttggattttttttttcactccaatgctgtttgattaaatttaaatttgtctgtggggatctagctctgggattttttttttaagatagactcggacacaaacaacggatgaaaaaaatcgatcggaagccttacgtattttttaagtaggtatatagatatagatattgcctgtgatcttaatagtgggatagaatctgactcgacatagaatcaggatataatctgactcctgacgtgggctgggcaaactggagtaggaatcggtgtggggtatttttttgcgtgtgaacctggagtcgtgtgtttttttgtgtatatatgcgatatttttttggtacgcgatcttttttcttgcgtgaacctggactcctcgtttttgtgtatatgcgatcgttccttttttttttttttttttttttttttttttgacatgactacatagagaccgcactctatattgtcttaaccatagactcatcttacacatggttgcatactaggacaccaaatgatacatatttttttttcttcttatagatttttcttttaaattatttatccgatttataatccgattacatcattgtgttcattgcaattaaatctttacaacaagatcttacatgactatattttgataaaagaaatatatatgttataaattacttttattatatatgtaagtttatcatatatataaattacttttcgatttgattaaattacttattatacaatcataatgttgtgagttgtttattttattatcttttttagtcaattccatattttgtgctgattaaatttaatttttagatagactcacgtttttatctccataatggaactacttttaatgttatgacaaagttatttcctttttgtcttaagttacttctataatatatgtaaattactttaaagctttactgaaattacttttatatgtctaaaaagtaatttagtgaaatctaaaagtaatttagatatactataaaagtaatttgtaatttttcatcaaaatataatcatgtgagatcttgttgtaaagatttaattcttatgaacacaaccgtgtaatcggattataaatcggatgaatagtttaagagaaaattttatttaaaacataagtgatagtaatatattttctatttacttgatggggatagtgctacagttaagacatctaggtagggtctctcgttagcactaaaacgagaagcctcttgatttagattttgccttttttttatgcgatcttttttttttggcgtgaacctgaactattgcctgaactattgcgtttgtttgggtgaaccaagaaggagcatgggcttaaaatctggatgaacctggaaggagtatgggcttgtagatggatctagaatcctgaaagcaatttagaatcctgtgtatgggcttatagatggacctaaaatcctggaagcaatttgggcttgtgggcttgtggatggatctaaccaaatcaaaaatcagatacggacaaaaaaaatcatattggtgaaaaattagaggcatatgacggacgaaaagttacggacaaaagattatgactaaaggaaaaatacaaatcttttaattagttaagatataagtgtgaccacaaacaggcaccatgttgagccacgtcataaaaatagtttcaaccgtaggatcgacaagtcttttcaggactagcctttagataaaagtcccctccacttcctcaccaattaaacaatgccattgatcaccaccacatctaaatgctatctatttaatcaggtagttaattggacaacagcaatcaagatattagatcatatttactattccaaccatcattcaatcaatttgatatacatatgctaatagaatatatatatatatatatatatatatatatacatatatatatttatgtatgtatatacacacatatgtatatttatgtatgtatatatatgtatatatatatctatgtatagaactactacatggcgctgtgcgccccacacaatatatgacgcgtgacacacatatccccccactctaacccaccgcaaccaacgcacacgcactgattcatattcgttagttaaatttttattcattcagtataaccattcgttgaccaatattgtaacaatgcgcagatgtgcatgtatagttaaattttaacttttatcgtatacatcgtgtactagcaaatttttaacttaaataaggacaggacaatgctatgatctttttttttcgttaatgtcttggagttattttttaactctgattttttttacaagagtcttagcgttttctttcatttttttaataatatctgactatcatttatacagcggatcttcaggggagtctctgattcatatcattagcgatctgatatactccctctatcccagaatgtttgacgccgttgacttttttaaaaatatttgaccgttcgtcttattcaaaaaatttaagtaattattaattcttttgtatcatttgatttattgttaaatatacttttatgtatacatatagttttatacatttcataaaagtttttgaataagacgaacggtcaaacatgtttaaaaaatcaacggtgtcaaacatttagggaaggagggagtatatcttaaaaaagctaacgattcaaccggtcaccaacgccacatcaatacaaagttaatatttaactcaccagacttttagatgcatacttcatactagccagggatcgaacaattgcattagagtttatgtaactgaaagttaatttgtaacaactattgtagattgggatggaggcaggccatctgcatttagatcgcattaactaatcgtccgtgttgcgcgcgacagagccccaactcaaattactttttaactaacagccctgattgaattagctaatcgtgtgagtcgcgccacattggcttcgctggcgcgcgcaccatgtgtgtcgctctgcgtagcggctccgtatctatgtatacatacatacatacacacatatatacatacatacatacatacatacatatatatatatatacgtacatatatatatatatatatatatatatatatatatatatatatatatatatatacacgtacatatatacatatacatatatatacgtacacacacatatatatataggatacctatgtagccccaattaatttacctatatatatatatatatatatatatatatatatatatagacacactagaaaaatgcccgtgcgttgcaccgggtaatgatatggtgactgaaatttgatttgaactatttttatgaagaaaatgaattataatttaatgaaatataaaattttctgcaatattaattacactcttttaaattatagcaaaagtggtcttgcgttgcaacgaaaagaaaaaacagataaaattgaattaaaacatattaaattctaattaaattctaatatttggtattttttaagtagataggtatctaattaaattaatttataagtaaagtaagtgtaagaaataaaatgttatggttggatttaacttttattaaattttctatattaattatacttgttgaaattttcttggaatttaaatagcttaattgctaattttgataatacaaatatcatttcaacatttattaaaatagtggtagtagtgaggatagtgccctcatatctaataggttaaggtggtttgggctatattttgtacgggtatgggctattactctatattgtgtgttgtttggtggtttgtaatctctacgtcacccttcgtggtcttgtaatagcctatgtttatctgtgagccctttttaggatgttttgcgacttttgtgatttgaatggttaagtgatgtgaacttgtgcgatgatggatggtgtatgcgatattgatatatatgtgagaccatcttatgcttatggatgaatatttcttgaagttcacattgagttattgctcttgtgtgtgtgatatgttgaaatgtgatattgaaatgtgcattagcttcatatttgtggcttatgtttgatatgcacatgtttagggggagcttttgattgttattgcaatatatgtccatgtgttctatgttcgattatttatatatttggggagtttgtcatcgattaccaaaaagggggagattgaaacatctaggcccccgttgttaattttggtatttaatgacaagcgctaattgtggactaaccgttgctattgagataatattttaagttagggccacgtcatgtgtgcccctggatgactttcaagggattaagaaggggcagaaccccaagaaacaagacgattaaaattagtgctttattttagaattgatcgaggcgtagggcgaacaaaatcgtagtttattttctagtttcgccgtactattaagagggggaatgacctagcaaagagatgatttaattgccacattaggacattgcattttcacttgtgctcacattttcatcacacacaaaaactttcactgagctcggcctgaccatgggcggtcagaccggccacatagtggcggtctgaccgttttttttggccggtctgaccggccttacagcggcggtctcaccggcccataaggccggtctgaccggcggcacatgcccggtcagaccgtccccctggaggctgggatggtgctgctcggggtggcctttacagagccgacggagccgtatttggtcagaccgagcttatggtggtctgaccgagcccaggccagtctgaccgcctactcaacaccagtctgactggccaggccgatggggccctctgacagcactacaatggctagttttctagccgttgtagagtagcacggtctgaccggccacatacctccggtcagaccggcagagcacaaagttgggggatttcgcccccaacggctagttttggttggttggagtataaatactccctctccagcagcaaggggactctcttggcacccaattcaattacatacaccccttgcacctctctcacacccacttgagctttgtgttcatccatctagtgtgttagagggttgattagcctagagtcaagtgcattgcttccattgtagagctagtgtggcacttgattgatcatctccacgccatgtcattgcttgttactcttcgaggttgccgcctcctagacggcttgtggaggagttgcccggtgacctttccgagaagattgtggaggaggtccggcgccggtttgtgagtggtttagagttcaccaccttcggagtgaaggaagaactaccctagtgatcgaggcttgggtagtcctctccgggggccagtgtcacaccctgcagttctcctcccaagcctaaaatttaatttataaatgaccctaagaaaatgccggtgcaaatcaagagaaaaccctaagaaagtaatacaaataataatcgaatctggcatgtggaatttttcttgagttctacatgtcgaaagtcactaacaggatttatagtggaattttcagagccctagaaataattttaaccaattaaaattgagcaagcaatattttaattccagggaaaatccttttcttcctttttctttttctttttcccccttttcttttcgagtgggccgccggcccattctccttcctcctctcctcccgctgggccggccgaaggccaaggcccagctaggccgcgctggccggccgcccgccttctctcacccgggtcgccgacaggtgggccccacctgtcgggcccgtcacctaccttgcgcccgcgccgccgtgcccgaaaccgacggcgagcccacaccttcgcctcctacgggccacgtcggccacacccgcgcatgcgccggaccttccgcgcccactcccctctctctcccgccggcgcccacgcccgagatggccgggattcgatttttgaatcccacctctctctcctcccccactcccccacgttggccggtgattcccgcctcccccggccatgtccggccccctctctacctatttaagctgcgccgtcgtcccctctctcctttttcccatttcgccgaactccctcgtgctccccatcactcccgcgccgtgcacccacccgccgccgcctttcccgccgctccggccgccgctagccgccgctaggctcgccgccgcaccgcgccgtcgccgccgtcgggttcgcaaggacgaactccaccccgtccgcccttcctccgccgggattcgtcgccagaattcgcgtcccctcgcgctccgggcaccccgaagcccgtccgccggttgccgtcgtcctcccgtagcttgccgtcgcccttcgctgtcgtcttcctccgcgccggccaccctcggtgaggcttcctctcccctctattcccctccctttccttcctagccgccgcttagcgccgccgccttcgcgtcgcctttgcgccgtcgcctccgccgccggttgccgtcgctgaaaacgcgttcgcgcgcgcgtgccgtcgccatcgccgtgggcggtcggccggccttgagccgagccgagctgggtcgccgtcgcccgtccgatcaacaccgggggtgatctgggccgtcggtcccgtggaccggcggtggaccacctgcgtggtcccggtccacggtggaccacccccccttttttgagccgctgcctagtggggcccgcttgccggcgccccttttccctctctcccgagccgctgaccggtgggccccgtatgtcggcgccgtgcccccttgatgacgtcagccctgggaattattgcgcaataaatggtttaaggactttttgttatagtaataaacacagtgaatcttctaaaattcataactaattcatccgtgctccgtttaagcccattcaagtctcagtaaatcaagaaaaatgtgtagaatccattaaaaatggttttgttctctgtttcagtagtattatagcctgtttgcaatgtttgccttgtatgtcgctagattccagttcttccgatgctccggtgtacttcgaaatagtcgccgaggttcctccagcagcagagcaaggcaagtcatgcttgccacttgaacatgttgatcctatattgcaaatgctctattgtttgtcttcaaatactgcatcgttttataatgttattatgggatgtttacctattgtcatagccatgctattgttgtaccatgtccctttgtcagcttggggttataacatgactagagattggactagggattgcttagccatgcttagttcaactagtgcacaatggggaaaatcctattaatgtttagactgttggttctaatggtattgttggattagtgccaccgctttggtgttggttaattaaaataaatcacatggtgggctgtgggtgcatggttttgctggtcgcacccatggcagttaaggaccggttcgcgggatgccctggaagaacttatcatacttaccacaagccagcgtgggcaacggctgggcttgtagtgtaactttcctctagctgacgcatccaggcaagggtgggcgtgatggagcggggcgggccctgcgacggcctctgtcgcttccggattcacctaggcaccagaggggactgcccgttgcccgctagggacgggggtgaaacctgaagtgtggtgtgcttggctagagggggttatgcgaagggtcctgtcacggcctcttttcggtatgtcgtggtggcatgtcggcgcacggaaacgtgtcgtggggctgtgtcttgtgggtatagttgtacacctctgatcagagtaaaactattcaaatagccgagcccgcggttatgggtggtcaaccagattcaccatgattagtctcaccctagtgtaatcttttgaatttggatagtttaggtggatggttgggcctgttgcaacgtgggatagcattggacagtggatagttaatattaattaattactacaactgtttaaatctttcaacttctgtttataaatgctcgctttatgcaaatgaaccactctaactctcctttgataattccctgcatcatacccctattccggtatgacttgctgagtacagtgggtagtactcagtcttgctctatttttcccaaccccagagtacgagtatgtgtcagatggaggtttctccgaggagtaggcttcgtccgtgccgtcgaggatgcctgtggagtggtgttcccgctgcagttctagtcaaggcttagctccggttgtctttcgcttttccgctgcatttatgtaagacttttatgatgtttgtaagacgtgggtctgaatgtcaactttgtcgtttgtgtaccccggccggtcctggacggggattttaatgcacaatctgcttggaattctattcgagaatttctgggcgtgcggtggcttcgtggttgagcagtggagttgggctcgcctcaacggggagtaggaaaccggcgagtttcccaacctcggtgaaaaatctcttgtctccttgtctcatttgattgtcgcatttacatttgtacaatttacatttctagagacatacttgagatcatatcacctaggattgctaaacattgacataggagtgtgatttactttcgtagagatataattgagccactatcaccctaggtttgcaaaacataacttagttgcttagttagagttgaccctcaccaagcctagcaacttaggttagttttgattaggtgtcatttagttttaaatcacctattcacccctcctctagtcgacatctcgatcctacaagtggtatcagagcttagtctctcttgattgggcttcaccgcctagagagaagatatcgaacgaggtgaaccatgtagggaaggctcccatgtttaatggcaaaaactatttcacttggaaaattaaaatgtctactcaccacaaagctatgagcttccatatttggagtattgtggatgtaggctttgctatcaccggcacgtccttgacggagattgataaccgcaacctccaactcaatgcccaagccatgaatgctttgttcaactctttgagccaagaggagtttgatagagtgagcaaccttgagaccgcatatgagatttggaacaagttggcggagatccatgaggacacaagtgagtacaaggatgccaagcttcatttcctcaagatccaatatgagacattctccatgttgcctcatgagagtgtgaatgacatgtatgggaggctcaatgtcattgtgaatgatctcaaggggcttggggtaaactacaccgatcttgaggttgcccaaaagatgcttagggctctaccagagaagtatgagacccttgtcaccatgctcatcaattccgatatgtcaaggatgacacccgcaagcctcttggggaagatcaacaccaatgacatgtacaagttgaagaagaaggagatggaggaagcctcaccttccaagaagtgtattgctctccaagccgaagttgaagacaagggcaagggtaaggtgaatgaagccaatgaggacttggaggaagagattgcccttcttgctagaaggttcaatgatctcttgggaaggagaaaggagagaggaaggggctccaactccaataggagaagaaatagaagacccaacaagactctctccaacttgaggtgctttgagtgtggtgagaagggacactttgcttccaagtgcccttccaaggatgatgatggggacaagtcatccaagaagaagagtggaggctacaagctcatgaagaagctcaagaaggaaggcaagaagattgaggccttcatcggggaatgggactcaaatgaggagagctccgcctcatccgggtccgaggaagaaggtggtgatgatgcaagctccaagaagaagaagatggccgttgttgccatcaaggtaacatctcttagtgatagtgagagtgatgatgattgtgatgatgtttcctatgatgagcttgtgagtatgtttgaggagctccatgcttatagtgagaagtagattgtcaagttcaaggccctaaagaaggatcatgcttctttggaggtcttgtatgaggagctaaagacttctcatgagagactcaccatttctcatgagaagcttaaggaagctcatgacaacctcatttccactactcaacttggagctctcattgatgttggcatatcttgtgatttgcttgatgatagtgctactcgccatattgctcatgttgcatcatctagcatttctacctcttgtgatgatcttgtggatatgtctagctctagctctagctcttgtgtttctatttgtgatgcctcacttgttgttgagaagaatgagcttaaggagcaaatggctaagctcaacaagagcttggagaggtgcttcaagggtaagaacactcttgacaagattttgagtgagcaacggtgcatccttaacaaggagggacttggattcattccaaagaagggtaagaaaccttctcaccgtgccactcgttttgttaagagcaatggtaagtattgctccaagtgtcgtgaggttggacatttggtgaatgattgccccggtggtaagcctcctaagacttgcatgtttgattctcattatatgcttaggaaggcttatgatgcaagcattgttgctagatatgtggattaccctatactcggtggaaaaaagaatgccatttgggtgcccaaagctttggtctctaacctccaagtacccaaacaagtttgggtacctaaaagagcttgatcttcttttgtaggtgaactaccacaccggtgggagccattgggtgcttgatagtggatgcactcaacacatgaccggtgatagggctatgttcaccacatttgaagtaggagggaatgaacaagagaaagtgacatttggagacaatagcaaaggaaaggtaattgggttaggtaaaattgctatctccaatgatttgtcaattgataatgtctctcttgttaaatccctaaatttcaatttgctttcggtcgctcaaatttgtgatcttggcttgtcatgtgctttcttcccgcaagaagttattgtttctagccttcttgacaagtcttgtgtgttcaaaggttttagatatggaaatctttatttggttgattttaattctagtgaagcaaatttgaaaacttgtttagttgcaaaaacttcgttgggttggctttggcataggaggctagcccatgttggcatgaatcaattgagtaaactttcaaaacgtgatctagttgtgggcttaaaaaatgtgaagtttgagaaagataagctttgtagtgcttgtcaagccggcaagcaagttgcatgttctcatcctactaaaagtatcatgtccacatctagaccattggagctcttgcatatggatttgtttggcccaacaacctataagagcattggtggtaatagtcattgtcttgtgattgttgatgattattctcgctatacttgggtgttctttttgcatgacaagtctattgttgccgagcttttcaaaaagtttgcaaaaagggtccaaaatgaatttaattgcactattgtgaaaattataagtgacaatggttccgagtttaagaataccaatatcgaggactattgtgatgatcttggtatcaaacacgaactttccgctacctactcaccccaacaaaatggtgtaatggagaggaaaaatcgtacattgattgagatggcatggactatgcttgatgaatatggtgtttccgatttcttttgggtggaagccataaacaccgcttgccatgcaaccaataggctttatttgcatcgtctcttgaaaaagacttcctatgagctaattgttgggaggaagccaaatgttgcctattttcgagtttttggttgcaaatgttatatttaccgaaagggtgttagactaaccaaatttgaaagtcggtgtgatgaagggtttcttctaggttatgcctcaaaaagcaaggcataccgggtctacaacaagaacaaaggtattgtggaagaaaccgccgatgttcaatttgatgagactaatggctcccaagaagggtacgagaatttggatgatgtatgtgatgaaggcttgatgagagctatgaagaacatgtctattggagatgtcaagcctattgaagtggaagacaagccatccacctccactcaagatgagccatctacttccgctacgccaagtcaagctcaagttgaagtggaggaggagaaggcacaagatccacctatgcctccaaggatacacaccgctctttccaaggatcacccaattgaccaagtgttgggtgacattagtaagggtgttcaaactcgatctcgtgtcgcttcgatttgtgaacattactcgtttgtttcttgtcttgagccaaaacatgtagatgaagctctttgtgatccggattggatgaatgctatgcatgaagagctcaacaactttgcaagaaacaaggtgtggactttggttgaaagacctagagaccacaatgtcatagggacaaagtgggtctttaggaacaaacacgatgagaacgggttggtggtgagaaacaaggcaaggttggtggcacaaggtttcacacaagttgaaggtttggacttcggtgaaacttttgcccccgtggcaagacttgaggctattcgcatccttcttgcatttgcatcatgatttgatataaaactatttcaaatggatgtgaaaagtgcttttctaaatggtgaaattgccgaacttgtctttgttgaataacctcccggttttgaagatcctaaaaatcctaaacatgtttacaaactctcaaaagctctttatggtttaaaacaagctcctagggcttggtatgaaagattgagagattttcttttgtcaaaggatttcaaaattggaaaagttgacaccacccttttcacaaaaatcattggtgatgatttctttgtgtgtcaaatttatgttgatgacatcatattcggttctactaatgaggtattttgcaaggaatttggtgatatgatgtctagggaatttgagatgtccatgattggagagttgagcttcttccttggacttcaaattaagcaactcaaggatgggacgttcgtgagcaaaaccaagtacatcaaggatctactcaagaggtttggcttggaggatgcgaagcccatcaagacacctatggcaaccaacgggtatcttgaccttgatgagggaggtaaaccggtagatttaaagctttatcgttctatgattggtagcttgctttaccttaccgcatctaggccggatatcatgtttagtgtttgcatgtgtgcacgatttcaagccgctcctaaggagtgtcacttagtggccatgaaaaggattctaagatatttaaagcattcctctactattggcttgtggtacccaaaaggtgctaagtttaagcttgttggctattccgattcggattatgccggttgcaaagtggatagaaagagcacatctggtagttgccaaatgcttggtagatcccttgtgtcatggtcatccaagaaacaaaactccgtagccctctctaccgccgaggcggaatatgtttcggtgtgtagttgttgtgcccaattgctttggatgaaacaaacattgttggactatggcatatccttcaccaaaaccccactcctatgtgacaatgatagtgccataaagatagccaataacccggtccaacattctagaaccaagcatattgacatacgccatcacttcctaagagaccatgttgccaagtgtgacatagtcattagccacataagaaccgaggatcaactagccgacatctttaccaagcctcttgatgaaacccgcttttgcaagttgaggaatgagttaaatgtcatagacttctctaatgtggcttgagatggtgcaccatggttgcttctgttgcatattgtatatttgctcctatttgctcttatgctttggatttattgccatttggttcttcattgcgaaaatggagcatgtcacattaagggggagttttgcattcttgcatgtgctctacttccctttatatgtgagcaaatcaactagtggtgctagtagtattttcaaaatgcccaagtcaaaataagtcaaaacttttgcaaaatcaatgtaatttgaaaattatctcttggaaaatgtttcaaaaggtttcctatatgttttccaagcctctcattgcaagaaaaatgatttttaaatgaaaatgcccttttggccctcttttgaagaaattagattcttatttttggccaaaatgagattttcctccaaaatgagattgagagagaatttgagaaaagtttcaaaacaaagttggtaaagaggaggatttgaaatgtttttagtattcatcaaatcatattcaaaaaccaaatatttcaaaagttatttgaaaaacaatttagcccaaaaacccctatagaccataaaaggtcacctcctagcactaaagtgagttttgttgcaaatcatcataatcttcaaatattatgggtggttagcaatatttaaactcacacatttcaaaaattgctccaaaaatcaaatttttgttgaattttattgtgtggggttgccggcttgtgcaagggctgtgcacagccggcagggggcctggcggtctgaccggcgctataatggcggtctgaccggccacatagggccggtctaaccggccggcaggtgggcctaggacttttgtcctttttcttctctcttcttcccctacccgacccaatattctcccattcagccatcttcttacccaactcgtaaaaaaactcctctctcctctcccaaaccctagccacctccctccaccaaatcccctcggtttgaccgcagatttctctccggttacaccgtaagtgattctcatccgcttcttctctttattccatggattagttcgtgtttttgttgagtttttgatccatggcatggaaccctaggtgaagcacgaggtgttcttcgatttgcaccaatagagggtagtttcttggtgtgattcaacacctccaactggtaaatcactctccctcttgtgcattctctcaaatcgatctatttcaacctagggcaatgggtagttgttccaatcttgatgaaataggtccaaccctttgatgttctagttccaatcttgtgcaatattgttcttgcaatttttagactcaaatgaggtctgcccggagccacaggcggtctgaccgtgggttagccgctggtttgacaggcgtgtgtgcccggtttgaccggccggcagccgtcgatctgaccggccaccggtgggcggtctgaccggcctgatgccgtcgttctgactggctaccatgggcggtctgaccggcctgatgccgtcggtctgaccgccgtactggctgcggtctgaccacccctccacaggatataggcaaattttcacctctccaaattgtttctagaattattgctaatatcctatcatcctttgatctttgatagtgatgcctccccgcacttgtcatgatcgtcgtgcgcccactccggatcccgtgagtgagcctggggaatcgagcggagaggattacgctcaaagtgatgaagaggttgaggcaaatgttgagggggctagtgaggaggcaagtggagatgatgacagtggaagtggagaggatgaggatgaaggaagtgatgatatgcacattgatccctccatccaatttgttgattacataaggaatccatcgcagtataccatcttgaggcaccatgatcagtttttgaggcctcgggacaccccggatccccgttttcacaccgctttctagaagagtgtgtatgagcaagtttatgtagggaaagcttttgcagagcataagtggatttcttggagagacatcaatgagactccagagtttgagggcttgcaggatctcttcaagactgttggcattgatcggattatgactctcaagcaagactacaatgaagatctgatccggcagttttatgctacagtgtgggtggctggggactatagtgagatgaagtggatgtccgacaccctccagtgttctatctctaggaggcaattctggcggctcctcaatattcgcttggactttggagatgacttgcatgaggagcacacccataatccgctctccatagactacctctctcagttttatgaagatggagtgcggtacacacatgggaaggttgccggcttgaggaccatccccagtgtggttaacaggattgtgagagctaccatcctccctcgccttggcaacaatgatgacattaggggggtggcttggcacgtcatcgatgcgatcattcagggtcgtcagttcgacattgtgtctctcatgatgcaagagattgccatctctaaggggaccttcactcagggaatctattatgccccttacatcatgaggttgattcaagacaagcttggggctgctgggcaaaatttgaagaagcataagcagtacaagccccgccttcagcttggaactccccgtgctcctagagcggcgccctcctctcatcctggagctagctcaagctcagcacctcctcctcctcctcatgggtatgttccaaatgctttcttccatcctcagtatgcctactttggaatgtagccaaacgaatacttcaacccggtacttggggctattaataccctaagtgaaagcattcaacgcttgtctaccgggcatgaagctttgcatgaggatgttcgtggcttgcgcacgaatgttggagacttgaatgcttccgtggggagattgcacactagagtgggtacattggattctcgagtccaaatattggagagctcccaagcatgtgtatcatcgtcgtcgtgatgctcctcattcttccatttcggcacatcttccttctcctccacaagagtgaagacctttttggtgcttgatgccaaaagggggagaaaagtgtgctttgtgttttgtgggttgggactagtagtagtgaggatagtgccctcatatctaaaaggttaaggtggtttgggctatattttgtatgggtatgggctattctctatattgtgtgttctttgtcgttctataatctctatgtcatttggatccttcatggtcttgtaatagcctatgtttatttgtgagccctttttaggatgttttgcgacttttgtgatttgaatggttaagtgatatgaacttgtgcgatgatggatggtgtatgcgatattgatacatatgtgagaccatcttatgcttatggatgaatatttcttgaagttcacattgagttattgctcttgtgtttgtgatatgttgaatgtgatattgaaatgtgcattggcttcatatttgttgtttatgtttgatatgcacatgtttagggggagcttttgattgttattgcaatatatgtccatgtgttctatgtttgattatttatatatttgtggtgtttgtcatcaattaccaaaaagggggagattgaagcatctaggccccgttgttaattttggtacataatgacaagcgctaattgtggactaaccgttgctattgagataatattttaagttaggtccacgtcatgtgtgcacatggatgactatcaatggattaaaattgacggcgcaaagcaaagagaaacaagacggtaaaactagtgctttaatttagaattgatcgaggtgtagggcgatcaaatttgctagtttattttctagtttcgccatactattaagaggggtaatgacctagcaaagagatgattaaattgccacattaggtcattgcattttcacttatgctcacattttcatcacacacaaaaactttcattgagctcggcctgaccatgggcggtcagaccggccactatgtggccggtctgactagccggtctgactggcgtgccctggccggtctgaccggcctcacaacggcggtctgaccggcccataaggccggtctgaccggtggcacatgcccggtcagaccagccgcctagaggccgggatggtgctgctcggggtggctgatacagagccgacggagccgtagttggtcagaccgagccaatggcagtctgatcgagccgaggccggtctgaccgcccactcaacgccggtctgaccggccaggtcaatggggccctctaacagcactacaacggctagttttctagccgttgcagagtagcacggtctgaccggccaaatacatccggtcagaccggcagagcacaaagttgggggatttcgcccccaacagctagttttggttggtgggagtataaatactccccctccagcagcaaagggactctcttggcacccaattcaattgcatacaccccttgcacctctctcacacccacttgagctttgtgttcatccattttcggagtggtttggagttcaccaccttcggagtgaaggaagaactaccctagtgatcgaggcttgggtagtcctctccgtgggccggctcccgccttgcccaccccttgacgaagggggcgtgcggtggcttcgtggttgagcggtggagttgggctcgcctcaacggggagtaggaaaccggtgagtttccgaacctcagtgaaaaatctcttgtctccttgtctcatttgattgtcgcatttacatttgtgcattttacatttctagagacatacttgagatcatatcaccctaggattgctaaacattgacataggagtgtgatttactttcctagagatataattgagccactatcaccctaggtttgcaaaacataacttagttgcttagataaagttgaccctcaccaagccaagccacttaggttagatttgattaggtgtcatttagttttaaatagcctattcacccccgctctagtcaacatctcgatcaaacaagccgcctcctctttccccgcccccaacgatgcctcctcctccccctctccacttttattgtgcctctccccctaccttttctcgcaggcgggcgactcccccgccaccggggccgtccctcccttctcgccggcacggagcggcgacagccgggtgcggcggggtgtggcggcagcggcgccttcccccatggcgagcggcggcggcggcggcgcctcccccacggtgagcagcggcggcggcgcctcccacacaccgagcaacggcggcgggggcgggggcgccgccctccccacagcacgatgccccccgactctctccacttctccccctttctctctgtgtggcggcggcgggagggccggcgacgccctcccctccgctagatcaggggtaggggaggtgcggcggcgctggtcctggcggaacgggaggagcggcggcccgacggcgtggaggcgggcgtcggcggccgccgttttttttgtaattttttccatggctattgctaaccgaatcggattgtgtatggacgaaaaacgcacgaaaattagatgtgacgaccggaaaaatacgaatatttatattagttatagatatatatgcacatatatatatacatataggaaaacgcttatatatatatatatatatatatatatatagacacacacatgttcgtacatatacatgtatatatatgtacatatatatatatatatgtatatagccatactatactagacccatggtgcgtagtaactaaaatgctccccctcacatcctactgttaacgaccaaatttagcaatatcagcattggagatgaggattagatcgaggtggaatcgaagacgaagatcgattcgggaacagagtaagaatcggctggagtccaaatcggctacgatcaggatcggctgggtctgaatcagactgggtaagccgatacagctgattccgacaatacgacttggtgtacgacatcgggttgagttgatatgcttcaagatgattgccgcgcatggatagagtcctgagaaggcaattgtatctattaattaggatattttatgtaatttccttagagatatgtttagggcaaaagtctgtcgtaaagacttatggtatcttagagtttattagagataagagtcgtgtccgatatggacatagattgtaattttcgggtataaatagaccccgaaccccatgcaatcaatttacacacatgttcaatacaatttcggcgcatcgccacccttttgctttatttttattttgatgaggtcttgctttcgggttgagctgtatcggttttgatcttcaacaagagataaaacttgttatgacagcttgcgttctcaggattagtgcttccatctttctgatactctaatcttgtttatgtaattcgtcgagttatcatatatcttacataatctccagcaatattgctgtttaacctattatcggctaacatctgtcggtagagggcagctgattaggttaaacatcgatgttgacttagattatataggatatacaccactctatgaaacttccagcggtttgattgtctagatattgttcttctttttatactaaatgctgcatcagttgagtttgatctattaagtcgttcttagaatatcaatctctagcctgccttctggttgccaattagggtagtatcggggtttcagccgatcttatctaatttaactatatttactctatacgcctcattgatatgtgaaatctaccctttatgttaagatcttgtcacatttaagtatattagacttttgtttgatatactctacttgttttaaaatcttagtatagagtggtattagagtattagctggtacatgctagatatatctgatcggctatgctatgaacatatatagtctcgatattaatatatatttcgatttaagtgattcatactgtctcggcatagcgaccgatctatcccaatcacttgatttaagtatatatcgatataaggagtacatattgttaatatctacagccgattgagtagatctacttctttcttacttatttatgaccgccgattgatacataaatgacatcggcccaaagataaattatatgtcatcagcacttagccgatcggctatcgtttataggtttaaccgcggtttgcttgtatctatttcttttttattacaggatcaaatcaactggcacgctagcatacccgaaggcgagtttggacctgcactggagttaagcagatcttccaggcctcgtgttttccatcaacacgcttttggcacacccggtgggacagattagaagtcagaaattttctctcatggacgacaagccgccagcatcgctgtcctcggctagccccagttctattaaagagaagattcagtagttgggcctatccgaggttaatgaaggcaacatcgtgaacatcactccagacaagctgatacctaatcaaaagaaggattttgaagcgatgatgcagcaggcacgtaaccagttcttgagctcatttatgcaaacccgcaaggctcagtggtgcagaagtataaggtaaaggtagttgctgatgttcctggtactggttcttccaaggatggagaggtgaaacaagctccagatggctcggctcaaccgagtgacaaaggtgctttagatggttctcaaggaaatcaaggtgacaactcccaaggagtacagggagtttgaaagtgcattaatcctcctagtgggttttggtgattaatgacaaatgtggttaagggactaatgagctcattgagtagctttcaggtgcattagtccaaggtgtggaagatggatgcttggagaccccccaaaaagtataaaatcaaagcggaccggaactcgagaagtacataggatagttatcttctgaaatcgagtttttaggtaaaaccgtactatgaagaggggttccaagtgatgctctgagatatatcaagtgctcttagtgtgaaccaagtgtcaagtttccctaggagttctttttttttttgaaaatactccatctgtccaaaaatgcaagtccggaacttcctgtcttccaagtccgaaagttccggtcttgtgaaaaagattttcctaagtgtagtccggaagttcccgtcttccaggtcccgaacttcctgtcttgtttccagttcaaatttgtgagtaacggctagatgacgtcacctagctgttatacatatacagctcgtttccagctcgttccttagccattccactttcacttttcaaacctagagctattgctagcctctctgaagtgtttcttgtctttccactgaatctacagcctaattcttgtgtgaaaaagagattgagagggagagaagaagatttggagaggtgtgaagactaggatcttgggtgagcactaggaatatctcgtgggctgtcatcttggtgcttattactcttggagatgatcaactagacggttaggtgtcacccgcgagaatccattgcatattgtggatgtcccgggtaattttgtgaaggatttcccctcctccgaaagggaacgaggtaagttagtgaagttcttgtactgagattctagaggctttccaagtagagcaacccatacttgtggtggatttctagaagtaggttgagttggatcttggtggtcactcaattctagaaatttgcctaggggtgtttggggttaaaggctgtggatttcctctggggtttttgcacaagtgaggcaaggggttaatcgagacccagctcttggagctcctcaacggagagtaggatcacaagattcgaacttcgggaaaaaatcgctcttgtctctttctgtgatagttctgtggatgattctgtggtatatcctctgcttagaatacctgtgcaccatcttgtgaagattggcttagtctcttgtttcgaaatttaaatttcctctctgttctgttacccggaagttcctgtcttagaacaccggaagttccgggcctgggaggtcggaagttccggagttgcttaccaggaagttctgggtctaattgaattttaccgctgtgatttgtttttaagttttcagggacagcctattcaccccccctctaggcttcatcagcgcgttcaaacacgccactcctgcctcggcttcgttttcttcagccgatgattgatttcttgctcgtcttcctgaaagcactccctattcctcaatctttgaacccttctcttttgattcgtcgtaatgataccagaaggacaccattgagttttactgttttcattgtcctcctagccacgatcttgatttactggacccaatctctgatgaacaggaactcttgtctgccttagccgattgcccctaccaaacgatcggcttgagctctccgcaatatcactgcacccaggatagtcctcaatagatggcagcctcataccttcattccaacaaaatcgaaagaactcgcaaccccaatgaggatcaaagccatcatcatcttcttcataatgcttctcctgctgcttgtcatacttcctctgatatttgttgataatcttagccgaatttacctgaaatccttttgcacgacccccatcggctgttcggcaagctgtatgcaccatattgacaggattgccatcaaccttcattggcctcttagaatcatcaaacttgattttgcctcctttaatagccgcttggatctgctgcttgaagactttgcaatcattagtagtatgagacccagaattatgccacttgcaataccttttcttgcccaattcatcagccgatggaattgtgtgatcggtaggaagttgaatctgcttctctcggaatagcaagtcaaaaattttgtcagccttggttatatcaaagtcatacctctcctctttccctgagttcttcacccactggctgcagctatctcagagacatcatcctcatcatccgatccatatatataaggacatacatgattaacctttctagaattcttcctagcctctgcaaacctttgttcatgcaagcttacattctatgtaagatgtgacaagctttcaaagtcctcagatgagaatttctccctaattggagcaatcataccctgaaaagccaaatcggctaactgggcatcagttaaacttaagctgtctcaattattcctcatttctctgaacctctgaatatactcgtacacaggctcatcatgtctttacttgattgctgtcaaatcggacaatttcatctcatgtaccccactgtagaaatagttgtgaaaatgcttctccaaattagcccaactgttaatcgacccatgtggcaaggaagaaaactaagtgaaagccgatccagacaaagacaactggaataacctaaccctcaaggcatccacagccgatgcttcaccacactgagctaaaaatcggctaacatgctcataagttgatgcgctatcttgccctgagaattttgaaaaatctggaactttaaaccggttaggtagaggaactctctcaaaccattcaggatatggctgtcggtataaatttccagcatctttcggcctaagcccaaactgctccttcatgacatccacaatcaaatcagcccatggtcattgctgcggtgttccttgagattgctgtggcatgggctcgaattgattatattgaggaacaaactggggttgagccgaccctgcctgctagtattgaacttgaggtgatggtggctgatactaatagttcaaattgcccgcttggtaattctgaagatccggctggatgttgcgcaccaaatgctcgggaataacttgaggtatcacagctgtttcttgttgtaatgatgaaccgatcgctatgccacacctcattctaccgcataccatatagtgtatagtattgtgtcgctgnnccatcgagtagctaatcaaangngcacca

SEQ ID NO: 16927 - DNA, 2205 bp, Oryza sativa
caacattctcatcgtcttctacaaacagtggcggagcgctcggtatggcaaggtctggcactcgccatacctcgctccggccgccggtacccccacccccgcgcgcgtctttgaccgtgactccacgagcgcaggcgcagcgcggcgtcaccgttgctgctgggcggttgggccactcggtgctcgtacgcattaagcccatcgtgctcttttttttttttggtaaatactccgtatgtgggagtagtaaccctatccggcgcatttgggaaaaaaaaatccacagtcgctgcatcgattgagcgattgtcagcgtgcggccgtgcgccatgcgcgtgatgatgacgcggggaggccggcagtcggcggcagcaaggcgcaggtgctgtcccgctgaggcgggtaccgcgaaggcatgcgccaggcgagcgatgggccgacggcaagcagcagcaacaggcgggcgacggtcggcggcaacaagaggcgcgcaagcggcgctggtgctggctgcggctggggatggcaccgcaccgcgcagcaagtagccaagcagggagcaggcgagcagagcagcacttagcacttcagcagggggcagccaactttggggaaaatgaatagattggagaagggaaatgtcttggcatcacaaagaggtgcctatttttgaaaatttcaaaacattgcgaatttcagcactcagcacttcattacttgaagtattcttcgtggtatactcttttatttatgcaaatggataatggattacgatcaatggttgttgccatgcttaatataggtttattgacataatattttgtcgtacaatatcgtgcaattgagattattttttccttatttttgttgggtttccattgttgggtttccattctcgcgctagtccatatgtgccacacctagttttttttccatcctccgccactttctacaaagcaggattgctagtctactataagcggagtataatactgtgtactaagagtggctaaatgctactatctcttcaatagtttcctactttcctggccatcttagaggcagcgaatcgaagctgaaatccactcaccgatgcggagaggtcggtgatggcgctgagggcctcctcctcctcatcatcatcctaccaatccccctcctcatccccatcatcatatatagtacgtaaaatctaaacaatgcacgctctcattttagtctaatcgcgcgatgcatctcccaccgtccaatctcgttatcttttcattttcggcttacgttatcgctttctccactagtacttgactgtagataggctgacacacccacgtaacagtaaagattgatatagacatgtatgcctgttttctcttcaaataaaattttctctcaaattatttatccgatctacaatccaattacatcattgtgttcgttacaattaaatcttcacaacaagatcttacatgattatattacgatgaaaaaatatttatatttgtaaattacttttattatatacgtaagttacttttattatatgtttaagttacttttagatttgactaaattatttcttagatatataaaagtaaatttaataaagtctaaaagtaatttatatatatatattataaaagtaacttaaaacaaaacggaagtaactttgtcacgacattagaagtaaattcattgtagggataaaatatgaatttatatagaaaactttatttaatcaatacagagcaacacacataagtttaacaaattttaaaagtaagttcaatgttaacttcaacacacataagatacatactattgcattattcaagtcgaaaggagacactagatggattataaaccaactacgactagctgtttagtcatgtccaatgaaaaatgcatgcattaaagttactttcttttgttctaagttacttctataatatatgtaaattacctttaggttttgctgaatttacttttatatgtctaagatgtaacttagtgaaatctaaaagtaatttagacatatcataaaagtaatttgtgatttttcatcaaaatagtcatatgagatcttgttataaagatttaattattatgaacacaacggtgtaatcggatcgtagatcggatgagtaatttaagagaaaattttatttgaagcataggtggatagagtctctcatagatgggagtgga

SEQ ID NO: 16928 - DNA, 9387 bp, Oryza sativa
  unsure (1)..(9387): unsure at all n locations
agagaatagcaagttcatacgaaagcagacgacagagatacacattccccatcgccaccgccaccaccaccgtacaggtccctcgttgcggatgaagcatatagaccgccggtgttaatattggtaataaatgacaagcgctaaatgtggactaaccgttgtctttgagctatacattttgagttaggtccacgtcatatgtgcgcatggatgattatcgatggattaaaattgacggcgcaaagcaaagggaaagaagacggccaaactagcattttaatttagaattgatcgaggtgtagggcgatcaaatttgctagtttatttttagtttcgctgtactattaagaggggtaatgacctagcaaagagatgatttcaattgccacattaggtcattatgcatttagacttgtgctcacatttcacacacacacacacacacttcactgggttcggcctgaccaggggcggtcagaccggccacatagtggcggtctgactggcgtgccctagccggtctgaccggccccaagcgggcggtctgaccggcgcataaggccggtctgaccgccgccacatgcgcggtcagaccggccccctggaggccgggatggtgctgctcgggatggccgatacagagccgacggagtcgtattcggtctgaccgagccgaggccggtctgaccgcccactcaacgccggtctgaccggccaggccgatggggccctctgacagcactacaacggctagttttctagccgttgcagagtagcacggtctgaccggccacatacctccggtcagaccggcagagcacagagttgggggatttcgcccccaacggctagttttggtgggtgggagtataaatactctcccaccagcagcaagggggctctcttggcacccaattcaaaagctctttatggtttaaaacaagctcctagggcttggtatgaaagattgagagattttcttttgttaaaggatttcaaaattggaaaagttgacaccacccttttcacaaaaatcattggtgatgacttctttgtgtgtcaaatttatgttgatgatatcatattcggttctactaatgaggtattttgcaaggaatttggtgatatgatgtctagggaatttgagatgtccatgattggagagttgagcttcttccttggacttcaaatcaagcaactcaaggatgggatgttcgtgagccaaaccaagtacatcaaggatctactcaagaggtttggcttggaggatgcgaagcccatcaagacacctatggcaaccaacggacatctcgaccttaatgagggaggtaaaccggtagacttaaagctttatcgttccatgattggtagcttgctttaccttaccgcatctaggccggatatcatgtttagtgtttgcatgtgtgcacggtttcaatccgctcctaaggagtgtcacttagtggccgtgaaaaggattctaagatatttaaagcattcctctactattggcttgtggtacccaaaaggtgctaagtttaaacttgttggctattccgattcggattatgccggttgcaaagtggatagaaagagcacatccggtagttgccaaatgcttggtagatcccttgtgtcatggtcatccaagaaacaaaactccgtagccctctctaccgccgaggcgggatatgtttcggcaggtagttgttgtgcccaattgctttggatgaaacaaaccttgttggactatggcatatccttcaccaaaaccccactcctatgtgacaatgatagtgccataaagatagccaataacccggtccaacattctagaaccaagcatattgacatttgccatcacttcctaagagaccatgttgccaagtgtgacatagtcattagccacataagaaccgaggatcaactagccgacatctttaacaagcctcttgatgaaacccgcttttgcaagttgaggaatgagttaaatgtcatagatttctgaaatgtggcttgagatggtgcaccatggttgcttcttttgcattgtgtatatttgctctcatttgctcttatgctttggatttattgccatttggttcttctttgcgaaaatggagtatgtgacattaagggggagttttgcactcttgcatgtgctctacttccttttaatcttttatatgtgagcaaatcaactagtggtgctagtagtattttcaaaatgcccaagtcatcataagtcaaaacttttgcaaaatcaatgtaatttgaaaactatctcttggaaaatgtttcaaaagggtccttatatgttttccaagcctcatattgcaagaaaaatgtttttttgaatgaaaatgccattttggctctcttttgaagaaactagattcttgtttttggccaaaatgagattaaaccccaaaatgagtttgagaaggaatttgagaaaagtttcaaaacaaaattggtagagaggaggatttgaaatgtttttggttttcaaatcatattcaaaaaccaaatatttcaaaagttgtttgaaaatcaaattcgccccaaaaacccctatagaccataaaaggtcacctcctagcactcacgtgagttttgttgcaaatcatcataatcttcaaatattatggatggttagcaatatttaaactcatacatttcaaaattgctccaaaaatcaaatttttgttgaattttattgtgtgggggtagccgaactatgcaagggctgtgcacagtatgctggtggctaggcggtctgaccggcgctatatgcgctgtccgacctgcctggtagcggcggtctgaccggcctctagggcccggtctgaccggccgcaccccggcagtctgaccggccgcatatagccggtctgaccggcttgggatggtgggcccaggacttggtcctttcttcctcctcctcctccttctacccgacccctcctcatcccatctcatctcttcacttctccaactcgaaatttcttctcctctctcctctcccaaaccctagccacctccctccaccaaatccatccggttcaaccgtcaaaatcactccggttacaccgtaagtgaatctcctcctcttcctctctctattccatggattgatttgagtttttattgagtttgtgatccatggcatggaaccctaggtgaaggaagatgtgttcttcgatttgcaccaatagagggtagtttcttggtgtgattcaactccttcaaccggtaaatcactcttcctcttgtgcattgctctcaaatcgatgtatttcaatctctagggttaagggtagtttcccccattgcttcaatcttgatgaaatagacctacaccttgatattcatgttccaatcttgtgcaactctgtcctagcaatttttagaatcatttgtgtggattgtggaaggattcggttgtgctactgtcagtggcggtctgatcggccgagggccgtcggtctgaccagccttgagccgtcggtctgaccggccgatggccgtcagtcggatcgacttggggcttgcggtctgaccggccttggctctcggtctgaccgcccctgataggcagcactcccccttccccccacctcactatgtggtttctaaaattattgcttatatatcctttgatctttgacagtgatgcctccccgcactcgccatggtcgtcgtccgcccacgcccgatcccgtgagtgaggagtcaagcggagatgagtacactcaaagtgatgaagaggttgaggaaaatgttagggggcaagtgaggcaagtggagatgatgtcagtggaagtggagaggatgaggatgaagaaagtgatgatatgcacattgatacctccatccagtttgttgtgaacatgaggaatccatcgtagtataccatcttgaggtatcatgatcagtttttgaggcctcgggataccccggatccccgttttcacaccgctttccaaaagagtgtgtatgagcaagtttatgcagggaaagcttttgcagaacataagtggatttcttggagagacatcaatgagactccagagtttgagggcttgcaggatctcttcaagactgttggcattgaccggattgtgaccttaaagcaagactacaatgaagatttgatccggcagttctatgctacagtgtgggtggcaggagactatagtgagatgaagtggatgtccaacacccttcagtgttctatctccaagaggcaattccggtggctcctcaatattcgcttggactttggagatgacttgcatgaggagcacacccacaatccgctctccatagactatctctctcagttttatgaagatggagtgcggtacacacatgggaaggttgccggcttgaggactatccccagtgtggtcaacaggattgtgagagctaccatcctccctcgccttggaaacaatgatgatattagggggtggcttggcacgtcatcgatgcaatcatttagggccgtcagttcgacattgtgtctctcatgatgcaagagattgccatctctaaggggaccttcactcagggaatctattataccccttatatcatgaggttgattcaagacaagcttggggctgccgggccaaatttgaaaaagcacaagcaatacaagccctgccttcagcttgaagctccccgtgctcctagggcggtgccctcatctcatcctggagctagctcaagctcaatacctcctcctcctcctgggtatgatccaaatattttcttccattcacagtatgcttattttggaatgcaacccaacgaatacttcaacctggtacttggggctattaataccctaagtgaaaacatccagcgcttgtctaccgggcatgaagctttgcatgaggatgttcgtggcttgcgcaccgatgttggagacttgaatgcttccgtggggagattgcacacttgtcacgcccgaaaattcactagtaatttccgaacttatttgtgcataaaatcatcgtccaggaatcagccgaggtacacaaactgacaatttaatatacaaatccatcttaataataacgttacatacttacaaagaaaagaaaacagcagcggatttaacggtctagcgatggcttcagctccactcccacaggcagctcaactggggtataagccaaacgtcttctccttctggatccttcatcttcaactgaggtttgatgattattgcaagaatgagcatatgacatactcaacaagccacacagcaaatatgcaagtgcacaaggataccaaaggatggcataatataggctcatttgcaaaagcagcatttagcaaaacatttaagagaagtaaaacagtggagtaattaatcagaaattttaatcaacactgagcaacacacccatgctgcacaggcccaaccatcctgaacaaccatacccggctgtacagatctaactcaaaaccaggagctaagcaaattattaccagttatagtatccataattattgtgagagatgtgagactaatcacgaaaaacattgctcaactcgcccataaccgcgggcacggctattcaaatagttttactctggccagagatgtaccactgtacccacaagacacgattccacacatgttgccatgccccgaaataccaccacggcattgcaaagggggaaatcgtgacaatacccttcgcacaacacaactcaccacagtgcaccattcctggatcataatcaccccctctataaatataaccagaggcatggactccccagcgacccccacggacttctcgccgcttctcagtctggcaccctgtaatgaaccatgctatacaaaagataaagccgttgcccacgctggcttgtggttggtacggttaatgtttcacaacagtagctcgcgaaccggtccttaattgtcatgagcacaaccatcaaaaccatatgctcacaacccaccttatccaggttttaattatcaattaattatcataacacgattaaccatcgtgagctacatttaaatctaaccataagtaataagaataatataatataatttatatttaatcccctttaattagctaatgttactaagcatggctaagcaaacatacatataacatttagctgaaccaatccaatatgtaaggttcatgctaatcaaattataacccataggaaaataagatcatcttcggccattaattaattgggaaaggttcaccacccgatgacattcgaaaacaatgcatagttgaaataaaataatagctttaaatgggttcaacatgctcaaagggttgtttgggatctgtgtgacttgccttgggcttccgcaaacgcttcgtaccttcctcaacggaaacgctctccttcagaacgtcgaaaactaaagcgaaagaataaaaatcaacaaaacagtacaaaaacaagcataaacagtacatgtggatatttttaacatgtagatcttgattttagaaaaatttagcaacttgaaccactcgaatcggatctacagttatttagttatgattttcagaagatttaatctattagaaaaagggaaaaagaaaagatgatgatgtcacgatgacgtcatcgacggcagccacgacatgggtggcgacctcgccggagctagagaggtcggccgggctatctaagggcatctacacgtagaggacgacgacgcgatctcaacgatactcaccaacgcgacgaacgacgacggatgacggccggcggcgagcttgtgcggcggtggcgactcggtcgtcggcggcggcgactctccggtgaccggcgacggcggggagggggcggccgagcttcccctcttccacgcgcacccgacggcggcgagaggaggcagcggcgacggccaaaacgacggcgcgaggcggctgttcgtcggccggcgacggcggcggctaagacgacgtggcggcggctctacggttgacgagagagctcgggagatggggcaaaagaaagagaagaactaggggatgctttatataggcttggactagagagatcggactccaaacgagaggaatcgaagccggaaaatcttcgggttagtttggagagataaactcaaaacgaattttatttggataaaatacaaggaattaggttccgattcttgggggaaacgaaagaggaagataaagtaaatatttcccctcaactaattttaggaaaacacaagagaaaaggtcggatttggaggggaaaaaccgagcccactcggtctcagttcggctgctagaggtagaagatgaacagtgccaagggaggcaaattagactttttcggttggctgagaacagaacagagcacttgacttgggccggcttgggctgcacagcacgcgcgccagggagagagaagaggaaggaatgggctgaaaagggcccaagctgaggaggaggatttaaaaacttttttccaattaaaataatcacttaaatgatcttttaattgttaaaaatacttccaatgctcaaataattccaagaaaaatcttgaacatacttggacactcaaagtatttaatataataatatccagatcatttaatgattaatttattatttaaataaattgctaaactgttctttgtattattaacattaggaattgagctccgaaaattccgagaatattccagagagtataattaaccatggagaatttaataaaaattaaatccatccatgctttatatttagaaaattttatttcccacaattaacttcacttgtaaattattgaacatttcatataaattctattaataatttattaaataatttataaatcctaagacgaaaatcagggtgtgacaacactagagtgggtacattggattctcaactccaaatgttggagagctcccaagcatttgtgtatcatcgttgtcgtgatgctcatcatccttccacttcagcgcgtcctccttctcctccacaagaatgaagacctttttggtagttgatgccaaaagggggagaaaaatgtccttaggcgtgctttttgtcttgtgggttgggactagtggtagtgaggttagtcacctcatatctaataggttaaggaggtttgggctatattatgtatgggtatgggctattactctatattgtgtgttccttttcgttttgttgatctctatgtcatttggacccttcgcggtcttgtaatagcctatatttatttgtgagccctttatgtgttcttaatgtgaacttgtgcgatgatggatagttggtgtgacattgatatatttgtgaccatcttatgctcatgattgaatatttcttgaagttcacattgagatattgctcttgtatttgtgatatgttgaaatgagaaattgaaatgtgcattggctccatatttgctatttatgattgttatgcatatgtttagggggagcttttgcttgtcaatgcaatatatgtccatgtgctctatgtttgattatatatatttgtggtgtttgtcatcaattaccaaaaagggggagattgaagcatctaggcccccggtgttaattttggtaattaatgacaagcgctaattgtggactaaccgttgtctttgagctatacattttaagttaggtccacgtcatatgtgcgcatggatgattatcgatggataaaaattgacggcgcaaagcaaagggaaagaagacggtaaaactagcattttaatttagaattgatcgaggtgtagggcgatcaaattttctagtttatttttagtttcgccgtactattaagagggtaatgacctagcaaagagatgattttaattgccacattaggtcattatgcatttagacttgtgctcacatttcacacacacacacacttcactgggttcggcctgaccaggggcggtcagaccggccacatagtggcagtctgaccggcgtgccttggccggtctgaccggccctaagcgggcggtctgaccggcggcacatgcgcagtcagaccggccccctggaggccgggatggtgctgctcgggatggccgatatagagccgatggagccgtattcggtcagaccgagccgatggcggtcatatattntcttgcttattttactacctttaatagacgatttgccatgtcagccaatcaaggctcttgcaaacggtcaagtggaccaaccacattcgaaggttcatgcatgtcaaattatcccccaaagcaaattaaaaactaattcgtcctttatttattggatatagttcatcatgcctcccacatatttcgcatacatgatttactccactcacactcatgcgctcgtggcttctctttaaaatcctc

SEQ ID NO: 16929 - DNA, 21731 bp, Oryza sativa
  unsure (1)..(21731): unsure at all n locations
cgcgatagggcctctgacaacactacaacggctagtttcctagccgtgcaagagtagcacggtgtgaccggccacatacctccggtcagaccggcagagcacagagttgggggatttcgcccccaacggctagttttggtgggtgggagtataaatactcccccaccagcagcaagggggctctcttggcacccaattcaattgcacctctctcacacaacattgagcttagtgttcatccattgtagtggttgagattgatttagccaagagtcaagtgcatttgcttccattgtagagctagtgtggcacttgatcatctccacgccaagtcattgcttgttactcttggagattgccgcctcctagacggcttgtggaggagttgcccggtgacctctccgagaagattgtggaggaggcccggtgccggtttgtgagtggtttggagttcactaccttcggagtgaaggaagaactaccctagtgatcgaggcttgggtagtcctctccgtgggccggctcccgccttgcccaccccttgacgaagggggcgtgcggcggcttcgtggttgagcggtgaagttgggctcgcctcaacggggagtaggaaaccggtgagtttccgaacctcggtgaaaaatctcttgtcttcttgtctcatttgattgtcgcatttatatttgtgcaatttatatttctagagacatacttgagatcatatcaccctaggattgctaaacattgacataggagtgtgatttacttccctagagatataattgagccactatcaccctaggtttgcaaaacataacttagttgcttagttagagttgaccctcactaagcctagcaacttaggttagttttgattaggtgtcatttaattttaaatcgcctattcacccccctctagtcgacatctcgatcctacagcagcgcggcggcctaggcgggcgcggggcatgggcggaggggtggagacgaggaaggggcgaggtggcgccgcggcggtagcgaacgggaggaggcggcgaggggtcggggtcctggaggggaggagaggcatgcagctgcgaggaggcggcttgtaaattagcaccactttgttaaaatttagcaaatattttagaaactagaagggtgtgtttgtaaaatgggttaggagaggtgagattggaaaatgaaaatgaatagacggataggatgaaatgggggtgagaagaatggatggctaagattgaagcttgtcctttgaggggtgggaaatcatatcccaaacctattatccaaacacagccgaaaggtgttacagtgtcaatttccttcgagaaagctactgcatttgggattattgagaaatgtccttccacaaattactccctccatccaaaaaaaagccaacctcgtactaggatatgacacatcctagtacaacgaatctggatgtgtcacatcctagtatgaggttggctttttttgggacggttggatttggggcatatgacattattttcatgtaaatccttttccccgagtagtgatggtacataattttgtggtaatataaaaataaatattgttttcttataaagaacagcaagtatgatagccatttattccttcttcattttgaaattcacgctcatgagataccatattgtttctttttactggaaaaaaagaaacaatatggtatcattgttgtatcaatctcgttattgtatttttttactgtccgtttcattgtgtacgagattgtatcatttcaaaaaatatagtaacgtacaaaatgccatttattccttctttttacatcatctcgtttcattgtgtttttacggtccgttattgtatcattattgattatctctttatttctccaatacatacatgagctcaatattttttttccttggtgcagtgaggtactcctacatgttaaaagaagagaactatggtgccacagtaaatgaaaaagtcaaatcgaccaactatctaaattattgatgtcatgtgaacatggctctgttttttctttattttagtttggtgttatggataacaaactgtctaagctattaaaatgttggcacaatcaattgaaactaggtgaaacctcgcacgttgctgcgggagttcagtaggataacaataggtaaaaaataatgtataagatagctaaacaacataaacttacataaacactaaaaacaattgatctgatatggcttaattagagaatagagaaataacattaaccaagtgagaatgaactacataggtacataagatattataaaaaaataatgaatatatatattgaaatattatgtgaattatgtgggatgatgatttaacatgctttcattttaaaagctctaaaatgtaataaattttaaattatagataatatagcatgtttgcattatattaaatgtattgattgttagtggatgatgatgtgttaacttgttagtggatgatgatgtggtatctttgcatgttaagctttatgagttagtgggttataactttatagtcagataggatatgacgggttctcttagtctagctacttgagatgcgctcatagcgcagtggcaggattgctggcatgcaccccatccgcccaggtttgattctcctcgagcatgctcacttggaatatttgttcctttcttcttaaagccatcagcaccaagccctttcttggtgtccaacttcttaatctagctacctaaaacttcatatgtacatgttctttatctgctagctagtctaatccaggtaactataggcaatgttttgcatcacatagatggcaacatcatatgacctattaaccttatctaggtttgacatgagaagtccatatattatgttttacttgggtgccatcttatagttatcagtgagctttattattgatttattctaatttacctggtgtttttgtccttcaatgcagcccatatctaatgaattgaatttgtatctttattgtgatgtgcatctgttgtatcacacgtattattgtaacttcaggacattagaaataaataagtttgtaatttgatagcaactttgaatgatgttcggcattgccacaagatattatttattctgactgacaatcttataacacaaaaaattgaccaatcttaatgaatgatgttcagtattgcggtattgccgtaagatattatttattctgtgacaatcttataacacaaaattttgaccaatctactgagaaacttgcaagcatttcctgctactgaaaaagcatttatgttaaaaataacaatgctgaggaagacaagcatttcttgaatgtgataatataggcagctgaaatttgtaccagattatgtatactatcgtatacttgtttctaacttattataaacatgtataattaatgtggaattttaggcacaaatctctaaggaggcaatgtacatttgacaaaacgcatgaggacctcatcattgcttaaaaagtacttcatctgtttcacaatataagtcattctaacattttccacattcgtattgatattaatgaatctagatagcatcaatatgaatgtgggaaatgctagaatgacttacattgggaaacggagggagtagtatataagatattctctgcatgggtgaaaaacgaacactctaaaatggttcttatgctaactgatgtgaagaaaactttgtgcggaattataaataataagaatatgtttcaaattgtatgtgtttattactactgctatcttatagcttcacagatttaaacaattggcatcatagggctcatttggcttggtacccaacgaaattagttttggcactaccaatgttttaatagagttggggtataaaagctatattaatttaggtaaatattggcattaatctaaatattcagaaagtactatttaaatttaccaactattttgcagggcaagtttaggcatcaaaccaaaatagcccatagtttgatggactactatctttttgcaatacttttatatatgattattctcaaactaaacatggattttgatgtatttccagtttgtaaaatagaacatctctgacctcaaaatccatgcattttaacaaaatatcactttcttttccaaatgtttccaatcagcttctgtctactttctgataggcggctaggagaaagcatataccgatggaactgaataacaatgaacaccagtctcttctgcggaaaagaaagaaagaaaggaaaaaaaaaaaagccagggtcggttttgcttatcggggtcccccttatccacatcagcgtctcctcaaccaatcgccatttgccgcgccttatccacctcaccaaaaccccacttcttcccccattttccacctccacctccacctcccccttcccttctcgccaatctcacttcatcctcctcctcccatcaatggcggcggcgctcgcgttccccacctgctgctgctgccgccgcccctcgctgcgtccttccgcgggtcgccgcggccgtcgccccgtcgcccgctgcgcgctcccctcctccgaggtgagcgaagcttcttgcgattctttccttttagttgcgcgagcgggatggcttgggtgcctgcattggtgggagccggatggatgggtttggggtggatttctggtgcgcggcaatgtgggtcaatcggtgtggttggtgggaatcgaattagaattatcctacctgcgttgtactatatacgagtattgcggtatctctgtggtggagggggcttgtttactttactgccaggggtacaagtattcagatgttaatgcacacatgattaataacctaatggcctgagagcaatgtattgtggttcttgcaagattttagtttgttcatgtggggacgcttctgcgttgccataagttttcagctcccagtcagcgtgagactgactgacaaggtttgagattttcctctatgtaaagttctgcatgtgcgtttgcttagtgttgcgagttgaaaattgggtgaaaacagtattatagacatgatacgtagtaaaactgttagatgatgcagagttttatagctgcaaatttggaaagtgaattgttgtgtgtccaaactccaaaggattgaagtgcgaaacattgaattttattaagtaactacgatatttttctttcataattgcagctaaacctttttcttttgcgaaagattagatttagttggcaaactttcctatgcttgttcttggttgtagcaaatacggaaccatccaggcatccagtaagattggtaattctgtttccataagctattcttactgactgctgttgtcctgcatgtttcatgtgcgacctaagcttaggaaggtaaaaaatttgttgatggtatgcagcttgtgctattatacgaatgaaaatattttctcctttgcattcataatcatgtgtaaaagttggctatgttcctttcgttcaaatagttgcatttattttctgttctgcccttgtaaaacaacaatttccttcattatcggtacggataaagtttcatactgtgatacctctagtcagatggtttggttctcttttactttgttaatttattctaattttttaattcaattcttgcagaagaattcatttagctggaaagaatatgcaatttctgtagcattatcggctggattaatcactggcgcaccaacgttaggatggccagcacatgcttctcctcttgaaccagtgatcccagatgtttcagttttgatctctggacctcccattaaagatcctggtgctttattgagatatgctttgccaatagataataaagctgttcgtgaagttcaaaaaccactagaggatatcactgacagtcttaagattgctggtgttagagccttggattcagttgaaagagtaagtcatccttttgagctgccgattagaaatggtctaggttttatctagaggacaatgcattcaataactgaaagcagccaccttttatttcaactctcttgaatttacttactcacttgggctactggaaatttataatttttttcttcaaattttagaatgtaagacaagcatcgagggcactgagtaatgggaggaacctaattcttggcggtcttgctgaatccaaaagagcaaatggggaggaattattggataaattggctgttggacttgatgagcttcaacggattgttgaggacagaaacagggatgcagtagctccaaagcagaaagaacttctccagtatgttggaacgtgagtgaacataactcctcaaaacaattatatgtaattgtttgtctttccattgctaatgtatggagtagtagatgttctgaccacaggaggctgatagatacaacaatcctattgcctgacttgttttaagagaaaaggcaaactagatgttttcccacctgccattctggggatcaaacccgggtggtgcatttcagccccacaccttcactactggggacattgacaaattgttatggtttgctgaacaaaagttcttgtgaagtgataactctttagtgctacagaactgaattatgtcagccactaaataaaataattgtgatcactcttacggaaaggctcttctcgtactttcaccactgaggacattgacaaaatgttctggtttgctgaacaaaagttcttgcaaagtgataactctttagtgctagagaactgaattatgttagccactaaataaaataactgtgagcactcttatggaagggctcttctcatttataccttgtcattgactctgcagctgagatcttcctgggacattgcatttctgcagtgtagaagaagatatggtcgatggattcccctatgaagtgccagaagaatacagcagcatgcctcttctcaaaggaagggctaccgtggacatgaaggttaagattaaggacaatcctaatttagaggattgcgtatttcggattgttctggatggatacaatgctcctgtgactgctgggaacttcttagatctggtggaacggaagttctatgatggcatggaaattcaaagaggtaaggttgcttctgtgatacattccatagatatagtccaacattgtttataccaatcaccatttttaattgcattttgataaacatgtagtagataatcttgatagtaactagcaagctcgttttactgactaagccatggcattacccattttttcaatgaagaagcctctctagttgttctctgttatttaggattgagaagtcagaaccttaattatctagtgagcttttgttaactattatcggttcttttgcagctgatggttttgttgttcaaactggcgatcctgagggaccagctgagggatttattgatcccagtactggtaaagttcgtacaatacctcttgagttaatggtcgatggtgacaaagcgcctgtatatggtgaaacacttgaagtaagtaggcacagttctttcttttttcagtttcagaatctaccggaaattttggcaactgtatgttgatgagcttgttcttacagtacacatgatcatgcattcaggaacttggccgctacaaggctcaaacaaagcttccttttaatgcatttggaacaatggcaatggctagagatgtaagtatcatgatactgcttcagtgtaatgtatcaagcatctgcagatatgggcatgcttcagcattttctaacattaaacgtttgaatatcatggcaggaatttgatgacaattctgcttctagccaaatcttttggttgttaaaagagagtgagctaacaccaagcaatgccaatatactggatgggcggtatgccgtatttggatatgtcaccgagaacgaggactacttggcagacctcaaggttggggatgtcattgaatcgattcaagttgtctcaggcttagacaacctcgccaacccaagctataagattgtaggataaaatgtttctttttttcaggagttccttgataggcaattattttaccatattgaaatcagtgtgaagtgctataatctctaaccctcatctcatgaccttctatgttttgtgagctttgcaatatgcgggattcaatattacttgaaagtaaagacgttcatcatttgtctcttgccatatgacctaaaactgaatatcaaccgttttgtctgaaaactagcatggcgtttgtgtgttcaagggtctgctactatgagataatgaattacaagagggaaaagtaaaagatatgttgcttattttcacactgcattctgacttactttaggacttctcagaatggctgtctcccagtgcagttctagttaataattctgaagattttatcattctgttagcgcttttaccagagtagacattgagatataacagtttgtaggggtgtttcatatgtgccactctaaaacagtggtgtttcctatgcaaataagtcgcagttgacaatatgtaatcctatgttataaggccactcttatagttgcattggcatatctcaaactttgcaaaagtacaatggcatggttccaatttacccttatttatttatgtttatttttatataaagtgaatttaccaggagtatctacaatgttttggctctactccaatgagacaatacccaagagggttcagaaacttaccctttggcttatcttggtgaaaaccaaaatggtctaaatatgaacttggaacacctagaaaagctttagaagcttattttagtaattgttatgtgcatgtgtggctatattccggcaaaaaccatgcttgcaaaaaggcccagggaaaccgaaacatctctatgagctctctctctctctctcttgtagagctgtgaggagtgagccatcagcgccgccatcgatcacacacctcccgcttttctatgtctcgtgtgagagtcgagatatacttgatagtacagtggtaagagatgtgtggttttaacaccaaggtcctgtgttcaattcctaacacgctcacaatttcttcttacaaaatgttttgaagtacatctgtccctccaatcctcttttttttccttgtgtgagagtcaccacaccgctggacttcttcgttggttccacttttagccccctttatccttatcctcccacgtgattacttggcttgtcgaaaggatctccgccctggtctggagtgccctcgccgccacaactacccttgccgcgtcaaccgtgtccgacatttgccccgtcgaagcggcgagagccgaaggtgccacaccagcttcggcgaggggcgtcgaaggctctactccctcttcggcagccatctcccctcctgcttcactctcctttcgcttagcaaccttctccttcgcgaccttcttcggtggcattcgctctcaatggtttcgcttagaggtccccacggacggcgccagctgttatcgaatggacaactgcgtcacatcgaaggacgtggttctctcaacagtggttggaagtaaagaatagttatattacttagtgaaaaattttttgggatccccccattacatggcctagaggggctatttataaccctattacaggtcctctcccctagggtttaggctttacaggggaatttacatggttacccttacgataaggacattattagggatacatagtgtcctttacatgtatggaccctaattgggctaaatggcttggcccattgatctggcgaatccttttcggggacgcaacggcccgctgggcttcctcaggtggggtttggtgccttggcgaaacccatgccctcgggccaaggctttcgccttaccatattcgcctaggtgacctcctgacggggtccttgtccggcgaaacacgtgtactcccgagccgtggctttcatccttggggtatccctcttcgaccttctccgctcgcctccggtctgagcctgttgcccaagttttcggtttcggtaggcccggccgaaggcccttcgtggtatacctccaacagtgataattagctgttgtacactcctctcattattttatcatttccagccgaaactaagagagaaagagtggtgaaagtaccaaaatgcctctacgtcgttttgcttgtaaatgctggtcaaaccagacctgatcccctcacgcgccatccctgtgcgcgcgctactcaacgtcctcgcgtcccgccctcggcggtgtgaggctcgcgagatcccacgccccagttaattggggcgttggtgtcatggcgcggcgccgcgggttgtggcagccagcgaggtgcgccttgagcgccagtttggatgacgtgggggcggggaaacggagttcttgaggccgatcgaggagcttgcggtggcggtgggtgtgcagcgcacgggttgcgagtggctggcgagcgtggagagcagcgcggggcagagctgggatgcctttatcgctccagatgctgaagcggaagaagcagcagcagctggtggtgtggcagacgcggtgggacgagcggctactggactccgccggcgactcgatggggcgcaccttcttgtcgatggtgctcatcgtgcaggagctgcagagcttcgcgctgcagcagatgcgggaggcaatgctgggcgacaaccaacagggcgtcctggcgcgagtccatggcgagatgcacgcctccttcgtctggctcttccaggacatcttcgccagcaccctggctctcatggtctcccccatgctcctcctcgccaacttcatcgtccactccatgggtcagtgtcgccgccgcagcagccatccctcccgctctgccttccaccgcggctgtcgcggtggtcgacacccaacacgccgacccatcccagtgggttaaacactattgacccaagggcaaagttgtctctctccattaataataaaataataggagtatccagccgctaattaccactttttacagtgtccacgaaaagattcacgttcttcgggtgtctttaagcaaatgccacaatctttgagtgccctgtagcaaattttgcctttagactatatgcatgtcgccacatgaataatacaattctttgggtaaagcaagtattggtaaggttgcaatcgctaaagttgggtttattacatttaagatgttctaatttttttatgatgtcttagctataacgatcgatacaaacattatcattgacatggttatacttgaaaagtagttagatttttttcacccgttacgacgcatggacatttttgctagtaatacacatgttactcccgtgtatgatacaatgggtggtgtacttaagaatactgactatcatacttaggggtgaaaacgggcgggtacggtcagattatggcattcccatatcctaacccatattttcttttaaattcggaaccggatacggataataccggataatatatcactcatcccgtatcctatcccatattatttccttcgaatcgtatttgggaacggatatctatttgtatctctaattcatagatattaaatatcataaggtcattaaagtattaaaatacatacatcaagaaaaaaaattatacaatattacatgtgaacattaaaataatgattaaccgatcttttatcatgtttctaggtagatttataataaatttacatacatattttataatacgggacatacggacggatacatgtcttcccgtttcgtaacccatatttttctaacgaattcggattcgaactcggtatcccattttttctcccatattcctcccgcgagcctcgggtcgggcgggcggtcgggaaatacccgctccattttcacccctaatcacactaagtttgagctaccaaattttttagacatatgctccgtcacctttatagagagagacgattcaaaagataaggaaaccaaaatagatttattttgagatagtactcctataacagaagaaacccaccgaaggcccaataaagtggaagcatataaccctatgcccttgtaaggtaaccctagggctaaccaccagcttcctcccaatccccaaatccaccgcgcagacacgcacgccggccggccggcggacgcgatccgctccgttgtcatcgctcgcgatacacgcagcgactaggcccagcaggtctgcacggcggtctcctccggctgctcctttcattccaggcacgccgggcacccccggttcgttcatcgcatctcaaagaaggtagggaagcatcgcatctcgccgggtattgccagttcgccgccatgccccaaccgaagtgcccaacggagcggaagaaggctgaccacctccaattgattccttgcggggccccggccgggtcttgcgggggggtcttgcaggataacaatgtgcaccaagattgatgtaagttgctccgagcatatagtgatgtaaattcttatactctcacacatcggcgacatcatgtgttattcttgaatactctcccgcgcctagccgtagcccgaaggcactgagcctcaatacgcatatcatatctaccagttctcctttatttttccattgttattagagaaccggatctgagccgtcttggtctcatgtctttctttctgtctttttttcttttcctaaaaaaaaaattaaaattggatcttgcctggcagtcccgttgtaagacgaacaccttgtccggaaaggatgtcgattccaaaaataacacggagaccatgttcgagttcatttaccaataatccctatggcacgcatatatacatatataagtatagccgatgcagtgtattgtatacagattattattattattttctaacaccgctagttaactcattgctaattctgcatgtacttggcgccatggactatgaattcaagacatacaagaagaggcagaggggacaacagcaaatggactttgaattgaagacataccacaggaagaggcagaggcgaagggggcaccagcaaactgtagagttacccgatgagattgtgagggaagtcttgatctggctccctgtaaaatccctggcaaggttcaagtccgtctgcaaggcctggctttccattatctccgaatcttgttttatccgtgagcatctccagtgctccaagctgaaaagatactggaacccgtcttcctttctcatcacgccccatattcctctgaaaccaggtgactctatctttgctgctttctccaccgacatccgcttctatcagtggtcattacaagaagacacgagggctgctgcaacactcctttataggaggcacttccctgccggtgagtttgaaccggtgctcccaatggcacattgcgatggcttggtgctgctccccactaagaccaaggcctacgtcttcaatccggccacaagggatgtccttgcactgccagagagcaatcgcaacatgaggcaacgtgacaacttgggctttgatgcttcgactggcaaatataaggttgcacgatctttttatcgttcccgtgaatataatcccatggggatcgctgcaatgggtttcgaggtcttcactattaatggagaagaaagctgttggagagaaactttggtggatccaccctaccctgtgctgtattcaaagattgttacacactgcaaggggtgtctattctattacattgataagaagaatcagcaaaatcccccacaggctctgctccgtttcagccttcaagacgaaacatttggtgtcactccgttgcttactgacacgtaccctcaagttgaagatgatgaagttacaattactgagcttggcggtcaactatgtgctactttcttttgcaatactctgcaacaagtatgtatctacatgtcaggagatgtcatggatccagattggaattgttggcatataataaactttatgaattgctatccaatagcctcgcttggcagcggtcggattttattgaggagaggtagtcttgtcttctgtactaatctgaaatcgtacagcatagaagataaattggatattgatgatataaggtaccttgggcccaatgaagacaacttggggcatgcatgggaagacttatgctggtatgacatacttccttacaccgaaagtcttgttccaattattcctagggccaccttacaggccttataatgtgtatgcctttgcgcaccaacttagtggataacccaacatcttcatcgagggaagcatgaagaaaaagaagaatgaagattatttaatgatttaaggggcacttaaatgaggtgttgcatgtttgttatttgagagccggttcattttgtagtgtaaaactttggcatatagccaatatttggtcaggtggtcaggttgagaagtataagttatgtttagattgttaccattgtcttgtgagacgaagattctagaattaacaaagtttggtaatggagacaagtgtcggcaatgtttagaaatttggtaaggttagttttgacaacaaagtgaacatctcctgagttgtttccttataaacaccctaaggcagtgtttggcaaatggcaaagggaaatgatttcccactcatctttaaatcctaaccattcattctcccttcccatccatctttaaatcctaaccattcattctccctctttcacttaattctaacccttcatttatttcccaatcccaatcccaccccccatttcctattatccaaacacaccctaagttcttatgattcttcgcttgtaatagtatttctttctgggtgcctttggcagggctcctgtttgtttacgattctccaagttccagattttgttcatactaaaaaaagggactatctatacaacattcagctaaaaatttgtaggtttttgccgaattttggttcatccgaccagacatgcgtcaacatcccgagcgagagagcagagcgcatgggtagcactcctctgcacactgttctgttttttcattttttaatttttttaatatttacagaaataatctatcggcgttaaaaattacaaaaatagaccctgccgcctcagtggtgggcggcaagctgacgtggcagacggcggctcgaccacgccgtctgccgttgtcggccaaaattacatttagccccttgccgccctttggggctaaatgtaattttggcagcccataaagagcttggggatcgtactttttgcatctgggcccgactaaatgatttatctctatagacaaatgatttttgtctgttatgttaataataattaaagaaatatttgttggtaaaaattgttaataatgttataaaaatgtattgaagttggtggtttcgcaatttcatatgttaagtaagatattattttgtaacttattcgacgtattagtgtgcgaaattgatataggcctatcgcagtctcggtcgtagaaacattatatggacttaaacaaggagaattatgtaacataaagaaatagtagtaaaattttaacatgatacatctatttccactgcggttacgtagatgatattagattcgaactagaagagaggtagtgcaagagttgaacacaacgacgatgtagtaatgggacaaggaagcatgacagtagaaatttcaatatgccaagttgtccgataatagctaacccctacgtgaggatccctctactctctcaaaccgcgctttagtaaccctgtatttctctggtagttcaagctgcacaacacggctaggtggagttagaacccttctggtgtctatacattctctgtattgacatctccttggtggttcctgggggaaagaatagatgtgaagcgaacaaagttagtaaatgttgtcagaaaacaaggattcatgataatcaaaatattcttaccatgaaatcatcgtcaagaatatttggacaaataaagaaccttcgacccaatgtcgtaggctttatggaacgaagaacctgacaacgatcaccgcacctgcatcttggacgggcttcccatggagggagtgctgtagttagcacccgccagtcgcactgttgttcacgacattgtcgttcgtaagccgcttttctctgcaagtattgctcagtactttcggatgtgaaataccagcgtccttgtaaacaagtggttaggtcgagaatgggattttctgtatcgatccactcaatgtatgcgcaaactgtagtgcgggtctgacgaatagagtagtattacgaagaataaaacaattgcccatacagaatgaataagcatatgcagataatagaatatctcacggtcatagttagggcacctaaaaaagcgccttgctcgaatatcaggattcctcgaagccattagttggcatcggtcactacataggcagagaggacgctggcaccaaggtggtagtaggtatacacaaggatcgctatgcagttcggatcctcaacgcctaggcgtctagccattgacgaaagctggtaggatttgtaatggagcaagtggggaagagagtactgaatgtggctgagttatgaaagattgtgaggcctcactcgttaaggcgacttatataggcacaaaaaattgcagtgatatccctaacatgtcaacgtcgtggggcacggtgggtacgcctgattggcgccgaaagttacattggtcgtatgcgggcaatggcaggcaattagtggtatcgcacgtgaataaaggaggctgcatcggtgcggcagaaagtagtcgtgcatgcgccgaaaggtatcgtgcattcgtaaaaagtaacagcaaagttcagggatgagaacccgaataacaacaacgtattcattacacaagcatacagtactagcatgtgaagtaaataaacaaagagaagtctgttctactggccctgccccgcgccgcgaccacgcttggtccttcgggcctgtgcttgcacgtggtcctaggagtacgtaaaacgatccagtggcacagcacgggtagcacgagtgtttggcgacggagtggacagcgactggtcctgcgtctgcacaggcggtgcgcctcccagctgtgaggggccgatgacgtcctttgtcgagcctgaagcgaagtcgaaatcggtgatgtcgaagagcaaggtggaagccaccccgtagtccgacgaggtcccagcatggtccagtggtggaccctgactcgacgtgccggctgcctgtgatgaagtcccgatgtactgccagaactgcgctgagtgcgaggtcgacgcagctgcctgagacgctgaccctgcagcctgggagaagtgggcagcctacgtcgtagcgaactggacgaaacctagacatcgacaatgtaacccttgtaagctaagacataaaatgcatgtaaattgattgtcgaagtactgttgttttttgaagtacctgtggggggcacaacagatggcctagccgaggaaggcggggtgctgaacggtgcacgaaaccctgaagcaatcggatcaatcggctcacatagatgtgcgaggcatgtaaaaaaaatccttaaaaatacttacctctgtgcggagggggagtcggccttggaacgtgcgtagctggacgggaacaagtcggtaggggtggccgctgtggtgctgcgtctgcccgagcaacgtcgtctacatgacaggtgagcactcggagaatcgagcgcatcgactccaccatccgtgtgtacgtcgtaaggtgctcctctacgggtaccggaatccctgcaactaaacgttggatcgtcgttgaaccgtcaacgacgaccctattgatgttgacgacctgcatggttaatttattcgtaaatattcgtaacatttgacgaagagaaaggaataaaagataaaggaatggtgcgatgcagggtactcacagcacgagcgaagtcctggtcgcggtgcctggcgtagaggtctctagtgctcgcaacgtgggcctgttgctcaaagggagcgaaggtgactctagtacgggtgcgtggctggtaccagcgtaggtaggcctcgtacgcctcctctgtgtgtggctctccctcgtgctccacgacctcctcggttgcgagcaaccagtccttaacaaaagcaaccggcgagcatgcgtgcccaagccgccgccggtggtgacatcaccgctgacgtcatcgtcgccgtttcccatagaccggcggtagatcaagtcgacctcggccgttcgttttggatcgagtagatctcggccgtccgttccgtagaccgccgctgtgcacccggtccaccgtgaacccgagcccgctgacgcaataatcctcttttccttttcaaaaataattcattattgcgtcataattcaattaaaatctatataaatgatttcatccgatttaatctttgaaaattcataactaattcatcttagcttggatttagttggttcaagtctctaaatttttctaaaattgagatctacatgttaaaaatatacatatgtactgttcatgcttgtttatgtgctgttttggtgtttttgctcttttttccttagattctgacgttcccggagagtccgatttcgcaggagaagattttgaagagttccaaggccagcaaggcaagtcgcacagatcccaaaacaaccctttgagcatgttgatcccgtttaaagctattgtttctattcaactattgcatttatttttgaatgtcattgggtggaaataacctatggccttgttatagcccttttgctattaattcccaattctttgtcacttggttaataatttgattagctagaacattatatggttttagttaaagtgaataggatgcttagccatgcttagaggccctagctcatataaatgggataacttatgattcactattatttaatgatggcttaatgatagctcatgatggtcaatcgtgattggttaattaattaaattgccaactaaaacctgataatggtgggttgtgagcacatggttttgatggtcgtgctcatgacaattaaggaccggttcacgattttcagttgtgaaacattaaccgtgccaaccacaagccagcgtgggcaacgactttactttccgtatagtatggttcattgtagagcaccagactatgaagtggcggagataagcccacgggggtcgctggggagtccatgcgttgtttacaagggggtgattatgatccgggaacggtgcattgctttgaattatgttatgcagagggtattgtcacaatctctattcgggtacttgttaactatcgcgacgcatggttgacatgatgttgaggttgtgtcttgtgtgtacagtggtacacctctggccagagtttaaactattcgaatagccgtgccagcggttatgggcgggtctaacaatatctttcgtgattagtttcacagttctcaccatattaaatgatgctgttaataacttgtttagctcctggtttggagtggtatattcctggtttggagataaaactgtgcagccgggattggttgttcagaatggttgggcgtatgcaacagggtatgttgtatagcgttggattaatattttttaattaatactttactgttttatgaaattctgaaatgtttattaaatgctatttatgcaaatgagactatattatgccttcctttgttatcccgtgcacttgcatatttgctgcatggcttgctgagtatgtcatatactcaccttgcaatcattcatcagaggagttctacagtgatgctgatggtgtggaggattaggcgtagccctggtcaagctgcctgtggagtggagtcgtctgcgtcgtttatcttattttccgctgcttagaactttattgattgagaggaactatctacctctgtaatgacattttattcgcttattaattagagtaataattgtactctattattaatttgttattgtgtgcctcggctaattcctggacgagggtttacacacatgtaagcgtttggaattttggatagaaattccgggcgtgacaaataccccggactgattgatcaaagcatgatgcatagcgtaatcaacccgatcttgaaagttattgaaaaaatcttatgctagttcactattctgattaagatttcctccttgtggctcctgtgcaccatcaccttggacgccatgaactccttcagaattgtcgccttgatcgcttggggagccgtcggtagcacctttagtactcggctgagccgagttgcctagagcttgtttcacttctccatctttagaagaaccagtcccaggactatcagcaaccacgtttattttatacttctgaacaagtgtccccttgcgggtctgcatgaatgagttcaggaactgatcccgtgcctgctgcagcgttgcttcaaactcctccttctgcgcaggcgtgaatttctctggatcgatcggcatgacgttgtcatcaatgatgtcagtcaatcccagcttcaacgccttgcctttaacggaacctaggcttgatggtggtggtggctgtttctcggccatgagtaagaactgacgtctgacttcttacaggtcccaccgggcgtgccaaaagcgtgttgacagaaaacacgtggcctgggagatctgcttaactccagtgcaggtccaaagctcgccttcggctatattagcgtgccagttgatttgatcctgtaatcaacaagaaatacaagcaaagaaaccgtggttcaatctataaatgatagccgatcggctagatgccgatgacatatcatttatctttgagccgatgtcatctgtgaatcgatcggcagtcatgaataagtaaagtagaactagatctattcgatcggctgtagatattaacaatatatactccttatattgatatatacttaaatcaagtgattgggatagatcggtcaccatgccgagacaatataaatcacttagatcgaaatatatatcaagaccaggcttatatatgtttacagcatagcaatcagatagatttagcatgtattggctaccactccaatactactctatatcaggatatcaaagcaagaatatatatccaaccaaaggcctaacatacttagatgcacaatatcttgatataaagggcagatttaacatgtcaatgaagtatatagaccaaatatagttaaatcagataagatcggctgaaactttgatgctattctaatcaacaactagaaggcaggctagagatcgatattctaagaacgacttaatagatcaaactcaactgatatagcattaagtatgaaaagaagaccaatatctaaccaatcaagccgctagaagtttcatagagtggtagatatcttatataatctagatcaacgtcaaaatctaacctaatcggctgccttctgctaacagatgttagccgatagtaggttagatggcggtattgctagagattatataagatatataataactccggggaaaaacccggggaaaaaatttntaaacgaattacataaacaagattagagtatcataaagatggaagaactaatcctaggaacacaatccgtcataacaagttttacctcttgttgaagatcgaaaccgatgcagctcaacccgaaagcaagaactcgtcgaaacaaaactaaagcaaaaagggtgatgaactactgtaccatgtngtagacgattngngagcgcc

SEQ ID NO: 16930 - DNA, 15481 bp, Oryza sativa
  unsure (1)..(15481): unsure at all n locations
gtggcccgtgagtgccctccctacgcagnacntcatcagctgtcatgcatcagcaatatgagccgatcatgcgttaacccaaacacttgggtaatatttcttcgaatatttgccattgagcgctcgcccataaacttcgccatcaagcccttgcaacatatatgctcccttagacacaactttatcaatttggaacggtccttcccagttcggcgaccacttgccgaatttactatcacgagtaccaatcggcaaaatcagcttccacacaagttctccttccgaaaaatctttgggtaccactttcttattataatgtcgagcaacacgttccttatccttggtaaccttcgcaagggcttgcaatcgtgactgaaccagatcctccctctcatcggccataaggttgtaatactcatcggttgttaaatcattttgtaattccgttcgtctagagccgattctaacctcccatggcaaaacagcctcatgcccataaacaagtttgtaaggaggaacttaaattgatccatgacaagccatcctataagaccataacgcttcggccaaccgagtatgccattgctgaggataatcagaaatctttcgcttaatcaatttgatcaaacttttattagacgcctcggcttgcccattagcttgtgcataataaggtgaagaattcaacaatttgatacccacactatcggcaaactgaacaaactcatcagacacgaagatggaaccctgatccgtaataatagtttgaggaagaccaaatcggtagattatatgctcctgaacaaattgaatggcatccccagaatcaactttcttcaatggaatcgcctctacccacttggtaaaataatcagttgccaccaatataaatttatgtcctttactcgatggtgggtttatcataccaatgatgtcagttccccaacccctgaacggccatggtttaataataggattcatagccgacgacggtgctcgctgaattgctacaaacctctgacaatcttgaacaccccttataataaccgaaacaatccctccagcattgtcggccaaaagtaccctacacgccgaagcaaccacttcatcttgtgagccgattgatgagtaccacagatcccttcatgaacttcgccgattgcaaccttagcctgatcggcacccaagcacttaagtaatactccatcaatcgtccgataataaagctcgtcatccaacagtgtatactttaatgccttatatcttaatttcctagaagccgattgagatggactactcaaatactgatgcacatcgtacctccaatcatcgactgacatcgctgcaatttcaactttaacatctttgatcattggcttataccccgacgccccttgagctaaatcattagcttcaatattttgttctcgagatacatgctttaaagtaaccagccgaaactctttcattagttcctggcacttctcattataaaccatcaatgtatcgttcttgcattcatattctcccgccaattgactgattactagcaaagaatcccccatgatttcaatggtatcggcttcaacttccttgagtaattgcaaccccttgagcactgcttcatactcagcctgattattggtcgcatatggttcaatagtataagcaaactcgaaacatgcccccctaggggaaattataactaagccgatgccacaaccatgagtacataccgacccatcaaagaataaagtccacggcactatctcaactgagccgattgaatcatcacgatgctctacaataaaatcggctatagcttgtcccttaatctctttcggcgattcataccgaagatcaaactcggtcaaggagaatatccactttccaactcttccctttaatattggagccgatagcatatacctgactacgtcggctttgcatataacagtgcactcgttagataatagataatgcctcaacctcatacacgaaaaatatagacacaagcataactttttcataggagaataccgagtctcagcatccaagagccggtgactgagataaaatacaactcgttccttcccttccaactcttgaatcaaaaccgaggcgattgacttcttgccagccgataaatataacctaaacggtattcctttctgtggaggaatcaaaacaggaggagagctgagatactccttaatatcatccaaagctttttgctgctctgccccccaagtaaattgctgatcggcttttaaccttaataaaggtgtaaaaggttccaaccttccggacaaattagaaataaaccttctaacaaaatttatcttgccgatcatctcttgtagctctgtcttattttccgggggctgaatcttcttgatcgcattaacgctcctttgggttacctcaatccccctttcatgaacaagaaatcccaaaaactggccggccgacacaccaaaagcacattttgtcggattcatcttcaagccatattttctggttctctcgaaaactttccttaaatcggctatgtggtcctccacttctttagatttgacaaccacatcgtcaatataaacttcaaccaaccagccgattaaatcatgatatatataattcatggccctttgatatgttgctccagcactcttcaagccgaaagtcatgacgacccattcaaataagccggttgcaccagggcatctaaaagctgtcttatggatatcctccttagccataaagatctgattatatcctgcgttcccatccataaaactcaaaattttcttccctgatgcagcatcaaccagctgatcggctactggcattggatattcgtcctttggtgtagctttattcagatatcgaaaatcaatgcacaccctgaccttgccattctttttaataactggaactatgctagaaacccattcggcatatcggcagggacgaataaaaccagcatcatacaatcgtttgatctcagctttaacaggttcgagcatatcggctttacatctccttggaggttgctggcgtggtctaactcctggcttgataggtagccgatgttcaacaatcgatcggctgagtccgggcatctcataatactcccaagcaaagcaatctctaaactctttcaggagctctatcagcttggttctaaattctggagacaaatttttgctaataaatgtcggccttggccgatcgcctggacgtatgtctatttcttccaactcatcggccgacatgaaaccttgaccttgcttgtcatcgagatcatctactgtatccttggcgtagacatttgaaccctccacgacgccctcaaagtaatagcttgggttctccatcttcgattggctgtatatcagaatcggacacttttagaaaatctccatcccaaacttttctagataaacaatcaaggccatccatctcccaaaaggctaaatcggcactggcaacattaactgacctgtcggctggcacgatctctatcttgtcgccttgccattgaatcaagcattgatgcatagttgaagggatgcaacaattggcgtgaatccaatcccttccaagcaacaagctgtactgtcacaccccgaagttctttcccaagcctaaattgaagttataaatggtctcaagaaaatacctgtgtaaagcaagagtaaaccttaataaattaatgcaaataataatcggaattggcatatggaatttttcttgagttctacatgccgaaatacgctaacaagatttttagtggaattttcagagctctagaaataatttttaacgaattaaaattgagcacatgcaattttaatcccaggaaaaatcttttttccttctttttcctttttctttcttttcttttctcttttttctttgaatgggccgccggcccattcctctttttcttcccctcctcccgctgggtcggccgaatgtcgaggcccagctaagccgcgcgagccggccacccaccttctttctccccgggacgccgacaggtgggccccacctgtcggggtcgtccccttcctctggccacccgcccccacgtcgacgcgcccgcaaccgccgccgtgcctcgcgcccgcgcttcctgggccacgtcgttcacgtcggcctcgctctcgtgcctcccgcgcccactttcccctctctcccgctcgcgcccgcgcccgagacggccgggattctattttcgaatcccgcctctctcttctcttccactcccccacgtaggccggcgattccccgctctcccggtcacgttcggacccctctctatctatttaagctccgccgacacccccctctttctttttccccatttcgacgaactctcccgaggtctccatcgctcccgcgccgtgcacccatccgcggccgccgctcccgctactccggccgccgctagccgccgctagactcgccgccgcgccgcgtcgtcaccgtcgtcgggttctcaaggtcaagggccaccccgtccgcacctcctccatcgaggtccgtcgccggagctcgcatcccctcgcactccggtgagcaccacctctaccgccgccttcggccatggtttccgctcgccgtggtccacccctctccctctaatctctctcttttcctctcttagggcatcccggagctcgtccgcccgccgccgttgtcctcccatggctcaccgtcgccgttcgccgtcgtcctcctcctcgccggccactctagatgaggcatccctcctcctctattcccctccctctccttcctagccgcgccgggtcgagccgccgccccggtcgtgcgccgccgcctttgcgccgttggttgccgtcgccggcaacacacgcgtgcgcaccgccgcccttgccatggccggccggccggctttgtgctgagctgagccgagccaggccgccgccgcaccgtccgattggctctgggccgatctgggccgtcggtcccgtggatcggtggtggaccacccgcgtggtcccggtgcacggtagaccggccacccgtgcgccgctgacatgcaggccccgcctgtcggcgccgccccccccccccccccgtttgatgacgtcagccctaggatttattgcgcaataaatgatttaaggactttttgttatagtaataaacacaatgaatcttctaaaattcataactaattcatccgagctccgtttaagcccattcaagtctcagtaaatcaagaaaaatgtgtagaatccattaaaaatggttttgttctctgtttcagtagtcttatagcctgtttgtattgtttgctttgtatgtctcttagattctggttcttccgacgctccggtgtacttcgaaatagtcgccgaggttcctccagcagcagagcaaggcaagtcatgcttgtcacttgaacatgttgatcctatattgcaaatgctctattgtttttcttcaaatactggattgttttataatgttactatgggatgtttacctactatcatagccgtactattttgtaccatgttcctttgttagcttgggatataacatgactagagattggactagagattgcttagccatgcttagttcaactagcacacaataagggagatcctattaattgtttagactgtaggttctaatggtattgttggattagtgacaccgcttcggtgttggttaattaaaataaatcacatggtgggctgtgggtgcatggttttgctggtcgcacccatggcagttaaggaccggttcacgggatgccctggaagaacttatcgtacttaccacaagccagcgtgggcaacggctgggcttgtagtgtagctttcctctagctgacgcatccaggcaagggtaggcgtaatggagcggggcgggcccagcgacggtctctatcgcttccggattcacctaggcacgagaggggaatgcccgctaccttgcgaggagtgggggtgaaacctgaggtgtggtgtgcttggttggagggggttatgcgaagggtcctgtcacggcctctttccggtatgtcgtgatggcatgtcggcgcacggtaacatatagtggggctgtgtcttgtgggtacagttgtacacctctgatcagagtaaaactattcgaatagccgtgcccgcggttatgggtggtcaaccagattcaccgtgattagtttcaccctagtttagtctaatgaaattggatagtttaggtggatggttgggcctgttgcaacgtggagtagcgttggacagtggatgattaatattgattagttaatacaactgtttacttctttcaacttctgtttataaatgctcgctttatgcaaatgaaccactctagctctcctttgataattccctgcatcatacccctattccggtatgacttgctgagtacagtgggtagtactcagtcttgctctattttccccaaccccaaagtatgagtatgtgtccgatggtggtttctccgaggagtaggcttcgtccgtgccgtcgaggatgcctgtggagtggtgttcccgctgcagttcaagtcaaggcttagctcctgttatctctcatttttccgctgcatttatgtaagacttttatgatgtttgtaagacgtggatctgaatgtcagcattgtcgtttgtgtaccccggccggtcctggacggggatcttaatgcacattctgcttggaattctattcgggaatttctgggcgtgacatgtacgaacccttcctatcgatgacaaaaaacgtggtaggaatagtcttgctgccgactgtcaactccacatttagaacacctatggtttccgatggattaccaccaaagtctttgagcaccatatttgtcttgatgagatcctcggcgttcctaccaagcttcctgaatgtagcataaggcatcaaattcaccgcggccccaccatcgaccatcatcttagacatcggcttcccattgacgtagccgtttatatacaatggtttaagatgccgattctctgtcccctcgggtttatcgaatactgcctgctctggtgacggaaccaacttagccgattcctcttccacttcatcgacatcggcctgatcgatcccgaattcagctggcaatgtaaagaccatgttaattggtgccgctacaacactctttccttttgccaacctcttcgcctcatcggctgcagcatcatcggctacgggaacttgattcttaacacgccactcctgtcttggctttggtttcctcagacgatggttgatttcctcttcaacctcctgaaaacgctccctgttcctcaatctctggacccttcttttctgattcttcgtgaaaataccagaaggacaccattgattctttctaattacctcatcctcttggccacgatcttgattcatcggacccaatctttgatgaacgggaagtcttgcctgtcttagccgattacctctactatatgaccggctcgagctctcgacgacatcactgcacctagggcagttttcgatggatggcaacctcatcccttcattccagcataatctaaagaactcacaaccccaatgaggatcaaaaccatcgtcgtattcttcataatgcatctcctgctgcttatcatacttcctttgatacttgttgataattttagccgaatttacttgaaaaccctttgcacggaccctatcggctgcttgaccagctgtatgcaacatattaacaggaaaaggattaccatcgactttcatcggttttttggaatcatcaaacctaatcttgcccccctcaatggcaacctgaatttgctgtctaaaaaccttgcaatcgttagtagaatgagatccagaattatgccatttgcaatatctctttttgcctaattcctcagccgatgggattgtatgaccagcaggaagctgaatttgcttttctcggagtagtaaatcaaaaatcttgtcagctttggtaataccaaagtcatacttttcctcttttccaggacttttcacccattggcatggtatgacctttttgctcctcacccattcggctgcagctattcagaatcatcctcctcgtcatccgacccatacatgtatgggcaaacatgattaactttcttggagcttttcctgacttctgccaacctatgctcatgcaaggttaccttctatatcagatgcgataagctatcaaagtcttcggatgagaatttctccctgattggaggaatcataccctagaaggccaaatcggctaactgagcatcagttaaacttaagctaaagcatttgttcctcatctccctgaacctctgaatatactcgtgcacgggttcatcatgccgctgcttaatcgctgtcaagtcagacaacttcatctcatgaactccactgtagaaatagctgtgaaattgcttctccaaatcggcccaactattgatcgacccatatggcaaagaagaaaaccaagtaaaagctgatccggacagagataaccggaataacctaactttcaaagcgtctacagccgatgcttcaccacactgagcaaggaatcggctgatgtgctcataagtcgacatgccctcttgtcccgaaaacttggagaaatctggaactttaaaccgattggggagagggactctttcaaaccactcaggataaggctgccgatacaagcttccagtctcttttagtttaagcccaaattgttctctcattacattggcaatcacatcggcccacggtcgttgctgagctgctccttgtggctgttgttgcatggaccattctgagatgcgaactggggctgagccaatccccctggctgatattgggcttgtggggaaggaggctgatattgatagctcaagttacccccttggtaattatgaagattcggctggatgttgcgcaccaagtgctcaggaaccatctgaggcatcactattaggggtggaaacgagccgagccgagccaggctcggctcggctcgtggaagctcgcgaaatgccaggctcggcttggctcggctcggttctccaaccgagctgtacattaggctcggctcggctcgtggtctggctcgagccggctcgagctggctcgtgagctttgcaatagcagcagttgtattgccagcagcagttgtgttgctttgcaatgacttggttattcagataataactctcaagtccctacaaagataattaggtatattgtatgcagccaacatataacaaattgatgggcttttttggttttcggccagaagtctttctattcaaaccgagcctactaagctcgtgagctgctcgcgagctggctcgggctcggctcggttcacaaacgagctaaaacccaggctcgggctcggctcgttcaggattcgagccgagccgagccaggcgagcccgagccgagcttgagccgagttcacgagcccgagctatttgtccagccctaatcactatgctgtctggctgtgcatgatgcaccaaatgctctaggatgacctaatttacaaactgctgtacaggctgaccagcaggtactgcgaacccggccaatgcatttactgaccccgggtgctgaatcagctgaacgatctgctgtctcaacggagcctgttggatcagctggtgaggctgctgccttggtggcgtctgctgaatcggttgcagaggctgctgccttggtggtgtttgctgagctggttgtacaaccggctggattggtggtgtctgctgaatcggctgctgctgcactcgatcaacaataggtggaggtggcagaaacatggcagcaacttgatcttgggttagccgattcatagcctgcccgccgtgctgtggctgttccctcgttaacaaccgagggttcaccggctgtcctggcgtcatagctagtgtggcaggcaaaggagtcgacgctggcgtcgtcggctgagttgtgggtgcaacagaggaaactgcttgaacagatggctgaacatcagtgatcaaagatcgataatttgggaagacaccttgcaagtaaactgggcctgcagcctgatgctcagctatcgaaccatcggctatcgtcttcatcatgtttgacaaggtattgactaatactgtcacaccctaaaaatcctaaatatataaattgttgtttaattagaattattagaaataattgtaaaagactagaagagaagctctaattttaaataataaattccaatataaaagtgggccggataaaattttattaaatacttcacttgattatatagttcctagatttttctggaattatttgagccaaggaagtatttttcataaatggaattgcatttcatgaataatttaaattgaaaaaggttttaaaatccctcttttggctttgggccgaaagtcggcccaaaaccctttctctctctctccctcggcccagtcggaccgccgcccgcgcgtgctctcccgctcgctgacaggtggggcccacctgtcggactcgtcgtcctcctcgcgcccgaaccctagctgagccgcgccgccgccgcccttccaattccgtcgctcctttccttctccggcgaaatcaattgaggggaaatgatccccgggatcccctctatcttttctcttttggaatcgtcgcctaattcggtttggaaatcggtggattcgatttcaaatcggattcgttttctctctcccgaaccctaactttccttctcgccgccggccgccatgggccttcgtcgccgccccctaaccgctataaaaggacccacggtacctcctctactcgccgccaccctcgccttagctcatcgccgcttgtagcgccgtctccgcgttcacccgtgcgccaccgtcgccgtcgcgagttcagccgagcaccgccgtcgctccggtcattgtcgtcgctcgggaaggtcgccatcgggattgccaagccgtcgccgacctcgttcacccctccgtcatcgccaaggatcgccggaagaccgccgtcgtcgtcaacccgaccgtcgccgctgcttcttcctcgtcgccatcgtcgtccggtgtcacgcccagaaattcactagtaatttctgaactcatttgtgcataaaatcctcgtccagaaatcagccgaggtacacaaactgacaatttaatatacagattcatcaataactaaagcgaataaatacttacataagaggcacttagtcctcaccatgaagaaaactgcagcggaaaaataaaacctagcgagcttcagctccactcccacaggcagctcaactggggtataagccaaaggtcttctccttcagaatcctttttcttcaactgaggtttgatgattattgcaaggtgagcatatgacatactcagcaagccacatagcatatatgcaagtgcacaaggataccaaagaatagcataatatagggcttatttacaaaagcagcatttagcaaacttttgagaattgtaaaacagtagagcaattaatcattaatattaatcaacactgtacaacatacccatgctgcacaggcccaaccatcctgaacaaccatacccggctgtacaaatctatctctaaaccaggaatgtaccattccaaaccaggagctaatcaaattattaccagttatagcatcttttattatggtgagaagtgtgagactaatcacgaaagacattgttagacccgcccataaccgcgggcacggctattcgaatagttttactctggctagaggtgtaccactgtacccacaaggcacagccccacgacatgtcaccatgcacctcaataccaccacggtacctcggaaaggagctgtgacagtacccctcgcacaacacaatccaccacagcgcaccattcctggatcataatcaccccttataaacaaggcatggactccccagcgacccccgtgggcttatctccgccacttctcagtctggtgctccgcaatgaaccatgctatacaaaaggtaaagccgttgcccacgctggcttgtggttggcacggttaatgtttcacaaccgaaactcgtgaaccggtccttaattgtcatgagcacgaccatcaaaaccatgtgctcataacccaccattatcaagttttagttggcaatttaattaattaaccaatcacgattgaccatcgtgagcttccattaaatatccataagtgatagtgaagcatgatttatcccattaatgagctaatgtttctaagcacagctaagcaactataaataacatctagctgaaccaatccaatatataaggtccatgctagtcaaattataacccataggaaaataaagtcatcttcggccataattaaatgggaaaggctcaccacccaatgacattcgaaaacaatgcataagttgaaataaatcaatagctttaaacaggttcaacatgctcaaagggttgtttgagggatctgtgtgacttgccttacaaacaagcgtcttcaattcgtcttcaggaacttctccaacgaacggacgatcctccgaaacaacgggaagtctaaacctaaaacgcaaaacaaggaaaaacactaataaaaaccaaatgaccagtacaattaaagttcatatgggtagagcttgaatttagatgaattatgagacttgaacgacctcattccgagttcgtaagaattagatatgaattttacaagattcaattccaattaaacctattaaagaaaagactattccaaattgattaaacaatttacaaatgatttataactgagacagaagattaaaacatcattcggaaaaagattagatcatatttggtagatgacatatattaaaaaggaataatatgtcattgaaaagagatgacaaatttatattaattttggatggccaagatggcgctgatatcagtgatgacatggctaccacgcaggatcgacgaccgcaagcacgggaacggcagttaccagcgaaccacggtacaatgatgcgaacggagggcaccgggagagagagaggagatcaaggcgacccttaccaccacttacgcgacgacagacggcgagggagatggcaggcgacaagctccaaaggcggcgaccttgggttgacgttggcgacggctttccggcgatgagaggcagcaaccgaggggcggacggtcttcacctcgctcctgcgatcccgagggtggcgacggtgaacgaaggcggcgatggacggcgacgaacggcgcgggctgaagatggaacagatcggcttcacggtgacgacgggcttcccggggtcttcgacgacggggaagtggaggccggtcttcttctcctcctcgcgaacccaacggcggcagcggcgaccgaaggcgacgaccacagcgacggcgcggggctgctggagcggcagccggaggtggagagagaaggcgagcgcggggagagcgattccggcgagattcggcgcaagggaacgggtggccggggtagctctcacccttgcgaagccgagggaggcgacggcgcaggtcggggtcgaccgaggaggcggcgcgacgcggctggagggtcactggcgtcggtggcggctagggcaaggcggcggcggcgctacaagcgacggctcggcttgggacttgaggcaaacggaagaggaggccgaggggatgctatttatagccggaagagggagagatcggctcgggaacggatggaatcggcgacggattaggtagggttcgccggaaaaaggaaggatttgatccgcgaaattggaaagaatttccatataaacttttggggatttcttgggggaaaggaagtggagattgagaggattccattcccacgactaatttggaaagaggagcaacggagagcacgaatttggtggggaggcggcgctgtacacgggcacggcagggaggagatcggccggctggaggttaggggcgacactgtagtagaggggggcaaaacagacttctttccgggcttcatttcctcggcccgattgaaggagggaggcaaatagaacttcggcagagagaggaagagaggatgcaggctcgggttgggccggcggaagagagaggaagggaatgggccggattcggcccgagacaaagaagaggattttgattgactttttaatttaaataattgctgaaatgatgtttcatttattaaaaatacttataatgctcaaataattccgggaaaaatccagaaaatatttggacactaaaaatatttaataaagttttatctatatcaatttaatgttcaaaattttcatatattttattcaaacacttactttaattattaaataaattctaaaaattccttttttacaacaatttataatttagcgattttcagggtgtgacaaatccacccccttatagaaatctcgtcccgagatttggaacggctagcaagaaattgggtatggcaatccttcactgaccactctgtcaaactgactagccaatctaacatacctttctctgactcttctttttccaatagaacataacacttaacttaatccttctgtagatattgataggtcaattttattaaaaaaaacattatcctctcgacccttagaatattgactgagaggtctcaaatcacaaagtcttgtgtgaatacgatagtgtttgttctatattcttctctgagcacccttgactctatcaagtccatagaaacctcacgcatcactggagttgaattagttcccatgatttcacttttctgagaaaaataacatttaacattcgaccgaatccaacctttcgtggtaaaacgatttcctcatgtcttatggaaacaagtctcttaaccattaagtatatctacgaagtatctgagcttcaaagtattttaaattaatagcggatcttgaagcatcttctccgtctgaccttcatcttttgcagtgtaaaacaattattgtttatatctcaaatattcttgaattatttcatgtaacggtgtctccttaacctttctgattctagtttccaatggagcttcttgattagcttgaccatcaactacctgaacagactatcaagactttacttccaacattgatgtaaaccactttgcaaccgtgttttatggtctctttctatgtatccttctccttattatcatctgcataattcagattaaaatagtcgtgatgtctacgctcaactttgtctcattggtgtatgtgtaacttgtagaatgacccatatgctatgttacagaacctttgtagagattcgtcaagtctcacaccagtggtgtgtcgccaagcaagccattcttgtcctcgtaccatattagtagagtataaaccttctttagtgctttcaagtaacttctggtgtagtgatganctacttgcggtcgncggnagtgcaaaatcaaccnntgncacaca

SEQ ID NO: 16931 - DNA, 725 bp, Oryza sativa
  unsure (1)..(725): unsure at all n locations
tatgggnnnnattgatagcacctactcgtaggnactgaagttcatcatacctcggttaccctctcctcgtcggcaaggagaagggcccaccgatcggccacgatctcaaggtggtccacagttccaacatccgtcgggtggccccctcgggaaagccccggagggcanttncattgacggcncttcttacgngngnggnctcggccnaaggggnnaaccgggcctttccggnaaaaatttcccaaaaaaaaccccaaatttttttttgggggaaaaaccgacgccgggacgagcgccgagctgcccgcatgggggaaggcgccttctcatttagagtgccacgctccccttcacgaggcgggccttcccctacagtgaccctggggggacaggttgtagggcctttgtggcgagtctcccgaatgtccggtggccccgaagtttcgccccaaccttacggagaagtatgatggtagcatcaatccctccgagtttcttcagatctacaccacgattattggggctgcagggggtgatgacccggtcatggcgaattactttcccatgaccctcaagggtcacgcgcgtggttggttgatgacccaagcccccgactccattcactcctgggaggatctgtgccacagttcattacgaacttccagggcacatatccccgtcccggggaagagacggacctacacgctgtacaacggaaggacgac

SEQ ID NO: 16932 - DNA, 708 bp, Oryza sativa
  unsure (1)..(708): unsure at all n locations
gtgccccccaaggagcttagaaatgtccagtgcgtcactgaatgcatgcccgccctgagtcgatttatatcgaggctgggtgagagggcgctacccctattcaagctcctcaaaagctctgggccgtttatatggacggagaagctgagcaagctctcaatcagctgaaacgcccttttttttttaaaaacccccccctttttccccaaaactctttttacccccccctgggtctttggtagccccggggccgaaggaaccattgctactctacttggccgcgacccctcatgtggtgagtgccgccctaatagttgagcgtgaggaaggcgaacgggaggcccctccggctcgcaacggcccctcgtcccccgaaggcctagcgcccaaagctcccagcccccgggaggaccccgaggcccccgagggaggaggggaggctttggcaggtggccccgagccttatgatcctgaggcaatccgggatccccccgggacctccgaacaggcgcgccccggatcatctacccctgacaacacgaaccggccccgccgaaaggtgcagcggcccgtctactttgtcagcgaggcacttcgagatgcgaaaacccggtatccgcaggcccagaaaatgctttatgccgttttgatggcctcaaggaagttgtataanctactgcagcaaagcgaatcaccatcaaggggcca

SEQ ID NO: 16933 - DNA, 7417 bp, Oryza sativa
  unsure (1)..(7417): unsure at all n locations
atctctgcctgatggttggactgaatccaccaggattctttttcaaattcctgtacgcaccaagtgtgcccgctaagagcttggatgtcatgccattcgaccaagttgaactatgtcaacgtttgaatgtcacaatttccggtatttgcatagtatagggatcgttggtactaggggaaattataaaaaatatgggggggcccccgaaaaaaaaggtaaattttttgaaagggtaaaaaagaagatggaagacagggagttttatacaggttcaggcccctgaattatcaggtaatagccctacatcctgttggccgaagccggtattgctcttattcatcataatcacaccagtacaatatttggggtagcctatctaactgttgtcgacatggcggtctgaagttctgactcgtagtcgacaacagggtagtcttcctcctcgaatccgtgcccggcgagatcagagatagcgctttcgtctctgatgacagtatccggagacaccatagggtactagccgtgcttatcactgaagtcgatatccggcggcttgtcttggcatatgttggcttgtatgttgatcttgtgtcttgatctattgttccgtgtcccctctcctcctagggggccttgtatttatacccataggtgtccccttgtcaaagtagaagtaggaaaaccaatatggatacaatctgagtagtccttgtcgttttcatgtagaactctggttgtctttccttatccagaactccctcgaggtcagtttccgtataagacatggtatgtggtgggtcctgccgagatttagtcgaccactattaggtatgtggtatccataaccctgacaaactaggcaaagacccagaagattggcgaactccattcgtgaagtacctcagggatggttggctctcggaggacgaagcagaagcaaaacacttacagctccgagttgccaagtacaaactagtctccgggcaattatatcgcatcggcgtgctacaacctatgcttcgctgcatctctttcgctgaaggtgaggagatggtgaaagaaatacaccaagggatgtgcggtgctcatcaggctgcaagaacagtctcttctaaaatattttgccaaggcatatactggccaactgtgctgaaagtatgtgtggaacaaatcaagaagtgcgaaggctgccaatggcatggccgaagccagacagtgccacagtgtgagctacagctgatcgcaccagtctggttgttcgcaagatagggactggacatcatcggcccgtttccaatggctcggaatgggtacaagttcgttatcatggcgattgagttcttttctcgttggattgaagccgatccactcggcgcgattacttcggcggtagttcaaaagtttgtttgggctgtcaccacctctacacctacctcaacgtactgtgggatacgcagcaattactggataataattacctaaacaccacgtctaagcaattaatatctactttagtgtttataactcaccaaagcaatcactatattttagttgattatagtgaacaataatcccgtatgctatttacgaactaaccaagatataattctcacaagataaatccaaattactcaagaagaatattatattgaattcagagtaataaacagaataaaagaaataggagaagatcaccgacaactccagaattcttccgactcctactcttctctcttcctattctagtatacaatatagtacaatagagcctcttataattcagctcaagcttggaagtgtgtgtatgaagtgaggaagtgaagcctttatatagaggtaggtatgacggttggcgaaggggaaatgtccgaaatgccccgcaaccgccatcagggagtgatctagagcgtccacgccaaaccccacatccaacggtggaggtggtggttcggccgaaccagagggttcgatcgaacctgggctgggtccatctggcctggcctttggcccaagtcctctgtcacgaccggaaataacccaacgggcgtttcttacgtgcgtgcattattccttgtcccaggaggcaaggtacaccaaaagttgatacaattcagagtttaacaagcggaagcgcaattaattaatttattacatgggcggcgaaggcccagcacaccagaagacaaacgaaaaacagcggaagactagggcgacgaccacaggcgcttgacggcaggcacgagctagacaccaaagccttcatcttccaggggctcctcttctgggtttgggaaaaattgagcaagactgagtacaaccaccatactcaacaagacacacccacaagtgcagaataaatgcaagggagtacaagggggttataatataaagggttagggtttgcagtaaacagcattaaaagacacttagttgctcaaagctattttgtaaacacgattctagagctatacaatattattaaacaaggccgtgaacccacacgaacctgccttaacccaaggcttacgatgattcagaccgaactggcaacccgaccctgagtcccagctcgtcccaagccaacccaggccaaccattccatattttagttgttaagcaggttttaagaattaaaaaaacactaacttgggtacattgctcggcttgcccataaccgagggcgcggctattcgaatagattatactctgatcagaggtgtacatttttacccacaagacacatcttcctcacatgtaaccacgtgccacataccactacggtatacggacggaagacgtgacatagtttccaacccatcctagccatagacaagagtaccgacccaaccccacctacggccggaacccccgggacaggtaggcaggactgagcccctagcagcaggacaccggccctgtgccatgacatctcgactaccgggccgcagctcgtgtagccttcatttgtcctagagatgtccatcgacccccgacttcgtccatctccatctgtgtacttttgtttataaccagactgagccacaaactaagccttacccactagacatgtggaagtacggtagtgctttgcaacagaggcccgaagaccggtccttatatggccgaggtgctactatcaaaaccatgcaccccgagcccagcctaaaaccattttgagggttttgaatagagggggaggtgtgaatccaattccacaataatccatccattccatagtgtccaggtgatgagaatattcccaaagtctagagttgtaaaaccacctaatgttgcctaattaaccagcgaagcatctatctaaaatcatactagtggtaccatgagtagagtgcccactagttggggttttgtttaatctagggtgaacaaggtaataatatcaataacaataataataaggtcataacaaaggtaaataggtgtcgcgtcccaaaacgactctaaaatacatccccgaaattatgcctagaataattaaaatccgtgtggaagcctccaacaattaaaatgtgcaaagttaaaagtcaaataaggcttggaggatttttgtatatttcctaaaagcctaaaatgcgtaaataaattttagtggaatttttagagcacaaataataattaagaagaaataaacaaagttaaaaaggttttataaaaagaaaaaccctaaaaagtacttttccccctcctccccctcttgggccggctcggcccatctctctccctctctctcctctcccccgcggcccattcggccttctccccgcgcgcgtgccgctgacgggcgggcccgcccgccaccctcgctgacgggtggggcccacccgtcatcccctttcttccggcgctcccgccgccttgcccgtgccctagcgccgccgccgccgcgaatcccggcgtcttccgccgtccacgcgcgcaataaagtggggggaaatattccccgtgattccctccctctttccccccatttttccctccctctctccctcggattcgtttggaaacctctcccctaacctcgccggcgccatcaatggtgaccggatcttccacgcccgtttccccctcgtccggcagctccctccccctcccaatcctatataaaccttccccgtgcctccctccaccgtttccgccactcgccgccctttctccccgtcggaatcgagctcgcgccgtcgctctctctctccgccgtcaccgccgagctccggtccgccgccgtcgtcgccccggaccacctaccgcatcggagtcgccactttcggcttcaccgcatccccggagacctcgtccacccaaccgtttcgctcgccgaccgccggagcaccgtcgaccccgtccacccgagccgcgccgccgccttcatatgctccggtcgccgtttccgtcgtcgccgtcgacccggggtgagccgtggaccgccgcttcttttcccccttcccttcccctctctcggccgccgttccgccgtgcctatggccgccgccggtgaccataggggcgcgggcgcgccgcctcccgccgctgcgccggcgtggccgccttcgggcgcaccgtgcggctgccgcgtggggcccggctgtcagccgcccgcgtcctcgggtgcggctgacgcgtgggacccacggcgccggccggtgtgagcccgggtgcgcccggtccaccgtggaccgtggggctgccgcgtgggccccacccccgtggacccggtccgcgcgcccctcccctcggctgacgcaataaatccattttaaattaaaatttaaatgaagaaattcgcaaatattcatttaaagagcatataaacttcaaatggccataacttggccatttgaactcggaattggaccgttcaagtctctaattttttcttaagaagtcaagaacctatttttgtgctttgttcctgctggttatatggagtttattagagtaaaagccttttcttttccgttggtcgtgtagacgctgtagcttcggaagatccgctcttcgtggaggttgaagccgacgtttgggaaagcgagcaaggcaagtcacatcatccttgaacatattgaatcccagtttataaaattattttgatttaaattaatgcattatcgctttatttaaattcccgcgttatcactgttttatttagccatgcctattgtcacgaccggaaataacccaacgggcgttccttacgtgagtgcattattccttgtcccaggaggtaaggtacaccaaaagttgatacagttcagagttcaacaagcagaagcgtaaatagttaatttattacatgggcagtgaaggcccagcacacacaaagacaaacgagaaacagcggaagactagggcgacgaccacaggcgcttgacggcaggcacgagctagacaccaaaaccttcatcttccagagactcctcttctgggtttgggaaaaaattgagcaagactgagtacaaccaccgtactcaacaagacacacccacaagtgcataataaatgcaagggagtacaagggagttataatataaagggttagggttgcagtaaacagcatttaaagatacttagttgctcaaagctgttttgtaaacacgattctagaactatacaatattatttatcaaggccgtgaacccacacgaacctgccttaacccaaggcctacgatgattcagaccgaaccggcaacccgaccctgggtcccagctcgtcccaagccaacccaggccaaccattccacattttagttgttaagcaggttttaagaattaaaacactaacttgggtacattgctcggcttgcccataaccgagggcgcggctattcgaatggattatactctgatcagaggtgtacatctttacccacaagacacatcttcctcacgtgcaaccacgtgccacataccaccacggtatacagacggaagacgtgacatagtttccaacccatcctagccatagacaagagtaccgacccaatcccacctacggccggaacccccgggacaggtaggtaggactgagcccctagcagcaggacaccggccctgtgccatgacatctcgactaccgggccgcagctcgtgtagccttcatttgccctggagatgtccatcgacccccgacttcgtccatctccatccgtgtacttttgtttataaccagactgagccacaaactaagccttacccactagacatgtggaagtacggtagtgctttgcaacagaggcccgaagaccggtccttatatggccgaggtgctactatcaaaaccatgcaccccgagcccagcctaaaaccatttttggggattttgaatagagggggcggtgtgaatccaattccacaatactccaacaattccaaagtgtccaggtgatatgaatatcccaaagtctagagttgtaaaaccgcctaatgttacctaattaaatagcgaagaatctacctaaaatcatactagtggtaccatgagtagagtgtccactagttggggttttgtttattctagggtgaacaaggaaataataacaataacaataataaggtcataacaaaggtaaataggcatggctagataaaacagtgataacgcgggaatttaaataaagcgataatgcaataattttaaagcaacataattttataaactgggattcaatatgttcaaggatgatgtgacttgccttgctcgctttcccaaacgccggcttcaacttccacgaagagcggatcttccgaagctgcagcgtctacacgaccaacggaaaagaaaaggcttttactctaataaactccatataacaagcaggaacaaagcataaaaataggttcttgacttcttaagaaaaaattagagacttgaacggtccaattccgagttcaaatggccaagttatggccatttgaagtttatatgctctttaaatgaatatttgcgaatttcttcatttaaattttgatttaaaaagagtttattgcgtcagccgagaaggaggggcgcgcggaccgggtccacgggagtggggcccacacggcgaccaccggcgcggcggagcggcggccgagagaggggagggaagggggaaaggaggcgacggtccacggctcaccccggggcgacggcggcgacggagggggcggtcggagcggagggaggcggcggcgcggctcgagtcgacggggtcgacggcgttccggcggtcggcgaccgaaacggagaggtggacgaggttggcgaggatgcggcgaagccgaaggaggcggcgccgaggtgggagttggtccggggcgacgacggcggcggaccggagctcggcggcgaccgcggagagagagagcgacgtcgcgggtgatgngctnctgaaccgtctgtcaatccattnngccag

SEQ ID NO: 16934 - DNA, 1020 bp, Oryza sativa
  unsure (1)..(1020): unsure at all n locations
cggcgcacccgtgattgacgattagttcagaaccncatcatgctttatgccgntttgatggccctaaggaagttgcgtcactacttccaagcgcatcaagtttccgtagtgacgtcgtaccctctcggccaaattttgcacaaccgagagggtactggacgggtggtaaaatgggccatcgagctggctgagttcgatctgcacttcgaaccgcggcacgcgatcaaaagtcaagtcctggctgacttcatcgcggaatggaccccagtggatgaacctgttccatccgatgtccctttcccccctagagaggaagaggatccaaacgccgacattcgcggcgggcactggattatgcatttcgatggctccctcaaccttcaggtgcaggtgccagagtcacactgacctcgccaagcggagacgtcctcaaatacgtcgttcgactcgacttccgagccacgaacaacatggctagaataatgaaaggggctttcccctttttttggggccccgggggggggggggaaaaaaatttttttagggcggnaccagaatgggcatccgccatctcctggtcctaggtgactcccagctggtcgtaaatcaagtatccaaagagtatcagtgcaccgacccgcaaatggaagcatatgtctacgaagtacggcgcatggaacgccacttcgacggacttgagctccagcacgtgccccgacgcggcaacacagttgctgacgagttgttgcgtgttgcgtcggcacgagccccactccccccagggactttcgaagaaaggctcgcgcaaccatcggcgcgaccgaaccctttgagggaccccaacaacacgccctccaaccctggtatggatgaccgacatccggggtatctcgacggcaatactcttcataaggatcgcgcagaagctgaaaaggtcgcgcgcatctccaaacggtacgtcctcatagaagggtgatgaacgncttgcagtcaacagagagacaaacaaaggtggcgcat

SEQ ID NO: 16935 - DNA, 1251 bp, Oryza sativa
  unsure (1)..(1251): unsure at all n locations
atgtatacaaccaagtnanaacagagtttaaccaaacantcaggcttcaggttccggaaccttgcagtgtaaacctatttttggctgatctacctttaaatattgtttccaactagtagttggtatcgccatatgtgaatctccaactattcagtttttttcagaaattttttttttttttttttgggggggcccccaaaaggggaattccttggcttttagggaagtacattgaagaggttcaagcggcctacgaacaccataagcatgataccctggtttgtactatttttttcccacagagatatgcatagtatccatcatctatgcaggatacattgacactattttttcatcgagcaggattctccaaaagcaagcaaattcactggtgtggagatgacagaggaacaagctgtagctgagcaacagaggatgtttgctgaggcccgagcaaggatgaacaatggtgccgccaaaccgaaggagccagaacctgaagcgcagcaacaaacacaacagccaccacagcctcagctgcaccctcaaccacagcaacccctgcagcctcaacttcagctccatcctcaaccacaacaacagccctcacagctacatcctcaacagctgctgcatcctcaatcgcagcaaactccgcagcctcaacctcaggtccacccttaaccacagcagccttcacagctgcaaccgcaacctcagctttttcagcaaccgcagctgccccaacagctgcagccgcaatctcagctccccccacaaccgcagcagcccccacagctgcagctgcaatctcagcttcacccacaaccgcagcagcccccacagctgcagccgcaacctcagcttcatcagcaaccgcagccgcaggcagagctgcaatcacagtcacaaccacaaacagaacatggcttggacagttcatgattcagattccatgttgtgtagcctcagtataaggaaaagttggtgtacttccgctggcatttaactagagactcttgtggtggccccccccccccttttttttgggggaaatttttaaaaggggggggttttttaggtttccatgcttcatgtacaatgtaaatccagtgtgatttcagttaccatgttgctaataatctnaaactttctttaatcactgaannnnnnttcattcagtttcagccttgntnttactctatgactgnnnnnnnnnnntcgnatttcnccnatcatatcaagggttat

SEQ ID NO: 16936 - DNA, 2071 bp, Oryza sativa
tctgagaaaaataggtttaccattggcccgaatccaacctttcgtggtaaacgatttcctcatgtcttatggaaacaagtctcttaccattaagtatatctacaagtatctgagctcaaagtattttaattaaacggatcttaacatctttccgtctacctgaaaaattttttaccccttttttttttttttgggcccccaaggttggtaaaaacaaattattgtttaatatctcaaatattcttgaattatttcatgtaacggtgtctccttaacctttctgattctagtttccaatggagcttcttgattagcttgaccatcaactacctgaacagactatcaagactttacttccaacattgatgtaaaccactttgcaaccgtgttttatggtctctttctatgtatccttctccttattatcatctgcataattcagattaaaatagtcgtgatgtctacgctcaactttgtctcattggtgtatgtgtaacttgtagaatgacccatatgctatcttacagaaactttgtagagattcgtcaagtctcataccagtggtgtgtcgacaagcaaaccattcttgtcctcgtaccatattagtagagtataaaccttctttagtgctttcaagtaacctctggtgtaggggacttccactacgacattatatatccttgattaattatcacttcgtctttattctcattttcctgagttactataaacatccatttcacagtggtacacctctggctagagtaaaactattcgaatagccgtgcccgcggttatgggtgggtctaacaatgtctttcgtgattagtctcacacttctcaccataataaaagatgctataactggtaataatttgattagctcctggtttggaatggtacattcctggtttgaagatagatctgtacagccgggtatggttgttcaggatgattgggcctgtgcagcatgggtatgttgtacagtgttgattaatattgatgattaattgctctactgttttacaattctcaaaagtttgctaaatgctgcttttgcaaataagccctatattatgctattctttggtatccttgtgcacttgcatatttgctgtgtggcttgttgagtatgtcatatgctcagcttgcaataatcatcaaacctcagttgaagaaaaaggattctgaaggagaagacgtttggcttataccccagttgagctgcctgtgggagtggagctgaagctcgctaggttttatttttccactgcagttttcttcatggtgaggactaagtgcctcttatgtaagtatttattcgctttagttattgatgaatctgtatattaaattgtcagtttgtgtacctcggctgattcctggacgaggattttatgcacaaatgagttcggaaattactagtgaatttctgggcgtgacatccggtcgccgtccgctgccgttcgtgcctcggtaaggatcgccgcgtcgcccgcaacccgttggtgccctccgtttgcgccgccgcgccgtcgtttgccggcgagcgtgcgttgccgagctgcagccgagccgcagccggtgataacgtcattgctgacgttagcgctgacgctagccgtagacccgcgatggattagattgatctcggccgtccgttttggatagggttaatctagaccgttcgttttcgtagaccgccgccgtgcacccggtccaccgtgaacccgagccgctgacgcaataatcctcttttccttttcaaaaataattcattattgcgtcataattcaattaaaatctatataaaggatttaatccgatttaatctttgaaaattcataactaattcatcttagctcggatttagttggttcaagtctctaaatttttctaaaattgagatctacatgttaaaaatatccacatgtactgttcatgcttgtttatgtgctgttttggtgattttgctcttttctcctgagattccgacgttctcggagcgtccgaatttgcaggagaagatttcgaagagttccaaggccagcaaggcaagtcacacagatct

SEQ ID NO: 16937 - DNA, 24995 bp, Oryza sativa
  unsure (1)..(24995): unsure at all n locations
cctcactcactcaccaccatcaatcataatcaaccgactgatcgtcacaatcatcgattctcgaatgaccttggtcttatgaacgtcgttngatgaannnnncccccccnccccccagcgccnccggtgatttgcattcgccgnagcncancactcaagcttgcatgctggttctggtaataattatgtactcccctctagcgtggatatggtccgatacagcgattatggttctatcagtgatcctgttatgctctctttggaaatatatactattcaaaaatgttagattgagctaacgggtgatcttttctgggcttgcaggagtttggattccatctttctgtgctggaggttgacaggctttggtgacaacatggtgctgtgtaggtgatatgctaagcagctagtgatcatcagtacaatgggcggtgttcaaatggcattagattggagtctgtttccttttcttctgtaattagaccaacaatatcagtcatgtggtagtagtagtagtggccgaacaaaacagtagcaacgccatgaagtatgaactacccccgtccgtccgtgctaggctggtagttttatggttgttatccactctgttcatgtgtgtttagttcaaagaaaatctgttccgagtcgggatgatcagcaaatgattttgttcttctatgcactgagaatccagatgcatttatcctaattgcttgtctaattctcccttgtgctgcatactatgtttgtgaagttatttgaggttaacgatgtggttactaacatgcttagggcttgttcttttaatcccaaaatggattgaaggagattgggggagaacataggtgtggaattttatcctccaattccctcaatccccttggtctggggattaaacgaacgaggccaagtgtttgggcaaccacacgaggatattattatcttatcaagtgtcgtatcatctggtatgaacaatattgatcaccagggttagcattgcaattcgtacaggaaaccggatctaggttgcattggcatcacaaatcatgcacacaagaccatttgcacgtactcacactttccaaagtataacaagaatagcgattttatgggatgattaattgttattgttaagcatacaaaactgctttcctttttccgtattccttcatacattaagaacacccaaacatctcggggcccacgtcctccagaatggatttcgccgtaatttatgtcaatttgatcatcaatctaccactacaacttaaaaagtgtaccgacaaataactctcttcatcagatctaaacaggtaacaataattccagtgaaaatgggatgtacagataaattcctcagttggagccagaaatgtcgttcagaactaactgcatctcaagaactacagcgcgccgcctccctctcactctgatgagcctcggtatgtatcgatcttgccaactccaggagtaacaactgcaagtatgacaagagcccccaatagcaccagcaacatccccaacgagttcataaacatagcttctgtcgagaaacgcccgatcatttttgcgctctgcatgaagatcgacttctccagaagtcccgaaacgcttgtggcgatggcgagaacgtaaaggaagaggccgaagaagacatgccaggggagcagggaggctcttccactcctagatccaccagggtaccaaaatgtataaaatccagtagcccactgtagagatatcaacgataaagatgagaatatgttggaagcaaacctctttacatatttttatgtttactgaaaagagcatagttcaatatctacctgcaagctgaagaagatgatgcaagaaaggcccaaccaggagtgaagcgtatataagtggtcgatctgtctctcatcgtggaacttccatacagtccagagcccaatcagactcaggagcatggcgaggaactgcaaggcaaggtgtactagcttcttcagtttcttggttcctggcactgtcttgtaggccaaaattgctgcatgcagaaccataagcgatccattaaaaccttattgccatttattataacacactataaaaactatgccttttatgtccagtaaattacatgaggcaccttgatgcatagacactcatttctagactgtttgatacgcatgtatgatcaatatcaaaattcagagtttttcccttcatatacataactcagttcaaactgatttctgttagtttgcactaattgagtttagtttataagtgaccatatatcatgaagctaattcaaactagttaagatgaattcccttttttcccagagtttgatgaatgaacttttttttgtacgacctacatagaagggtattgatttgggtgcatatgtaatataatgcaaataaattataatcacattagtcctcagaacaagggcctggagtggtttctgctaagtcgataaattttctagctacagacaagaactaccaatttgaatgtttcaatcggaaaagagtaatttggtaaccaattcaataggaaatagctagaaagtgacagaaaaagtaaattcagcaactcttttttggttttatatctccaactaagcttttgaagaaaaatatggaactaggtgttgatttgggtaaatcaaatactattcagccaggaccaagtatcattaggtgtaaatatcttacttcggggttgttcactttgatgccaaaataaaccttaccaaattttggcaatgtcaaaattttggcaatattgacaatattaccaaattttggcaggatttcttatgtatttactaaatttgacaacaaactaaatgtagccacttttttggtaactttgccaaaaaatgatatggttgaaaatggcgtcaaagtgaacagccccttcctggttccttggtacttgattttgacatgtatcgagtatcaaggaaactgtatataatctacctaggatgtctcaatgtcattattttttgttcatgctgtactgcatgaaaatacagaggcatgatattttgcatatctgaaaaatgctacagttagatgtatgcataaatcgaaaaaacagtaaactctgtatcctgtttaatgaagcaataaaaatatttatatgcaacaagccaacatgaaggccattccaagatccaattcgattggagttcaatagtggttaacacactaccttccccattcaggactaccaatccaatcagcatcaatactgggtgaacctgaaataacagaaggcagttttaatatcataacaagatgggatttatgtaatcaattcatcaattaacattactatctagcgaacgcaactcaaacccacattttttagccggcaaaacctacaaatcagttgtttacatgaaataaagcacattcgaagtttcaaaattcaaaccacttgaggacatggaaattattattttagattatatgttgattaaatgtataatatatgttgattaaatgtataagtaaaaatattacatagttggctgcttaattcatttcccagccttatttagcaaaatatggaacagaatattacacaaaaactttcaattgcccaagataggacaaaatcatgttcactagctggcagaaaactttactgtttattttctagggccactctgctcttttgtgcgtgaaccgcagtgcacgcacacgtgtgtaaatgctaaccaaagagagtgccatgtactagctactttcaccttcttttcgtaggtatccacataaattaatataaattcccttccctagtaattccacatgtgttattattctacaatcggtaaaaccattatgttcagtgatataaattcccttccctagtaatcatgcccacgtaggaatacaagtagagttacagtatgtatggagtaaaagctccctcaaagtcttcctagacagcaccacaaatggtgattctatttgtgaaagacaggcttactggtgtaaaaccagaaaaagataactcaaaaacaattctcagaacaaagcatgaattgcttcttgttgtctttctcatgtgctataatgctgaaagttgcttcttgtggtgctgcctattaaatgatttaggtggctatccaagtgcatatgcattttcctccctgaactaaaatgatctaactgcaggactcaagtactctgaaataattaattatcctcggtagtcgatgctttttttttgttcatcacttaaatgtcaacaattaagaagccaaaacttcaaaagatttccaggcttgttacaaacttactatccaaccaagccttcaaatcttctctcattttcattctgaaaagggttttctttcccttttcattaaaaatttagaataactttgagccattaacgacaaacttcaggaacatagtccaatggcaatgtacaacgatctcgaacaagggatgtggtgcagtttggtaatcctattaatgtagcccaaaattacaaacttgagcaaatggagtgagaaaaacgaaacaaacaaagcttagcactcactaaaacaaaagacgcctaagatatcacacccatgaagtcatcacacgaacccaaatcatctcaggtctaaaatatccctagaagagagcgctaaactccttcgaaatgcatcaggctcgattgtcagcttcccagaattcaaaattctccccttgtaattaacttcttgcaaaaaagctaaacccttcctccaatccaaattcactacacgcagcagccaaaaaaaaaaactctcctaaacctccgaaatacgcaacaaaagaaagccctcgcattgcatcttcgctgggtcaatacacaagaactcgatcgaaaccttgggaaaacaacagatcagattattcccgcacacagacagagacaccaccaagatcagcgcgcgatccgcgggccaggggggctagagatatatatacagaggcagggatctctcgagaatactccattattattacgttgaagatgaggagcttgtccgtctcggaggagagcgccatcccgccgcggaagtggacggcccagacgacgatggccgccgcggccgccaggcccagcagccgcacgatcccgaacaccgggaacctcgccgccggcgccgccgccatcgccaaaatggtgtgcggcgactcagcgagatcgagcgccggaggggaaggaggaggagggagacgaggagaagcaaagacgccaacaatttttttttcttcctttcgagctgaccaagtgtgaactagtgaatacgtattcctaagggagaagcgtctttcatgtgtacgctttctgcttagttgttgtggagtactaattttacgcaagcgcctgaacacctacgcctccatcaaaaaaaaaaaaaaaaagagttcactctacatatgaatctggataaatacttgtacatgttcgtagctaggcagtgtttgactaatgggataggaaaatgatttcccacccaccaaaagatatctttaaatcttaattattcattctctcttccatttaatcttaacccttcatttatttcctaattccaatcccaccccacatttctcattccaaacacacccctagagtttgcctttttatggaacatagtagtgtgttcttccccccatttttttaacccatttctctcgtttttctcgtgcacgcttttcaaactgctaaacggtgtgatttatgaaatactttctatatgaaagttgtttaaaaaaatcatattaatcaatttttcaaaaaaaatttgttaatacttaattaatcatgcaatgaaatgaacctcgttttgcgtgccagggaggaggggttacagcctaaaaagggctatgaatgtgatagttgttatgtcaaggactggcaagaaatataatgtaattcctctaactcaaaataaataaatctagtacaggatgttggtattaggatatgtcatatctcatattagatttgtttattttgaaatagaaggaatagaagagacacgtcttttttatattggattggctaggctcggcgtacgcatttttatattggattgaaacattaacattaattaacaagcatataaatgcccaaactacatgtttttttgacccgataaaataaaaaaaaacttgttgaacattatgcaatggtaaaagggaaatagaagcgactaacaaaactatgctgttaaaatgacagaaacacgagggtttatttggtaacattgaaatttatacgcttgtaaaaactttatacctgtttcttttttcaccccataaacccaaagcaaaacagagaatttaaagtccccctttatttattttacacacacgtatacctaactcctgttaaattaatgttgtaatttgggtaaattaactatgaagaacaatcctttgaacaatagctctcaacatcttgtactgaaatcattgggcgtgcataatctaaaacaacaaaactaactagctagtcaagccgtccaaccacctcattaagcacggtcatcaacctcaaaattctcaagtgcactagcttccatccatctgtcaggttgccttgttctcaattatactcctatatataatcaccagtgctagtcagtgcggtttcaaattaagtaatattctctcctttccatagggatatctgctccagaatttggagtctccaactgtcataccctatacgataccaaaatttcgtgcaaacataaaagaatataaaatatttttatacaatctttaatgataaatcaagtcacagcaaaataataataataattaaataaaacggatagaaaatatattaaaaaattataggtgtcatatattaaaacccgaacggagtacatttcattaggttttttttatgggcattgtattgggaattaatatgcaagcactgacgagagcgtggtaattcttttcttttttttcttatattttgaagaccatgaccaatatggtgtacatatcgcaggagttagctgcacacaagacaatagagttattttcgccggtcaaatatgacaaagtttagttagaaccagtattgcaaggacacgcataataagatcatcttagcggtggaaactaagaccatggcggttttacctcctaattaccatgggccctctcaaactaaaaccggaaccagcgccattgggtaaatcagcttcattgttgcatctgtaggaggcacctagtagcttgatattggtcgatgagcaacaattaatcttggtcttcatttttcatcttttaaaacaaaatcttcgactactttggcagtctgtaaatctgccaagaacgaaaaaagctcaacatattctccaagtaatttacttttcactcttatactacatccgtattaaaatataaacatttctaattatttaaacaaaaagttaaggttgaatagaaaagaatataattccctcattaaatgagttatggttagggcatgagagaggttaagggtaatatgtgaaaaaaattgaatgatatgtgcttgtaagacacgtggtgttagaaatgattatattttgacattaaaattacttatatattttggaatggagcgagtagtagtttgttttagttctttttcccctgttgtggctgcaaacccgttctattttaattatcttcaaaataacatggttttagtcaagttcagaggatgaagtgaacgactttaagagttatatgttgtatataatcattaatttaattagtttcaaggtttttacaagtgcttaaaacactttttttcttgcactatattgtttttttttaccgatactgatatagccgcgagccacacatagcagggagatatattatttattaaggttttttttaaaaaatatatgagcacacacgttaagcctaatacttagaatctaccaacctgagcagagaccatgattttatttgtttttttagagttgtagatgaggttgaaacttactagtgcatagtttccttcgctttacttgttctctccatcacgaatctttgtggagataaatgtattatcctttctttcatcgtttttgaaccttgtcgcgctctccgtgtctgcatccacttcctctccatatttatacacacacatatacacctgcaaactgcaactactaccaccacaccacattgcacttgctttcttgtttcttgcaacgatcgacgtacgacgccatgggcggcgacggcgagttcttcagcgtgggggagtgcgacggccagaagaccatcgacggcgagcaggtgccgctggtgctgacgccggcgtcgtccggctccggcgagcgaggcggcgaggcgctggcggcggcgctgcgcgcgaggcgcgagtgggtggaggcgaaggtggtgtcgaacagcgccgtgctgctgcgcgggttcggcgtgcgcgacgctgccgagttcgacgccgtggtgggcgccctggggtggccggacatccggtacgtcggcccggcgcctcgcacccacgtccacggccgcgtctggaccgccaacgagggccccctcgacgagttcatctactaccaccacgagatggtcctggtacgtacgtagtactcggccaccgccgccgcgtcgcgtcgccattgacgacaaggtgttcgtccgtgtcgccgccgccattgacacgaaggtgttcgtccgtgtggtgggttaattgcagataaaggagttcccggggaaggtgatactgttctgcgaggtggcgccgccggagggaggggagacgccgttcgtgccgagcttcagggtcacggagagggtgatggaggagttcccggagatggtggaggagctcgacgagaagggcctccggtacacgttcacggcgctgagcaagaacgacaccaagtccatgcgcggccgagggtgggaggacgccttcgccaccaccgacaaggccgaggccgagaagaggtaattgacctacaattctagtgttgcgtgtctttccctgtcagcttaagttttataaattataaccaattaaaccgagcaatatacggttttgttggttgaaattgcatttttcagagttgcaataatctcaatgtaactaaataaattcacatatatacactgttggttgaaattgtaatttaatatatggtcaaaatcgcaccaaatctcaatatggtaataaagccaataattaaaaaaaattgcatgtagatgttataaaagtttagaatatatgtcaaagttcacgtcataggacggacggatgctaaagtatgaatgcaccatctggtgaagatgtttgttaacacgaatgctccatttctcataacttaatcaccaaagccggcaaaattcacctgttatcagaaccaacaaaatcaatgcaagtagcatctgtaataccgaagtggattttaagtcgtactctaggacacgtgctctcatttgttgcatttgatttgaatagttatgatttaaaacggtaacacgagttaaattattgtaacatatggtcaaatcaacctacacacataagaaaaaacgcatgcaaacgcgagtatactttttcatactccaatttaatatgtttttttactttttttagactaaatttaattttgcattaaaaaaggggtgatgaagtcataggcacgtgacgttcactagagttcaactaatcattattccaaccatttataatgcacacatccacacagtttcaatacatttattttaatcattgattttggctctagccttcgtatttttatgggttagagtgcgcattcggaaacgtgccatgtggtatgtgcacgtgtatgttttgttttgcataattggaaacatgactttgctatttatgaaagagatatatgtgatacaattagtatagtttcccagaccaatccataggaaattaggaatattaattcatcaccgtctaagagcaagtttaatagtaaagctgactgtcaattattagtaatcctattgccaatatatataatagattagttgttagattgtgttcaatttttcttctcctaactattctctcacttatgcattcaatgtatttgtcttggagtacgtgcagagtaaatattgcatgagagccaacaccttcttttttctttgttggctctgtcctccacgtaagcatacagttaacttatagcgcacttttatccttgctctaatgggccatgtgtgcgtattcagggctcgggcgctagggatggaggtggagtggctggcgaacggcggggcgaggacgatcctagggccgaggaagctgacgcgagtcttcccggggcggcagggtcggcggatgtggttcaacacggtggtggggatgcacgggaaggcactgagctcggcgacgatggcggacggcgccgagatcccaacggcgttcgtggcgcggtgcggcgagatcatcgaggaggagagcatccagttccggtgggaggtgggcgacgtgctcatcctcgacaacctcgccaccctccacggccgccgcccctcgctgccgccccgccgagtcctcgtcgccacctgcaagtgaaatgtcgtcacatcacttcttattactctctccgtttcaggttataatacgttttgactttggtcaaagtcaaacagtttcaagtttgactaagtttacagataaatatagcaatatttataatactaaattagttttatcaaaacaataattgaatatattttcataataaatttgtcttgagttaaaaatgttactagttttttctacaaacttagtaaaacttaaagcagtttgactttgaccaaaatcaaaacgttttataacctgaaacggagggagtatcaattaagctggttaattaaattattattcctcctcggtgatgctacatttggctctcttccatggtgcgttaaaagtttgatacgtgtatatatgtgtgtgcaattatatatattttatatatataataaaagcttcaaggttggagtaagtcaacgggattagttagatttgtgatggtaattagaagtagcaacaagtggggagatggttgtggttaatgatgtattagtagctgtgcttttgtcagcttgtgccagtatcagtgtgttgtatgacatgtgtgatcatgtctttgtgtgtggactgtttaactgttatcttctttaatttaataaaataatcgatgtgatatcactgatatatggaggccctgctttctcagttttcatgtgctatttggcatcttttctgtaatgcaagccttggtttcatgcacggttatggtgattagctatgatgttgaacttgaattttgcagtaaccaaaacttatggaagtagtggactgcttcattgccttggctaattcacaatttacatggttaaaccgttaaaacacaagagggcgcattcagagcaagtttaatggtatagccaactactagctccaaatcatctatagtcaatgtaatagccaattcatacaatagttgcttattacttcctccgtttcacaatgtaagttattctagtatttttcacattcatattgatgttaataattcatacaatagttgcttactactacctctgtttcacaatataagttattctagcatttcccacattcatatagatgttaatgaatatatgttaatgaatatagacatatgtctacattcattaacatctatatgaatgtgggaaatgctagaatgacttatattatgaaacggagggagtatagtattaatacttggtattctctctctttttatctctttaagatatgtttatagttagcttatagcctactattgtacctgctctcatagcgtcttcctgaaacttgggtgttagactacagtgtaatgcagcttcagatgtattgcccacaaaaacagatgcagcaataagattgccagaatagcttagggttctccgaaatataagaaaggtgtacagtcaattcagtgagacaaatggcaccttgcaattaacaagtcactgaaatcaccatcgccatcggcaaaagtcaagttacactgctaatggagtcccttttgacaaggcatcatacatgccatgatactactacagtcatagagtcagagaaagggtgtttggaaaagtaataacatcagtgactagagagagcttcagattattagcaacatggtaactgaaatcacactggatttacattgtacatgaagcatggaaacctaaaactatcaaggggcacacagagtcctagtaaatgccagcggaagtacaccaacttttccttatactgaggctacacaacatggaatctgaatcatgaactgtccaagccatgttctgtttgtggttgtgactgtgattgcagctctgcctgcggctgcggttgctgatggagctgaggttgcggctgcagctgtgggggctgctgcggttgtgggtggagctgagattgcagctgcagctgtgggggctgctgcggttgtggggggagctgagattgcggctgcagctgttggggcagctgcggttgctggagaagctgaggttgcggttgcagctgtggaggctgctgtggttgagggtggacctgaggttgaggctgcggagtttgctgcgattgaggatgcagcagctgttgaggatgtagctgtgagggctgttgttgtggttgaggatggagctgaagttgaggctgcaggggttgctgtggttgagggtgcagctgaggctgtggtggctgttgtgtttgttgctgcgcttcaggttctggctccttcggtttggcggcaccattgttcatccttgctcgggcctcagcaaacatcctctgttgctcagctacagcttgttcctctgtcatctccacaccagtgaatttgcttgcttttggagaatcctgctcgatgaaaaaatagtgtcaatgtatcctgcatagatgatggatactatgcatatctctgtgggaaaaaaatagtacaaaccagggtatcatgcttatggtgttcgtaggccgcttgaacctcttcaatgtactccctaaagccaagatcctgccaaaatgaaaaaaaaaactgaaataagtctggagatttcacatattggcgagtaccaactactagttggaaaacaattatttcaaaggtagatcagccagaaataggtttacactgcagggttccggaacctggagcctgagtgtttggttaaaacaaggttctcagctggttctatacatattttttcatttacaaaaaaaaaaaattcgagcttttcaagacttgatgtttgaatcatgtagaagcaaaagtacatctcccaggaagaaagcacaacactccatgaaggaagacaagggagcaaggagaatgttgaggtcctatgaaccgtagccaatgctaagccactgcttagcattgcaatgcgatgaggcaacaacatccaccataaaaatttccatcatgtggttatcgccgagtgaatgtggctgtcaacaacttctgaacttcatggtgtgttttaacattggacatcaaatgttgaggctcaactcctgcccaagaagtattttactattgaaatgtttccattgaaatgtttccattggaccttgttcaatacatatccatgatctaaccgaaaaaagtccaccagggcccaaaatggagtacgagtttaagaccacactcaattgggtagtccaagcccaattctactttcagccccctaaaatcatgttaacaaatgaacacatatgtgcagatcagttttagctgtgtagtaatagcattccatggcatatagatatctgaactgccatcagacaaattcagcattttagtttcagactttagtcaatagtcataaccaatttgcactcagaaaaagagctctaagatactcaaatccttcattttcaaaaaagaaacattcatatattccccttttactctgttccaggcattctgttatttttatctttattttgcagtatactgaaacaatatagataaggtccataatcataaggaaaaaatattgacaatatactacaaaactacgaccatgataaaacaggtaggacagcatcataagtgataaaaaataatgttaatattcaggaaatgaaaggcaaacctgcagagctctaagaacatgctcaggagcaatagttttcttgtcctctcggctgcaaacttcattggattcagaagataggaggttgatgaactctgatatataaaaaatatgcatattgtgattagatccagaaagggagaaatttcagctattttttacaaccaatatcccttaggttgaaataaggttgaaagttgcaagagacatcttgcaagagacatccaagaaaatatccaaactgtttggggaataacttattttaatgtttaaggaactcacaacatggagggattataacatgaataaatttggtgagagtatggattttatgctccaggcaggaaaatacggtatgtgattaacaatactatacacaaatcagatatcgaccctaccattttttttacgggccacaatagattttgcattagaatcgtaaatacatccagtcagacttgactaaacatagaacacttaaaatcgtaaatacccttaattctcttttacattaatgattaaacatagaaaacttagaattgtaaatacatccagtcagatttgactaaattttaccagataataacgtcacaatggtccaccagactgtttttaaaacggataactttgtaagattaaaaatacactgttcatattcttgattaaaaatagtaccaacttctcttacctacacagcattccacaagaagatcttgtgcatctcttgccactcgaacatcagggggcaacatctcctttataatcttaaacattgttgctgaaatgtaacagaaaacggctaacttaaatcagctacaatttattacagaaaaatgctactacctccgccctaaaataaagcaacttttggctatgaatttcgattcacagttgtccaaattcatagctagaaatactacatcaggcccagagaaatatttatggatcacaattataattcgctaaaacagctgcgctgtgctgtcaaacgtcaaagcagtaaacattactggacttcatagtaagcatcaaagaccatttatcacaaggtttataattgaaatgcattaattttcgatctgaaggaaacaactactcaaggaaaggtatgtggctatgtgctataaccacaaaagaaacaaatcgtcaacttggagcatgaaatcaatgtacacaaaaggagtaccatatttacaacaccaatcagattatcagaacccgacaaatgtagtgccaacttcaagcaacatactcctaagaaataagcagcacaatctagattttccatgaaagttaacattctattccatgtctgctgtcatcgataatatctgaaacatggaccgatcacatacaatctcactatgcatcaaataagaaaacccctaaaataatcagcgcaatcttcaagtccacatttaccacaaattcacacaacctaggcatacagaatctattcaccaaaagtgaattcaacctccctaacaacggattagcacagcagaacaccccctccctccctctgtaagagcatgtaaataaaatcacatacaaaaaaaaaagaaaccctaaattcttgtctcaacaagtcgcctgcctgagacaacacacataatgtaacctgacgggagtatcaactctaaaaagaaatagaactgacgcaaattaaattaaattaaattaccctaaccagataattcgcagattaaccatggcccggtcgcagacaagcacaattgcatcaaaatttctaggcacgaagagaaagcatgaaaaaaaaacgcataatcagaatcaagggagttcagctcacatttggggagggagacgtcctccttggacttccccacgatatccatcggatccatctccgcgtctccaggcgcgacacctaacgtcgggggggcatgcgccgttcacctgaaacccctccccaaaaaaaatttggtcagaaaaacaaaaccaaatgttagcgctagggttacggcaaggggaggagaaaagcttccagatctagaagagaggcctgagaaagaggaggagggattgctcaccggcgagggtgaggcgggggcagcaggccgcgcgagcggcgctgctcgcgtggcgggggtgggggggatcggccggcggtgctccggcgagctcacgcggaggagacggggaatcgaggaggggaggggaacgaacgatgatgggcaagggaggaaggagtcagagtcagaggagagagaggctaaccgattacgatgggcttctgcttgctgctatgggctttttgaataggcggacagaatagactacggcccggctgaaagacgagaaactaattcgcgaacgcgcgtcaaacacattttcgaccattaataagtgaggaatccatcttaggacctctttaagctcaaagggcctgttcctaatacgccaccattaataagtgaggaatccatcttagaacctctttaagctcaaagggcctgttcctaatacgccaccattaataagtgaggaatccatcttaggacctctttaatctcaaaaggcctgttcctaatacgccactagtcgggcgcgcggtcagtactaatagtactagtactactacagtactactattactactgctgctgctgttgttatactactattattattactactataacatatatatatatatatatatatatatatatatatatatatatattgatgtataaaaaaatatgcacgtatacaaactttgtatatgatatatacaaactttatatacgtacgtattaaaaaataaaataaaaactagaaaatacatcacgtatacaaagtacaaactttgcatacgcgtatacaaactacgatgtgtataaactttatatacgatatatacaaactttatatacgtacatattaaaaaataaaataaaaactagaaaatacatcacgtatacaaagtacaaactttgcatacacgtatacagactttgcatacgcatatacaaactttgtatacgtacgaatacaaactttatattcatgcatctttaaaaaaacaaaaaagaaacagaagagaaaccggaaaaaaaaatgaaaaaaccaaacaaaaagaaacgagaaaaacggagaaaaaaaagaaaaaaaagaaaaaaacaaccgaacagaaacgacaaaaaacaaagggaaaaacggaaaactcgctactccctcctcctctcgtgcggcgcgtccgccgtccctctccgcgcgcgggaaggggcgcgcgcgactgatcgcccgttagctttttcgtgtttagggagcttctaattactacagctttttccgtgatcagaagctcccctaaacagtctactttttggtccagatactgagaaactgtagttgtagaatccagaaaataaactagaaactagaagctaggaaccagctagcttctcaccagctgcttctcagaatcttaagctcccgttgatgtgaaaaacacacactggcctgagagatctgaactctagtgcaggacctaaatcttgcttttaggttcaaggacgtgccagttggtttgatcctgtaaccaacaagaaacatggaaacaaagttaaatcctcaaacgatagccgatcggctatggccaatgacgtatcgtttataacctagccgatgttgcgtaaagtagatcgacagtgagatataaagcaaaaagaaagttaaatctattcgatcggctgtagatatcaacaatacataaattaagtcttgaaaatatgtttaaactaagtgattgggatagatcggatagtgtgccgagatagtataaatcatttaaaagtactccaaaacagagattatatatgcttatagcatagccgatgttatagatttaacgtgtatcggctaatactccgataccactttatactaagatatcaatataagcaaaatatattaaacataaatcaatcaagtgctaagatagcttaacagattaataacaagcttaatatattttaccacagtgagatcttgatataaagggcagatttagcatatcaagtacataaaataatgaacaagatcaggtaagaacggctgaaactccgatactatctctaatagcaataataaaacaagctagatattataattctagatattacttaataggtcggacctaaccgatgcagcattaagcataaagagaagtataagatctaaacaagtcaatgaaagtctttcgagatggtagatacactatataatctaagtcaacgttgatatctaaccttatcggctggaatccactagtagatgttagccgattcaaggttagatagcaataatgatctagattatatagaatatatgataactcgacgaattacatcaacaagattagagtgtcataaaaatggaagcactaatcccgagaacgcaagccgtcataacaagttttacctcttgtcggagatctagactgatgcagccaaactcgaaagcaagaactcgtcgaaacaaaacgaaagtaaaagggtggcaatgcgccgaaagtgttgttgaactgattgttatctgattacatgggtttgggtttgcttttataccaaaagtacataatatgtccttgtcagacacgactcctatctctattacaattctagatacgaacaagtcccttaggtgaactcttaccgactcaaaatataaggaaattgcataaaatatcctaattaatagatacaattgccttcttcggactcaatccatgtgtggcaatactcattaagcatatcaacccaatctgataatgactttgatctttttcttgtcggaatcggcttcatcggctgttctggccaccttatccgattcgaactctgccgatgcgcactctgtttccgaaaccgtcaatccttttgattccgcttcggttttaactccatctccgatgcttaatttaccaaatttggtcgttaacagctccccaaacatggcctaagattttgagaagcacttgattgttatctagcttatgaggatttagaagctaggttttgttaggtcattctatagcttctgttgtaatagttagccacaattttataaataccctattattttatgtaaagaaatttcctttgaaatcttgtccaaatgtatgcaatgaagatccagattgttgaatctgtatcaatttactgatccagggcttgatacatcagttaccgaatcattagtttcgggaccctacaataaactttgatttgggggaggacacgacattggcggtccgactacaactaccacaggggtgctgcgccttagcaaccggtacacagactccacgttgttgttgttcttgccgtgccaagaacaaccttgaacctacaagcaatcgaagaacaagcaagaacaagttaacaaaaggaaacagctcacaacacttgtcaaatgatgaaactgaaacaatcgaatatggggttctgaatacaagtatccgggtggtctagctgacacacgcgagtacaagtagctgaaactaaacttgcatctaaacaaaacccaaaaaatgcaaaatggtggctgctagggtttatatgggtggagggatgaccaggagaggaggtggaagaaaaccctagtttttgtggacctctaatgggctgtaaagatacaaggcccaagcccaagtttctaatgcgaaaactattttagccattctgagcagcttgggcggaatctgatgctgaggccacacatagttgaaagtagacgacgagatctttccaacaagtactcatttgccccatcgcacttcggagtgaagagcattgacttcaccaaatcaacgctgcttatgctgtttgcgatctggttcctctctcatattcctaacaagtagatcacaacaaccacttagtagcacccaattttgataagcacttgtatgattagctaggaacgactttacctaataattaagttcacgagctcgagctctagtgattggtccttactgtgcaataggcatggttgtatcgttggaaaggatgtcctcatcagccaggattacaatgtacagaccttgttccttacggactagaccttatagatatattacaatagtaaccaactaggattacaggatattttcttgatataagttaacataattcccgaatccttttctaaacatattctacccatatagactatcccttgtaaatatccatgctgtgtgggtatgtggtacccataatgtccacggtatcgcgcatagcataggtgcgagaccaaagcgctctcgcgcctttggagcacgagaccgcgtgattagcggtgccgctttttgattagcgatagtgttattgccttcgcgccgccgttaagcgagatcgccgtctcactaaacaaaagagagaaggctgtatatttacgtaaatctttcccaaatcagtatattcttgtgatttcggtaaaaaaaacatttttttcaattttttttcgttgttgcgcgcatgtgcgatcggcacagcgaggagcaacaaggcacggggtcgaggcgggtccggtgcaccgcggtgctcgggagcactttgcggctcacgggagaagaaaggagctgtatggcgcttgtcctggcccgctgtgtccgtcaggcttgcccgcggacggttgcggcgcacgagagcgacaaggccgacacggcgctgaagtgaggcggcgcacgggacggaggctgctcgcgcgaacaaatcctggcgtggttgacacggcgcaggacacgcgcgctgtgccaggacacgaaataaaggcggcaacgcaatcatgtgtgcgtgcgtggctaaacgagtcggttggctaggcctggaaggctcggctagcggctcacgggttttggtatttcttgacgacattagtagaaatataattccaagcaatgacgcagaaatacttctggttctggtatattatggttacagagttcatccgcaagcacacggatataccattgtagcatttaacccgagagtattccaagggtatcgtatttattttatcccgtgggaagatcatgtaaagagagattgactaataatttatatattacttgtgataatcatattctaagcaggggttaagataatccaagggtagagtgacacacaagcattaacaactcattctcataataaataatctaagctaggtggaaagaaaagagaaaggaaatctattcctatacttaatagtatacatagtatagtatacatacattctagttaactgatatactagctaataccctctatccgatgccctcttggtacttcgagaagccacccctgactgccgagtttctttcgacagcccgtcatgatcatacaaccggggctaaatacgaaggaataccctccccaggaaattaactgtcggagatatgggtccgggggtatgtgaagtagaggggagttaccttccctccagccacgtggctctgcaagctggctgtcacgcccggaaattcactagtaatttccgaactaatttgtgcataaaatcctcgtctaggaatcagccgaggtacacaaactgacaatttaatatacaaatccatcataataataacgttacatacttacaaaagaaaagaaaaacagcagcggaataacagtctagcgatggcttcagctccactcccacaggcagctcaactggggtataagccaaacgtcttctccttctggatcctttttcttcaactgaggtttaatgattattgcaagaatgagcatatgacatactcaacaagccacacagcaaatatgcaagtacacaaggataccaaaggatggcataatatagtctcatttgcgaaagcagcatttagtaaagatttaagagtagtgaaacagtagagtaattaatcatcaattttaatcaacactgaacagcaccccaatgctgcacagggccaaccatcctgaacaaccgtacccggctgtacagatctaactccaaaccaggagctaaacaaattattaccagttattgcatcaataattatttgtgagagttgtgagactaatcaaaaaaacattgctcaacccgcccataaccgcgggcacggctattcgaatagttttactctggccagaggtgtaccactgtacctacaagacacgattccacacatgttgccatgccccgaagtaccaccacggcactgcaaagggggaaatcgtgacaatacccttcgcacaacacaactcaccacagtgcaccattcatggatcataatcaccccctcaaaaaccagaggcatggactccccagcgacccccacggacttctcgccgcttctcagtctggcaccccgtaatgaaccatgctatacaaaagataaagccgttgcccccgttgcccacgctggcttgtgattggtacggttaatgtttcacaacagtagctcgcgaaccggtccttaattgccatgagcacgaccttcaaaaccatgtgctcacaacccaccattgacaagttttaattatcaattaattatcataacacgattaaccatcgtgagctacatttaaatctaaccataagtaataatgtaatatgattcaccccattaatgagctaatgtttctaagcatggctaagcaattatatatatatagcatttagctgaactaaaccaatatataaggttctagctaatcgaattataacccgtaggaaaataaattcatcttcggccaataattaattgggaaaggctcaccacccgatgacattcgaaaataatgtataagttgaaataaaacattagctttaaacgggttcaacatgctcagggtcgtttgggatccgtgtgacttgccttgagcttctgcaaaggcttccgaacctttctcaacgaaaacgctctcctccggaacgtcggaaactaaagcaaatgaataaaatcaacaaaacagtacaaaaacaatcataaacagtacatgtggatatttttaacatgtagatctcgattttagaaacatttagcaacttgaaccactcgaatcggagttacgatgaattagttatgaatttctgaagttttaatctatttgcatctagaaaaaaaactggaaaaaggaaatatgacgtcatgctgacgtcatcatcgccggcatgacacgggcgacgacctcgccggcgatagagaggtcggcagggctatctaaaggcatctacacgtagaggacgacgacgcgaactcaccggtactagcaaacgcgatggacgacgacgaatggtggccggcggcgagctctagcggcggcacggctcgggtcgtcggcggcggcggctctccggtgaccggcaacggcggcgagggggcggccgaggttccccgcctccgtgcgcatctaacggcggcgacaggaagcggcggcgactgataacgcgacggcgcggcgcggctggacgtcggccggcggcggcggcggcggcggcttggacggcgtggcggcggcgctacgggggacgagaaggctcgggagttggggcaaacgaaagaggacgccaaagggatgctatttataggcttggattagagagatcggactccaaacgagaggatttgagccggaaaatccgagggttagttggagagataaactcgaaaacgaattcgatttggtttatccgggcaaaattaatctccgagactttaaaggaaagggagaggataaggtggagatgatttcccctcaactaattttaggaaaacacaagagaaaaggccggatttggtggaggaagcggcggctgcacaggtacaggacggcagctcgggcttctgtccaagcttgaagatgaatagtacacggggaggctaattagactttcggctgggcttctacttccaaggactgattaaaggagggacaaaaagcagactttgggaaagagagggaaaggactgcaggctgagaggagactgggccgagagtgagaggacttttcctaattcggcccgaaaaggaaaaggtgaattttaattacttttccaattaaattaatcactgaaatgatctttgaattgttaaaaatacttatattgctcaaataatttcaagaaaaatcttgaaaatacttggaccctcaaagtatttaaaaaaattataatcagaccatttaatgattaatttaatatgtggataattactgaaattttctttgtatgattaaaattaagaattgagctctgaaaaatccgagaaaattccagagagtataattaaccatggaggatttaataaaaattaaatccatccatgctttatatttaggaaattttatttcccacatttaacttcacttgtaaattaatgaacatttaatataaattctaataataatttattaaataatttataaatctgaaacgaaaatcaggacgtgacactagccccaccgacgcgtcccgcgagtcgcgaaagcggcagggggggggggcctcggggcgtgatgtcgccccctcgagctctcccgtagcttcgccccgaggccctcgcccggctgccacgcggcggagggagagagcgagaggggaactcaggctgaacaaacataaatgtgcgacgccccnncttgatgngtngctgcggaggaggcgtcgaccatcaagnngccccggnggnngggnngancgccgcggagaaaaacctacagaacgcactccaacaanntcgagaactaccggagtcccggagtaagtaggtgtaccacgcagagcaaaatatgtaagtctccgcggct

SEQ ID NO: 16938 - DNA, 14989 bp, Oryza sativa
  unsure (1)..(14989): unsure at all n locations
cgctgctgncnagtggatttgcttctactgcaagtagttcatcagtgaccggtctgtgaccggcctattgctgtcacatccgattggtagggtaatcatgtccccacgtcgcctctgtatccggcggagtgggcgtaggtatgatccgtcacatcggagcgtcgctcgaggaagggctgccgcaagtcctcactcatttatgagggaatgacagggttgttccccgtgtcaggcgggggacgacgccgggttccactcgagaaccggttgctgcttagcttccgggagaaggcatggattgaaacccagtcaaagtggagtgggatccccctcccatggagggtaggtagaggcggcgcatgtggtatccccttgaactataaaaggaggaccttgcccactgagatcgggggacgactcccagaaaacctgaactccaggagaaagaaagcgaaaacgctctccggagtgaggaaacctttgtaaaactcatccataatcccaaacacagtagtagggttttacgctccatagcggcccgaacctgtataatccgactgtgtgcaagctagccgttagtcttagggacgaacgagtgatttccaagaggcgagcctctgcccccggccgaactcacaaaagggggctcttacgactccccgctatcgaggatcttccctcgacagctggcgcgccaggtagggggcagttgcgcgtttcgagaagaaatcgctttcttccgtcccaagtttctccaggccttagccgatgatggacgaggtcctggaggtagaggaggaggcagtggcgtttacccccaccccgtccgggagtggggattccggagaaagccgtgatcctcgtcaccatcgccacggttctccaactcctccccgccgcgaaccctcgcggagggaggatcccacccattcgggtggttcggctctctctccaccccctggcggagggaggccgcgatgcgtcggggcacgccgccgtctcgattatggagacggcggttcgccccaaggagcgcttcaggcggcgagtgcccttctgcggcatcccccggtaaacccggagtcggagacccccgttcagcactggctggacgacgtggccaacttggtcactactgcccagcggcagttggccacgggcggccgatccaccgccactggtacgtcgcgtacctcggttaccctctcctcgtcggcaaggagaagggcccaccgatcggccacgatctcaaggcggtccacagttccaacatcgtcgggggcctcgggaagccggaggcatcatgacggcctctacggggcgcaggacgctcgaatcaacattgagcgacgccgggacgagcgccgagctgcccgcatgggggaaggcgccttctcatttagagtgccacgctccccttcacgaggcggccctccccctacgctcacccctggggggacaggttgtagggcctttgtggcgagtctccggaatgtccggtggccccgaagtttcgccccaaccttacggagaagtatgatggtagcatcaatccctccgagttcctccagatctacaccacgattatcgtggctgcagggggtgatgaccgggtcatggcgaattactttcccatgaccctcaagggtcaggcgcgtggttggttgatgacccagccccccgactccattcactcctgggaggatctgtgccagcagttcattacgaacttccagggcacatatccccgtccgggggaagagacggacctacacgctgtacaacggaaggacgacgagtccctccgttcgtacatacagcgcttctgtcaggtccgcaacactattccgtgcattccagctcacgcggttgtatatgcattccggaacggcgtgcggcataattgcatgctggagaagatagcctccaaggagcccaagaccaccgccgagctcttcgagctggcggacaaggtggcccaaaaggaggaggcgtgggcttggaactctcccagcaccggtgcggcggccgcggctacccccgagtctgcccccgctccaagcggcgagataggagaggcaaaaggaaaccagcctgcttcgatgacgagggccatgtccttgcggcagatgggcccgcatgggccccgtgcaaaggaaaggccaccggcgataagccaagccccactgttccctccggcgagggccggtcggcggacaagtggtgctcggtccacaacacttaccgccatagtctcgccgactgccgctcggtcaagaatttggccaagcggttctgaaaggccgatgaggagaagcagcagggtcgacgggagggcaaagctcccgcgacctcaaccggtgaccggcgagaggaggccaagaacaatgcccccgccgatgatggcggagacagtgaggatctggacttccagatacctcaggggaccgtcgtcacgctcgacgggaggggaggggggcttgcgctcacaccttttgccaaggcttcaaggccatgaggcgagagcttctggccgccgttcccatgcacgaagcggtccggaaggcgcgttggtcagaggtgaagctcacgttcgaccagagcgaccattcgacggtgctcgctcggggagggaagttggccctggtggtctccccgactatccacaatgtcaagatgaagcgtgtgctggtggatgggggggccagtctgagcatcatctccccggctgcctttgacgcgctcaaggccccggggatgaagctccagccgtcgctccctatcattggcgttactccggggcacacgtggccgcttggccacgtagagctcccgataaccttcggcgactccaaaaacttccgcaccgagcggatcgacttcgatgtggcggatctcaatctgccctacaacgcagttctaggcagagccgcgttggtgaagttcatggtcgccactcactacgcctacctccagatgaagatgccgggccctgctggccccatcaccgtctttggtgaagtcaaggtcgccctcacctgcgcggagcagcgcgcagacaacctagtggtggccacggagccacaggccccagaggcctctgcgtcccacacctccaagaagcgcctcacctcggctgacgaggtgcccgtcaaggagatcccccttggcgacgatccgtccaagaccgccaagattggcggaactttggacgccaaataggaaagcgcgctcatctccttcctgcgggcgaattctgacgtcttcgcatggaagccgtcggatatgcccggggtccctagggaggtgatcgagcaccgccttgccatgcgaccggatgcgcgacctgtccggcagaaagtgcggcgtcaagccccggagcggcatgccttcatcagggaggatgttgcgcggctcctggaggctgatttcatccgcgaagtgatccatccggagtggctggcaaacccggtggttgtcccggaggccaacggcaagctacggatgtgcatcgactacacagacctcaacaaggcatgccctaaagatcccttccctctgccacgcatagatcagatagtcgactccactgcggggtgcgaccttttatgttttctagatgcatactctgggtaccatcagattcgcatggctagggaagatgaggaaaaaaccgcctttattactcctgtgggcaccttttgttttacaactatgccttttggattgaagaatgcaggccctacttttcagcgcatgactcgtattactttaagtannnnnnnnnnnnnnnnnnnnnnnnnntttgtcgatgacctggtggtaaagacgcgccaccaggacacgttgctacaggacctggccgaaactttcgatagtcttaggtccacgcgcgtaaagctgaaccccgataagtgtgtgttcggcgtgccggcgggcaagcttctcggttttctagtctcttcccggggcatagaagcaaatcctgagaaaatacgtgtgatagagaggatgtgcccccccagcaagcttagggatgtgcagtgcgtcactggatgcatggccgccctgagtcgatttatatcgaggctgggtgagagggcgctacccctattcaagctcctcaagagctctgggccgtttatatggacggaggaagctgagcaagctctcaatcagctgaaagcttacctcacttcccccctggtcttggtagccccggggccggaggaaccattgctactctacttggccgcgacccctcatgtggtgagtgccgccctaatagttgagcgtgaggaaggcgaacgggaggcccctccggctcgcaacggcccctcgtcccccgaaggcctagcgcccaaagctcccagcccccgggaggaccccgaggcccccgagggaggaggggaggctttggcaggtggccccgagccttatgatcctgaggcaatccgggatccccccgggacctccgaacaggcgcgccccggatcatctacccctgacaacacgaaccggccccgccgaaaggtgcagcggcccgtctactttgtcagcgaggcacttcgagatgcgaaaacccggtatccgcaggcccagaaaatgctttatgccgttttgatggcctcaaggaagttgcgtcactacttccaagcgcatcaggtttccgtagtgacgtcgtaccctctcggccaaattttgcacaaccgagagggtactggacgggtggtaaaatgggccatcgagctggctgagttcgatctgcacttcgaaccgcggcacgcgatcaaaagtcaagtcctggctgacttcatcgcggaatggaccccagtggatgaacctgttccatccgatgtccctttcccccctagagaggaagaggatccaaacgccgacattcgcggcgggcactggattatgcatttcgatggctccctcaaccttcaggtgcaggtgccagagtcacactgacctcgccaagcggagacgtcctcaaatacgtcgttcgactcgacttccgagccacgaacaacatggcagaatatgaagggctcctcgcgggattgagggcggcagccagaatgggcatccgccatctcctggtcctaggtgactcccagctggtcgtaaatcaagtatccaaagagtatcagtgcaccgacccgcaaatggaagcatatgtctacgaagtacggcgcatggaacgccacttcgacggacttgagctccagcacgtgccccgacgcggcaacacagttgctgacgagttgttgcgtgttgcgtcggcacgagccccactccccccagggactttcgaagaaaggctcgcgcaaccatcggcgcgaccgaaccctttgagggaccccaacaacacgccctccaaccctcgtatggatgaccgacatccggggtatctcgacggcaatactcttcctaaggatcgcgcagaagctgaaaaggtcgcgcgcatctccaaacggtacgtcctcatagaagggaccctctaccggcgtgccgccaacgggatactcttgaagtgtatttctcgagagcagggcatcgagctcatagccgacgcccatcagggtgagtgcggggcccattcgtcctcagaaactttggtcggaaaagccttccggcaaggtttttattggccggctgcattacaagatgcccaagaatgggtccagcggtgcaaggcatgccagttccacgccaagcagacccaccagccggcccaagccttgcaggtcatcccactctcttggcctttcgcagtctgggggctagacatccttggaccattcaaggcagctcgaggcgggtatctgcacttgtacgttgccatcgacacattcaccaagtggcccgaggcctacccggtcgtcaaaatcgacaagcattctgccctcaagttcatcagaggcattacgtctcgattcggattgcccaaccgtatcattacagacaacggcacccagttcaccagtgagctatttggcgattactgtgatgacatgggcatcaaattgtgctttgcctcacccgcccacccccagagcaatggccaagtcgagcgagccaacgccgaaatcctcaaaggactcaagaccaagacatacaacgtcctgaagaagcacggggattcatggctcgaggagttgcccaccgtgttgtgggcaaatcggactaccccaagccgcgccacgggggaaacaccattttttctgatgtacggcgctgaagcggtcctaccctccgagctttccctggggtcgccttgcgtcacactgtataacgaggccaacatggacgaccttcaccgcgacgatctcgattatcttgaagaacggagaaggtgagcggccctgtgtgccgcgcgctaccaacaaagcttgcgacgctaccatcaacgtcacgtccgggcccgatcactacaagttggcgacctcgtcctatgccgcgttcagtcgcgcctagggctgagcaagctctcaccaatgtgggaagggccatacaaagtgatcggagtaccccggccaggcttcattcggttaaccacggaggacggcatagagctgcccaacccctggaatatcgagcacctccatcgtttctatccataacatcgagattttttgctttcctggagctcgggccagcccccgcacaacccctcggtttgtgcgggcctggccgggggctaccactgtgcatcctttttccttttacaagcaatgaatttttctactttttcatgaagaccgttttctccccttcctctggcttgtcctggtttaagggataatccgagtttgctctaaaccctaagtgccgtaaggcggcctgaaaaccgccgaaagggagcacgaacgcgggccgcgccccgggttgtgtcgaaccccgggggatcggaagggcctacacacggtcgtccccgacccccggtcgtcgcagcctcggtctggccagtcccgctgggcggctccctcggggcgatggtcttgcctatcaccacttaggtaccatggaccgagcgcggatttaccttttcgctagaacaagctcgaggggtggatggggtcaaaacgacatatcaatcacaggcagtctaattatccccttttgccctggttttttcttctctctatgtcacaggcacccaatggaaaaagcaaaagagtaaaaggggttaaggaagtttcagttgtagaacaagacaggatggcacaatggcctaaatacaagaagtgcctgctatgggcacacgacaaaagggaattaaaagcgcgagtagtcacggagtgcccggccccccgaggccagcgccactgacgatgtcgtcctagtcatcgtcgccgtcatcacctccacttccgctttcttcgtccgaggtgagcccaaaggtgaaccggggggccgacccctcgaagttcgagacaatcgcgtcggccgcctcccggacttgctcccgggcccttgcctcggtcctcgggggaaaatcttcgagcgcgcaccatggcatgatgacctcgaggacctcgatccgccaacggatcgtggcttcaaactcctgtgcggagcgggcacaatcatccaaggccctgcgttcagcctcgagtgccactgtccgggcccgcagcgaggcgtcggcctccgatgcccgccgctcgtgggcagcggctgcgtcgaggatgccgcgcgcgtccctgatcctctttgccaagtcctcggcgtgggcctcatactgaaggcggatgtcgcctagtgcttcatccagggcactcgaggcgattagcgccgcctgccgctcctcctccgtctctcgtataacggaatccagcgcctccttgcacgcctggatttcggctagttgggtttggcgcattttgcgccccaccctcaccatgtcgtccacggcgcgacgcccctcatcgactcgcgcgcggtccgcagcgagctgtgcccactctgcatccagggccgttcgctcttccgcccgggcttgaacttgggcgttgagcccctcttgtacagtggagtcggcggcggcgagcacctgcagaagtggctccatactctccgcagtcggggaagaaaaggccgcggtccgcccccggggcgacggggtactgctagatcccccgcgagactgggggctgctctcggctccccttctacgagaccagccccgagggcgccccaagcgcaagggggagcggctgtccctctcgccccccgcttggggtcctcgagtggattcagcctgggcctcgggctcggggccgcccccagcctcggcctcgacctcgggctcgggaccgccctcagccttgacctcaacctcgggctcaggaccacctccggtttcggctcccgagctacgacctccctcaccccccgatcctgggtggcgctccgcatggaccctggtcttagagccgccctcgggagggacgtcgccgccaccgtcgtccccggcaggtcgagtacgtgtccggtatgtgtccggtatgtgtcctttgggtcccaccgcgaggctacaaagaccccgcagccttggattggccaggcccggaccgctccgaccgtttcgatttcgtcccccgcgaggggtccgaccctgagactccctgagaaggaatctcgctacaagagaacccagatcatgttaacgaaagaaaaagaaaaaagaaagaacaagaggacgggctgggtaagagcaccgaagtgagcgccagcaatcgtacctgcagggagggcggttgaagatccacttcaggggctcaatgaagctccctcggcacggctccgtttgccctatcttccggagccgcttctttttctgtctggccttgggcctggcaggtcgcttgtggcccgctggcggatgatctgtcgcgcgctcggaacctcctccacgcgggggagagggtggccaggactcggccaccttccgcttcccttttgggccaccggccgagtcgtctccgggtccgcggctcgggccgggcgcccttgagccaccgccgcctggaccgctggtccggctcccgcccgcggtcgcaccaccgccacccgcgccgacggcgctatcgctggcgccgcctcggctggaccgactccagctggcaccgacagctgacatcatggctaggatgctctcccggtcgcggtcgcagcagaggggaagaatcccatctgggattagtgttggctcggcggagtctaggcccagcacccgccgaatcaccctcttcgcgtcctcctcacctcagtcccagcgctcgcccacatgcgtgcgcatggggtcgttgggaccagtgtattcccacgtgccacgggatcgctcttggagaggtgcgatgcggcggtggaagtaatcgccaaagaccatcgcccccatgaggcccaggcttcgcaggcccctgaggcgatcccaaaccacgtcgtattcctcgcccagctccgaagccaccagccatgcggtggatctttcaggaggaccagcgggaactcgaagtcgcggatggtccggcaacgcagtgtagaaccagtctttcttccagtcctcccatttcttgtgaagatggctctcgatgtattgacccactgtgcctggctggggctggaagtagcatccccccaccaccgcgccttgcagcagctgtgggatgaagaaggcctggaacaaccgcatcgtcggtcgcaccccgatgaacatctcgcacagatacgcaaagatggccagcgtcatcacggcattgggtgcgagatgcaaggcatggatttcgtagaaatccagaacctcatggaagaatctggagaacggcggaatcaagcccgccatagcgaaggacaagaggtgcacggatcgctccggatatcgtggccgcggccgcgactctcccgcccgcacgacggcaccatccggcatgatcttgtggggaaggataaggtgcctgtctgccgtgatgcgggaggaagggagcactgtgtcgctggcgtcttgagccatggtggccggcggagaagtggcggagagcgtggcgcgtgggacagtgtgaagtggcgagaatattagggttcgagaagcgaaaggacgagtgggcggttggcgaaaggaagaaggcagagtctctgcctccgcccccttttatcctcgcctcatccacgctcacctcctcgtttcatgcccccataattgcccccacgatcctcgcgcccgcatttgtctcttcgcttcccgcgcccactcatcacatcgcccgttgtatccgcgtcccgcctttagtgcgcctgtcagtggcacactcgaggtggagtgtgcaacggccatgagcgcaaattgaacaaaccgtcaccgctaccgccgcaggagtggcgagcgagggaatcgaggcgtggtctgaccgacccccctgttatcgcgcctcaagcatcttcatcatgagcgcggtcagtggcagtcaaaccgctgttatggttggcacgccaacctggccaccggcgatatccctttgggttatataccggcgtggaggaatacccatactgagctgtcaccattagcggcccacctctcatccgcaatatataaccccaaataatgctatcccgtaatctagacaccacatctaaacgaccagatactactctaatatcatcgtcttgacatagagtaattgcatcagcaaacattatacccgcaccaaagcatctcccagataagctagccgtatactcagtataacatgaacataatgtaaagtaggtactcgtatactcggaaagtatttcaataccataaatgtatatagaagagtattctaataaaagtacaaagcgtacaaaagaggaaaggaaagctgttagagccatacccgaacacttccaaagacttccggactcctgattcctattctaattctattccaccagctagatactactaaactaaacttgagaggaatgagagagctattgcttgaggtttgtgtgaagtgaagagagtgagctccttatatagaggtagttatgacggttgtggaaggggaattgtgcgaagtgccctccaaccgtcattgggatgcaatcctggacgtccacgccaaaacatggatccaacggcgccaggattggttcagccgaaccaccagtttcggccgaacctggggctggtccaatccagcccaatttcgactggtggcctcctctattgctccactccacagacttgtgaattttggcccaattcatcgtgtcagttctgagttcttggcccatttattcataagtcttattctcgacatcgtctgattgatttatcatttaagttgatgtcgattctcctccactttattgtcattctctacaaaaggttagtaaacctaatactagtggaaaattattactctaacatacttatgcattgcaagcatcacaagttctctcctattttggtagtattgacggtcgaaactgatcgataacgaccgtcaacgaatccccaagcttgaacctttgctcgtcccgagtaaaggacgaaaggaaacaaagacttggttgttgatcaggagttgctactatgctgcatatctcaaagatacaggtgcaaggtatatgcactctctctcatattaaataatctttggcacggtggcttacccttacccctgattcccacgagacactgcttctccttgtcttgagcggttgaaagagagaacagcaattagagcaccaatcatccgatctttattcaactctcattccggaagttttcaaatgattttggaaaagaaaaccaagttcctcaaatgattcactcagtctctccaagtgtatcaaaatgaattaatcaccaaatattgcctttttgattcctactctaaggttttgatatgtggaactcggtagggatcaaacatggcatacttgcattcacatttattactaagtcaaaaacttagactagagcagataactgaacatactcaagatcaagatcgtgcaaaatgtgtgtgatatatggtggaaatggtgtatgaagaaaaataaagaaaaaacttctcctctgtgctcactttcttctccgaaaagtccttttattgattaggagagggcatgattacatttttttttcaacatcatgttcatgcttgatggagcataactttattattttttcataaccatgcctttccctcctctctttttcttctcctttttttaaaggattttttactttttaggagaagaaagcacataaaagcatggagaatttattttggtggtaatatggaaatacaatagaatattgcttagctcctagtgtaggagtttggcatgtgcatatatgtattcgttttccattttttaccgattcttcacaatcgctcgtctgtcattccaccttcgctgctctctcctctcgcttctcggtctcgctcgtctgcatgactgcatccgctggctgcttactcgctcccctatgctagatcagcgccagtggtggctgccggcctgccattctgtcgtacctgtcggctgccactgccgtctgtttgtctacccctctgccggctgctctcatcctttctttgctgtggtgcgtggtctgctccttgattcgtcctgtggttcaacgattgaccgctctcacgtggtgagtattgaattttaatgtatatgttattaggtttatccccgaatctgaacatagattatatttagactggttatactagaatagaatatgttacatcctgttggtccttaatttcctattaggctgaacatgtatactcagagtaatggtcctaggggggcctgtaaaatgggggccccgttcggtcgctccggtcacgcaccctcagtgacggccctgtgtactaggatatgtcactttctactacaaagttatcttattttgggatggagggagtagttcttccaccacttcttctttcattatatttccaatactggtcgtgaaacaccataaacaggaggatgttgaggcccgtaattcgaagtgaattcttgatttgctcgttcctagtctctatttattcctctaacttacttgtagtattcatctaagctacttctaaacatagctacatttagttttcacgtagataccacttgtactgctataggacagaattacttaaaaaaaaacagaagcagaagtaacacttcttttaatgtattagaactttagaagtaactataatgatagaggaaagtaactttgagaaaaaaaagaattaactcttcatgatgttagaagtaattatactaagaaaagtaactttgaaaaataaaaataactcttttatattaatagaaataaccacactgcttaaggagtcaaggataaaatttggataatttgatggatgcagtaaatttacttcacatatttccttatttcaattctcgaactatgtaatggagagttacttctatatattgtagtagaacttatttacttctataatttgagtaaattacttttaaatacttatgatcttgatcagagagcatgagaagtatctacacaagtcacaagagtttgacaaagttcaatagaatggcaagcaaccaaaatgtatatggtttaatcatgatagcacatttttggctctggtaggaatttatatcaaatgaggaactctcaatttcatcattttgaaaaacaaaacatccggaattcaagtcaaactagtatcaagatcatagcaactcatatttactatctcatatctcgcaacaacctagacttagatcagcaagtgcagcccatttacctcaggttcccggataattgttggctacttatatttaacctttgagagagtatttaccaagaacccatatatcagagatatgaaacagagcaactattcatcatttcaacaaagagaactagcttgtcttacctagcatgactcaaacctatcctatctttttggcattttctattttgcaaatttttatgttgttttttttaagttttataagatgcaattggaaagggaaatatgcaatgtgatacaagttacctcagtggggggagagatgtctcccccccaagcttggctttcgctgttggcggttgttacaagccaatctcataccgccaacatctgcataaagttcacataataaaacatccaacatagtgataggtgtttaatctcacatatttcacaagtgttggtatatatttgtatgcaggtgataaactccatttttgaggaaatctagactaaagtgaggagaattctgtatccatacaaggatgggttgtgaactttatcgaaacatcagtaaatcagcccaaaataccatgaaatggaaagaggaggaccaggggaggatgtcacgtcccaaaacgaccctaaaatttatcctttaaattatgcctagaataattaaaatccgtgtgaaaacctccaacaattaaaatgtgcaaagttaaaagtcaaataaggcttagaggatttttgtatatttcctaaaagcctgaaatacgtaaataaattttagtggaattttcagagcacaaataataattgttaagaaataaacaaagttaaaaaggttttataaaaagaaaaaccctaaaaagtccctcttccctcccttgggccggcccggcccatctctccccccctctctctctcctctccccgcggcccatccggcctctccccgcgcgcgccgctgacgggcgggcccgcccgccatcctcgctgacgggtggggcccacccgtcatccccttccttccgccgttcctgccacctcccccgcgccctagcgctgccgccgccgggaataccgccgcctcccgcggtccccgcgtgcaataaagtggggggaattactccttgcgatcccctctccctttccccccattttcccctttctctctcgcgttcaaacagggggatttgcccccgcaaatcttcgct

SEQ ID NO: 16939 - DNA, 797 bp, Oryza sativa
  unsure (1)..(797): unsure at all n locations
tgaggcccttgatgtctaactcctcgnacagnnacncatcaagtataagaatttacatcactatatgctcggagcaacttacatcaatcttggtgcacattgttatcctgcaagacccccccgcaagacccggccggggccccgcaaggaatcaattggaggtggtcagccttcttccgctccgttgggcacttcggttggggcatggcggcgaactggcaatacccggcgagatgcgatgcttccctaccttctttgagatgcgatgaacgaaccgggggtgcccggcgtgcctggaatgaaaggagcagccggaggagaccgccgtgcagacctgctgggcctagtcgctgcgtgtatcgcgagcgatgacaacggagcggatcgcgtccaccggccggccggcgtgcgtgtctgcgcggtggatttggggattgggaggaagctggtggttagccctagggttaccttacaagggcatagggttatatgcttccactttattgggccttcggtgggtttcttctggtataggagtactatctcaaaatcccactcgtcctttcgcttctcgaaccctaatattctcgccactttacactgttccacgcgccacgctcttcggcactttttcgtcgggcaccatggcttaagaccccagcgacacagtgctcccttccttccgcatcacggcagacaggcaccttatcctttcccacaagatcatgcccgattgtgccgtcctgcggacgggagagtcgcggccgcggccacattttcggagcgatccgtgcact

SEQ ID NO: 16940 - DNA, 697 bp, Oryza sativa
  unsure (1)..(697): unsure at all n locations
tgtgtgtaannatttgactacagttggtacagtagttcatcactattgcctgacttgttttaagagaaaaggcaaactagatgttttcccacctgccattctggggatcaaacccgggtggtgcatttcagccccacaccttcactactggggacattgacaaattgttatggtttgctgaacaaaagttcttgtgaagtgataactctttagtgctacagaactgaattatgtcagccactaaataaaataattgtgatcactcttacggaaaggctcttctcgtactttcaccactgaggacattgacaaaatgttctggtttgctgaacaaaagttcttgcaaagtgataactctttagtgctagagaactgaattatgttagccactaaataaaataactgtgagcactcttatggaagggctcttctcatttataccttgtcattgactctgcagctgagatcttcctgggacattgcatttctgcagtgtagaagaagatatggtcgatggattcccctatgaagtgccagaagaatacagcagcatgcctcttctcaaaggaagggctaccgtggacatgaaggttaagattaaggacaatcctaatttagaggattgcgtatttcggattgttctggatggatacaatgctcctgtgactgctgggaacttcttagatctggtggaacg

SEQ ID NO: 16941 - DNA, 716 bp, Oryza sativa
  unsure (1)..(716): unsure at all n locations
ggtgtnnaattgatgatcagtggtacagnagnncatcacaaccttcctacagtgcttaagatacgtactttctgtttcatccatacagtgagtgcaagccttgtaccccttgttggactgtccggataggttgctaagtgcaggccaatcgttgatggttacgaacagcagcgctcgtaggttaaactcctgtttgtcctcgtcccacatggggacaccttccttcttccacaactgtttaagatcttcgaccagtggtcttaggtacacgtcgatgtcgttaccaggttgcttggggccttgaataataatcggcatcattatgtactttctcttcatgcatagccagggggaggttgtagatacacatcgtaacgggccaagtgctatggccgctgctcatctcttcaaaaggattcatgccatccgtactcaaaccaaaccgtatgtttcgtgcgtcctttccaaattctttaaattttctgtcgatgtttcgccactgcgaaccatcggcggggtgtctcagcatcccgtcctgttgacgctcttcagcgtgccatcgcaacattctagcattccccttgttcctgaacaaacgccttagccgtggtattatagggaaataccacatcaccttagcaggaattctcttctttgttagctgcccgtcaacttctcctggatcgtcccgtctaatcttgtattcgagtgctttg

SEQ ID NO: 16942 - DNA, 9039 bp, Oryza sativa
acatagtttggctagctgatcaggagctgtgtttgaaatggacctaacagggagatgaattttgcatgagatgggtctagatggaaagaatgcggcaaccaaacacacccattcctgcacacaacatagcatctgagccaggctcatgcagacatcgatccaaacaggctctactgcgaggagagtgtccagtgacatgaaatttcctcatgtctctcaggcctacccacaaaattgtaacaagcttgcactggagtgatcaatctctttcttagaagcttgttgtgctccttggtcttattttctagagtgattttatagtccttgagaaggtactatattttctaatgtaaaatttaggaaaaatttcacaattcttgagagataccgagaggtactaaatttggtacctcctagtaccaaaggtaccaagagatactaaattttacactagaaaatatagtagcctccagtaccgactcaaaaactgtaaaatcactcaaagtttagtacctttcggtactccaggtactaggaggtaacagtttgcactaaaaactttgttaccacttggtatctctcaagaactgtaaaatttctttattttctatgtgtggagcaaatagaggatattaccctatatatgaaaattcactatatgctaactatgttttcacatttaatgtaccatatctatatatttataccagtgcaatctttttttattagctagtagtatacctcatatagatcgatggtgttggtacttgtgatattctattaccaggagagacaagtgtaaaagtaattaacgagtctagaagacatcaatgagggtgagacgacacaataatttcattaattgtctcacatacattcaagcggttcagattgagttctcatccatgtaacttgccgtccggaggaggacgggaagaagagatcaaattaacaacgtgatcgctcttagcgttcaaaataagagattgtttaggcagcaaattaaatcgtcgttagctctcaaggtgtcacagcataaaaattttcagtggaagaggcaaaattttcagcacaatgtgcacctgacagtacactactgtaatgccattcagatcatcgtttcaggtcaggttgatcaatttggcataaaccacaggcttaacatgtacatcaccataaacagtaatggaagtttacggatttgttatcagcagcattccttgaaagttaagaaactgtcatctctgctgtacatggcattcaggtgatcacatccactcaatgaagagtttgatatcaaacgttcaaaccgcccatgagattcagaaattggttccaagaatcaaaccaagagttgcattgcaaggatatctgctgatgcaccaggcagaatgaatataaattactgtatctaaaaacagtgtccagtgaagtccggatgtctgaaacttgcattggaggaagtatggtcagcaaccagcttaccagttgcatatgtttcagctcttggtgcctcccaggcctaccatatcgtagcaaagctatggactgtctaaaatctccatggttcttcttgtttatctcaattaacatcaagctagaaaaacaagattggctacctttcatgcttcttttatatatggagcaaaaaaagatagcatggcatcatatagtatcatgcatgattttaatagctttcgcgaaaaaaatacacgattttaatggaagtgcatctacattattgactgagcaatcaacaaaaatggtggtttatgatctttaacgatccatctcaaaatcattcacccagtcatacaactctacacaatcaagtaaccggatggagtcatgaacttaattcttcatcaattgcatttgtggcgtcaacgagaaactgacacaattccattgccttgtcacacttgcaggacccaccacatggccctcacaagaatgattacaatgccaccaaagacatcatgatgcaatagttcgcaaaacttcatggtcttagcggaaggtgaaaaatgtctgaatctgctataattgtttggacgatgagagttatgctgagatgcagtttattctgaacttgtgaacatatttccacagacaaaatggcaaacaaagtgggtcaatcatgttttacaattccgcatagcatatttcaactacagtccaattcatgaagtgtacgaatagggaacttagtttttttttaaacgaaaagcggcaaaagacttaccgaatatattagaaggaataaaagtcacagtacagacagggaaacaaagaaagcaactagcacgttaaaagagtcatgctatgaattcagaaggtcgaacattgactcttaaaactctttgggccatcagataggccttttagatagatctatttggtctatatttttcctttactaaaaaggccacctgattttcattccgcgagctttgctgaaaaattcttcgattgcgctcaagccgaacgttccactaacttgatggttcccgaggatcttcttcttcatggtccctgacgaaatgtggcaatcccaatagggaacttagttgatggccttctgggtgatgacgaacctaagaagcctaggagatgaaataactcaattttatagatgtttcgtaattaaaaaaatcaacgtaaaatggtgagggaagaacctacacgaggtgaccatcgtacaaagatccaatgttgaacggtgaccagttacatgtactctctcccaaaaatctcatatatcattctttggtttttccaaaaatctaagtcctatttgtagtcactttgtgctaaataaaattgttaatcggaaaccaagaagtcattctaatacttattggttgcatgttcattggtttgccatatggtgagtgagttaattgcttcttggtattgatgcaaaaataaataggtctcaaatttttggaaggagggagtataatgtaatatgattcctggagagatctgaataacttggttaatcatgtctactagcttgagaaatggtgagcaaagaacttagcagattgagactattttgtaattgaaaaattcccggtgcttcctaggccaaactattatggcgataagccacttgaaaaatcttatctccatcaattctccttctctttctcagcctgagatccttattcatattgccttttataggtcaggaaaagggatatggtgatgtaataagtgagctttagtgcaccgtcagatgtggagaatgggatgtttccattgtcttataacgaaatcgttaaattatatatggcagttatataaatattaaggataagatatgtttagagtccttcattattagcgaacagttgactatgcattgaaatcagctttcttgtctctatcgttgtactcctatatatacaattcacgaggctccaaaacaaatcaaccaataatcgcagtatatttctcttcatggactatttaacacaaatgtgatcacatttttttgaaaatgcatttcttaatgcttcttacagttattcaagaaatgaaaggtggagctgatttcaatgcatagtcaactgttcgctacgcaatatatattgatgcaacagaaagctgaagatctagctaattaacgagttacatgttgcattagtgcaaaattcattcaagtggtgttttttgaggacgccctctattaactcaaaaaattgcacttacccacctagataaaccaggtcggtcatctccaaccattcgatcgcgatcgggcagacatgatagtcgaagccagcttgttttcttttttttggtatgacaccttcctttaatccgtatttccaatcaccaagtgctatgtctccccactcatcagcgacgaactacgatatcgaacttgcttcctgtgttgtggacaaacacactggcatcgatctactgttctctcccttccaccaaaatggtccatctggtgcgtcgacctcaacatcgcgccatcgatggctgcacttacaaacttacagaggcagagttccatggaggccaaccttggtcatggcccctccagctttagaaatattgcattattggagtccccaagtctttgatactctaatacttcacaaaatagcacaataaccgttcaaagaagctatcacactgtctctctccaatttattgttcaagctccgccgctgcaagcggagcaagttgctgcgcggtgtttcttttttttttcacgaacacgcagtgtgtgtcagcattagaagaaaagagttttagttatacaacacaataagcctgaccggcccttgccaagtaacaagggagggatagcaggggttgaacaaagagaagggatacaaactaacaaaattgctgctcctagacagaggaagaaaaaaggaaaaggaaccccctatcctcccaataggtcccaaaacgaagcggcactagctaaagactagagcgctgtttctgttaattatcacaaactaaagtacccatgtaactcgccagagatagaagggaagatgaggtcaaatcgtgatatattgcttagttatgagcatttaacaagagatgcaaggaaggtgggaagtctctctttgttttctatctcgatcgtgtgaatgaatctggacaatatttatgaaagacggcacacgaatccaggcagatgtacaagggattggcgtgacaattttacacaaaccaacggctaaaaagggattgcaccacatgtacatcactggagcaagtgaaatttcaccataaaagcagccagctttacgcgagataatagcgaaaggaggagagatttgctccggtccaacaaaaagtacatcgaggtaccagtacctcacggtaccaagtcgtttctgatcgttggatctaaaaatgcccattctatccagctagattcaatgatcggaaataatttagtaccgtgaggtaccggtacctcgagataaccggaacaaatctcaaaagatgaagccctatcgcgaccatgaaattcaggtgaccaaatccactctagaggggcttcatcctgcgaccttgaaggtgcctgccgcaagatacataataaactggttggttgttgctagcattaaaatcaagagctgcatatatgccaaattaaacatgtccactgaattatgaaagtctaaagcttgtttgagaggaagaattgggtcaggcaacagcttaccaataagatgtatgagagctcctgacgtcttccaagcctaccatacaatagcaagccaaccattgggctggctgaactccatgaaatattcttgtttcatctctcttaacatcaagctaaaaaaacatgttgctgctacttcattttatctactcttttatggaattcagcatgtcaactatctagttagtcatgtcaactatcttgagaaatgctgagcaaaaaacttagtagcaggaggctagtttgtaacaggaaagctcccgatgcctcttaggcctaactattatatatggagcaacaagccactggagtggtctatctcccatcaactcttcaatatttgtttttcagtctggtgtcctttctcttgttatatgtggaacaaaatgatacggtcatgtagaaagtgttatagctttgtgcatctttggatgccaggatgtaattattctattatcttaaaaaaataaaaaatatgatcaagtatgatttaaatgctcatcagttactattagctaccacacactgatgcaatagaaggttgcagaacagacacgatttggtttggtggcaaattaatttaagtggtgtttttttgaggaaacctacatttacgtcgaaaaagttagcccattcgataaaccaggtcatatccaaccatttgataggacagatatcagatagctttgtggaagccatggattgttatttttttcaagaagaaacctccttttgtccatatttctagtcatcaaattggcggctttgtactttgttttttcttgatgaaatacagaatacacatttcgccacttccaaaaaaaaaaaaacagagtgggtgaattatgtttttcagaaattcagcatataccattccaaccacagtcatgaagtgtacaggcaggcaacttcgtcgatgggcttctaggcgacgaccaacataagaggcctgagagatgcagtaactcatttttatagaagtttctaagaaaactttcaaggtaaaatggtgatgacgagaacttatgcgtgtgagctgatcatggtacaaagatcacatataaaatggtgaccagttacatataaaatgcaatatgtttccttgatgattgaggaccctgtagctaatcatgtctagttatccgataaatgttgtggtaaagaagttgaaggaatgggctattttgtagtgggaaagctcccggtacctcctaggcctaactttcaacaacaagccactgtagtggcccatcaactcttcatctctttctcaacctggggtcttggatcctgtcttttataatgtcggaaaaaaggataatctgtactccctccatttcattttaggtgtagttataatttttcatgcccaactttgatcgtccgttttatttgaaaattttttaaaaaaatttaaaaacttaagccatgcataaagtactatttgtgttttatcatctcataacaataaaaatactaattataaaaaaattttaaataagacagacgattaaagttgggcacgaaaacttatggttgcacttaaaataggatgatcgaagggagtaataaccgatcatgactttgtgaatcgatcgtcagatgcaacgattgcgatattattattacactatgtttgaaagattgagtgtcatgtttcatacagtcgatttcaatgcagcaaggcaacattcacgcaaggaagagctgcagacaaaattaacgaggcgaggatttggatgggtgcgtcatggattaatacaatggaatacattagcagcatgagatgatccagcaataatcaagagtgatccaaactaaagagttggaatgcttttctttcgtgtatgaggtcctcttttcagtcgaaatactacctccattttttaatatatgacacatttgactttttgacaaacatctaacagttcgagaattacatcgctaactctagcagagtcaactacaactgttcaaccagatcacccgtgcatcagcggaatcagcagttgaactgttgaagttaattaccagcgtctaagaagatccacgagacaacagaaaaggaagaagctgcagtttgctccctagttgaggatatagaccagattgactggacaataaactgttctgcaaccttgaagaagcctacgagatgcagaaacatgtgtcgcatgccaaaacatgtccactgtgccactgcaccagagttctgaaactctgaaacttgcttgagagcagaagtgaaacaacggttatgcaacagtttaccaccggcgtatctgacagctcctgatgcctcccagacctactatacagtagcaactgggcgatgagctccaagaactacttcttttgttcactgatgacttgttgttgttttttcactaccgctgtcaatatatgatcaatgtttactgatgcccatcacttcccaaactaagaaatgatgtcactgaataaagacggccagaaggtgaaaaatgcatttgattggttagttatttggacaaacagaagcacgctaatgcgacagcaggagatgcatcgacagatgcatggtgacctgttacatgttatcgagtctatatagcatctgattgaagtgatcatttaaatacagctatattccagttcaatgcagcacataacttcttttgtactggtggctaaaatgggtttgcacaagcggggacaaccgcctttgagaaaatgtctgtgaaaatgctatatttccataggccgggaagcaaccagctgaggaaatgcatttccacattttaatttttcaggtgaaagaaaggtaaataaattttgtattttagtatgtgtctatacatggtcaatttttcatagctatgcaaaataaatacgaatggtttggtggttatagagagtaaggtgaaaatgcgtgaaactggtaattatgtgaacgaacagaagttcatgcaatttactctgaacttgtgaggacatttgcaaaaacaaaatgaacagagggactgtgaattttgtttttcagaagttcagcgaagcgctttcaaacaacagtgcaattcatgacaatgctgacttcgtcaatgggcttccagatgattgatgatggacatagcactagaaggactgagcgatgcatcaacccatttgtaactatcaatgtttctataaaggggggaaaaaagatgctagaggaaaaatggtgaggttaagaacttaaatgagcctataatgagagaaagatctatataggcaaggtgactagtcacatgtagaatgtaatatgatttcttgatgcaccattcctgtgtggttggtatcttgaaaattcccaagacagttagcaaagaacacactgggaattgacccattgacaggacatttcccggtgtctcccatacctaagtgtcctagaagagatttgctccggtccaacgaaaagtacctcgaggtaccggtacctcacggtaccaaatcgtttatgatagtgactgttataatgctatttttggataggccgggaagcaacctgctgaggaaatgcatttccacattttaatttttaatgtggaagaaaggatgataaactgtgtatcatagaaattggttaaacgggccgactgttccatagggtttccgttggaccataaattattgcggtttatacgacagaaggccaaattgcaagcaactgttatttctctcacaaacaaaggattttgccttttctttggcctccccagcttttttcttattcaaatgaccgatggactgtgaatttttttctgaaaatattttacaaggtttaaacttcagcctttttc

SEQ ID NO: 16943 - DNA, 11067 bp, Oryza sativa
  unsure (1)..(11067): unsure at all n locations
ggagggcaaatcgttacggtcaaaaagtcaatagatataatacgtttttggtggcgattaatcgcattgaatgcttaagctaaattacacctggtatgcgggcgataaaacttgttcccgcaaagcaaaggtccaattagggggagtggatggggcaaagctatttataaggggtcgtggcaacattgtttgcatgggagggaagaacagcaccaagatatgaaaatgttggagtacttggcatacagaacacacggtttcaatggccatgaggaagtatgaaagctgaggtatgaggatatgatgtgtataagtgagcagtcaacggttgctgatataataatagtgcaatgtttgatggcagcatgggtgtaagtgaatatcaaacttccataacttcatgtgattccttagatcaggagcaagacgtaaaatttcaaacaggtatctgtcagcaattcaataagttagatagaagactagtacagaagtacatggcgtaaagagcatatagagataggctngtnggnnnggagcaaatctcgtactagaatgatccacccatatattgatctccatcttcgtcgtctctctctctctctcggcagctttatgtgctgtttaaaagatgcactgtgcatctcttgctagcttctattagtagttattcaagacctgcaactgatgaggttgatcatgagatgattcatcagtagcgaccccacccggaagaaaaggaggggtatttttcataaaataccttcctattatccttgagcaagatcaatgtatgtgtgattaccaattacatatgaaatgtaatttgatccttgagcaagatgtggttattgaagtctactaacttgagaaatgatagtaaagaatttggtaaaaagtgggttatccataataggacagctctcgatacctcccaagcctaccatggcaaaagcaagcagttggagtgatcaatctccatcatttcttcttcagcctctgctccttgatcttgtctttatattcatagagcaagcaggacatggtcatatctgaaaattgagtgtttttttttcagttcagagagtttaatgcttaataacctactagtattactctcttacctaggcacccactaagagattattacattggagcctcatctccagccattcgatcacgatcaataggaccataagaaaggattagaggatggtggaaatactgcctctgctttctattagaaatgatagggatcaaaggacaacgctgtgaaagatgatatggatatgggccgcgtcaaatacgtgcatattgcgacattgaattgatcagatttgctcaaaatgcagaaacttgtatgtatgctaaacttgcatcaactggtttctaattgctagaaaagcatcagcagtagagaggcagaatggtatggcaacagctcaccaccggtttatctcacagctcctgacgcctcccaggcctatgatattagtaactgcagcaagccagtttcttggttgctgaactccatgagctccacttgttcatctctctgaacatcagtgaagaaaaacaagtttgctgctacttcatttcatctgcccttctatggatcaaaaaagaagacagcatagtatcatacacgaatttattgtctgataaacattcagtaatttaagagtagttagggattttgtctcatcttattattggttgtgtgccttatggcagaggcgggtggagtgattggtctcccatactacttctctctctctctcatttcttacttgttggtgtctcaattgagagccccattggttgccctaataagctaaagcaaaagttaaattttaaattttcaaacttaattttgaagttgatttaaaatattttcaacgtgattctttttaagcgttggcttttaaatcgctaagaacacatacataaaagttttacttataaattaatttttattctctaataagccaaatccaatgggagcctgattatttaatcgtctgatctgatgccatcatttcaaagcagaacttagctcgggaaaaactgacgacatgtaattaatgttattgctttaatttcatgggagtggattatataacactgtgatagatcaatgtccccatacatatatattggtagtgatcaatgatattatgacaaaccaatgaatcattgaattgttcttcctctcctgctttgaatagcgaatgttcaacaatgtcacttcacaaaacatagaaaattaattttatgatccttaagagggtatcggaaggtaccacactttctaatatataaaatttaatacttcttagtatctcacatatcgggagatactaagaagtattaaatagacaccacatggcacagcaattttttctaagtgtcacctctcagctctgttctccctcacctctcctctccctcatctccctcaatgaccgatgatgggggcggcagaaaccggcgacggcgaggcgcggaggcggcggggtcggcggggttggcgacggcaaggcgcggggttgccgacagcaaggcgcggggtcggcggcggcaacagcgaggcgtggggtcaacggcggtaacggcgagacggcggggtcggcgcggctcccctcccctccctcctagattcggtcgaaggggggaggggggaggagaggtggcggcggcggcggttcccctccctcccagatccggccggagggaggccggggaaaggcagcggcagtggcgacagttctcctccctcctagatccagccggagggaggctgggggagggcggcggcgacagttcccctccctcccaaatctggctggagggtgccccggggagggcggtggcggcggcagtgcccctgcgcagttcccctaaccctagatcggccgaaggtgggtaggggcgcgggtgtggtggcggagaatttttcttgttcgtcgagatgattttcacaagcgggtgactgggccatttgcgaaaggcattgacatacaggcggatcgttccccgcctgaaaaaaatcatttgtgtccgcctgaataaaccattttctagtagtgagataccaaattttgtactaaaaatcttggttcctctcgatacctcttaagaactataaaatttcaaataagaaattaaagcactaaataaacatgtttggatcttctcaaaaaaaaattaaagattattgtattccgttgattgtatcgtgggtgctgaatattgtgccttcaagaggccccagtcactcatatatagagatgatgcggggtaggattagaaggtagaaaacttagccatatatggctttagttttctggtctctattttttatttatttgaataggattccataccctatattttgtagtacaagaaatcatactatggcctgatttagttcctaactttttcttcaaaccttcaacttttctatcacatcaaaactttcctacacacacaaactttcaacttttcagtcacatcgttccaatttcaatcaaacttttaattttgacgtgacctaaacacaccctaggctagtttgagtctaccttctatctcctagatcaggcccactctcccttcatagccattaattatgcctgtcgtgtgggtacccagatccatgatcgctacagggtcctgtgacttgcgaaattgcagtacaacctactagcaactggatcggttggttgctgtgttcgtttatcgcggtcattgcttcaaaatatcatataggtgtaggcactatataggtgccgaaagtgctaaaaccaaaacctatagtcatttttccatttttacgggttgaaatctcaaaaaaaaaaaaacctttaaacaattataggtgtcggttaaccgacacatattctataggtatcggtttttttttaaaaaaaagacacctttaatatattaatatattataggtgtcagttaattaaaaatcgacacctataatatacggttttaaaaaaaaagatacccgcagaaatcgagctgggccgacaatcgagccaagccagtttttttttattcttgtgacctcaaaggtgccgggcacctttaaatattcacatcagtgccgcctccgtggtgtcgcttgggaaaaccggcacctatgtggggttcccaaccggcactaatgtggttttatgtggcagtgagttgggaacggtttcctatggcatggaaaacggaacagttcattagtgcgattaattaagtataagtctaaaaatagaaaatagattaatataaatttttaaagtaactatctaccatatataaatacatatatgtatatatatatatatataaatacacatatatatatatatatatggtgtgctacctagttacgtaacacctctcacagagtctccttgcgtgtccctactaggcccagcccacccccgcctgcacccaccaaagtaatttttttactatgattagcaccgtctatttatatgtgtttctatccggcagtaaccatccaaccccttatccccgaaatttttggatcatccactcagccggcgaacgcctcaccctgccgtcaagatggccagaccagctgggatgcggtgaagaaggagcggctagtgcagtcagcacagctaggggtcgccaaactccacatcggagtggcgttagaggacctgccgttgagggggagccgccgtcatccgatcagatctggagccaccgtcgccatggctctccaccgcggaggcctaggcagccaaggacacgaggtgactgccaagctcctccaacgcctgccgcagcgccgtccacccctcccgccatcggcgatgttcatgaaggaaacgggatgtaacccgatccgctgggaccagcgccggtggcaccaggagagccgcgacaggtccggggcatcaggcatggcttcctcctccttgctcatcacggaccagcgctgtatcggtgagacctggcggctggaggctggccgtccctgtgctatgcgtggattccaggcagatttggcgctgatggctgacattgcctgcgcagggccacacctgctgctcgtcaatttcttccctatctacaagctgggtcctcaccaacacctgcgacacttctcatgttggtccctagctctgctctcctttatctcctctctttcaattgaaggggtgggtaccagcaaccttcttcttgccagtaaaacaaatagatttttcctcttcgattgtgcggtcttaatttgcaacagtatttttttattttatttttttttgcatttgctcattgattttgttgtagattgccggcacccaaagacagccgaggacttcctgaagctgagccccggccgcaaggttaatttttctctagacgcatcttgattggtatatgtattcgtgttaatcctgagtaacatgaccacagaagaaataatctgcagctgtggttggtattcacactccactatgattgatggaactgatggtttgggtgttgctgatttgggagttggtgacattgaaacaaccactgattgcacaaacacatcaaatatatgtataagttttatgagtctattagtatatgttctttaggttatttttttttgtactagtcttgtatctgacattctgaattgctgacaaatacatgtatgaaattttaggttttttgctgtgccaaaggaataagatgaagtttctgaaatttgatatccactgacaccctgctgaaatcaaacatggcactattattatagcagcaaccgctgactgctcactcaaacacatcaaatcctcaaacctcagctgcgatgctagctcatggagcttgagaccgtgtgttctgcatgcagagtactcgagcatattgtaattttggtgcagtactacagtggcatggaaacaatgtgccggcgtcccttagtcatggctctgcccagccaacccgacgaagtggtcatatgcttagtgtgtaaaaattttattgttcgcagtgtttgtgtagtttagcttgtaattcaatgtgataatcgtcagtaaaaactttatctatcgatgtattattgcggtgaaagtttgacctcaatcttttcaccccaataaaatagagtaaataaattactcaaacaatcttttgtcccaatagaacggagtaattaaattactcacaccaacttaacatggatgttaaccttagtggaagtaaacaaattactaatataaaccaacctcaacaaaaccgactgacggcacaataatttaccgatacatttatgccagtctacaagtgcaatatttgcctcatgagtccgatagtaattttttaactggagggtgggcttataagaagaaaatatgagtccaatagtaattttttaactggagtgtggactttagatggtgggagaccccacgagtaatttttttacggaaacatgtggacagtgattttttaactcgtggctgttggatatatacatgcgtctgggacatgggaatcaaagtaatttttttactcgctcctcctcgtggatatcggatgaggtgtggcatacatatccaaccgaaacagtaaaaagggagaaattcagggtgagtaattttttcacggacgttgggacgcacggggaggagcaatcgaacgaaaatcaggaagcggtggggcgcccaaaaaaaaaaaagcggacctcgctgctgttgtgagtcgcgctactgattcggtagcgcgtgtaacatgctaggtagcgtcaccgtaactactatatgacaccttaagggtgctacgtagcttcgtggcactcctcacaacaaccccatactatctgcacccaccattcttccctattagtaattattttactctcatctcacgctagcagcaccccttaaacacaatcccataccctttaacgtagtaattttttttactcaaatcctccaacctatatatgtagccattttatacggtaggatagattcccaaaattttatccaatgttaccgtttttctcggatctggagaggccgcggagggcgcatcggcaccgatcgggagaggcggcatgatccggcgtggagttggcaggcggcggcgggaccatggcagcgaccggttctatcgtagccaggtaacgaccaacccgagcatgcgggagatggcgacgtgctgcgcatctaacagcgaggggagatgggagacgggctcctctgacagccaacggaacggcgaccccagcgatggctggatccatccaccatgcgacggtggacgacggccccggcgacggtgggatctttcccctatccagagtggccggaggcagaagtggaggattgatacgtcagatctggcacgagcatcaccgctggaaacgaatccacatcggacggcgacctctacacctcaaaatcgccggtgagttcccgactgctacctcgtccacggcgctcctccaggccggcggctgagatccatgatgcgcctctctctctctgtttccttggcaggatccagtacgtctttggtcgttcctgtctccggtcgagattggcggcgactgctggtcgttggcgggcacacccatctctgcatgtgttggttggttgggcgaggaggatggtgatgtcgtccccctccatccctcccctataaaaatgttgcggcgctggaatctagtgtagcgcttcagtcttatggtgttgctagattgggttccgggtttcgacgcctgtgggaggctgcgatgatgaggaggtgcgtcgtggtggcccaacagaaattataaaaattgtagatacactcatagcatgacacatcaatgatagtaaaaatgtagtaaaagaaaagttagtacatatagccttttccctttcattttttgttaacacgtttcacacacggttaaacagtgtgttaaacaaaaaaaaaagccaagcctctctggtgagagttgacgagtttctgcctcatgcagctagggccgaagaccggggaatctgaggtcaaaacttttcatatagaagtttcttaaaaaaacaaataaacctattttttaacattgtaataattattacttaattaatcatgcgctaatggttcatttcgttttgggtgttgctaaaaatcccaccacgtactacttccctctcgagcatgaatgtattgccgtttgtatgtcatcgtcctatgggctgtcatcttatctgaattcctaatggcttgttttgaaacgcgaagttgtaaaagcatatgaatagaaaaaaaaaacaagaatatcgtataatagcatgtataaaacaaaggatttgagaaaatatagaaatttcgtaggaatggatgttgtgatgaaccatgaaaaaacacaggaaacgacagtacgtgcaaagttaattagagagttagccatgctcttatccctaaagaacagtataaacaaagggaaggtccgatgatgatatgatgcttaagccttgcattagtggcatcagagcgcgatttgccttgatcctacacgatgggaacaaaaacaaggtcatactggatgttttttcccactattttcctgcgaaattagcaccatagaaaagatttctccatttttcctatgttccgaatggatgaatatggtaaccatttcccataggaattggaatcttccgtttttccttcaaggatccttcagtccgaatgaaccctaagcaggcatgcatatatgtgatggggagtacctatgcatctttcgaaagaattttataatcatatcacacagatttttaatctttgtattaaaatccaatagatacaataaaagacaaaaagcaactaagaaacaccataatagacactaattaccatatcttcaagaaaaagaccaaatccaatatatatttcaaaacttacatgcgaagattcaaaaattacactgtaatttacaaaagttacaatgtaagtttcataaattacactgtaaatacactataaatttaagtgaaaaaatagagtgagagataagaaaaaaatctttcgagtgagatatagcaaaatcgattctgatgattcaatgtggccgtgacactactttctctgatctcttctccttttctttactataaagttattagtaaatagttaggaaagggtcatctaagaaatacaatactgatgaagaaagtttatatagaaattaatcgtactttaaaaaagtgtggcacaaataatttggtatccagccggggctatatataagaactgaaaaaaaggggccaattaattgtggggccaagagggaagccaggtaatgttgtgtctatttaagcttcgtctcagctggagtctcgcatccatggaaagaggccggccggtaccaagcgggaaaggtttaggagagcttaaggaagacacaagctagctatagctagtgtgcagtgcaactgaactgatctagctcgatcacagttgttatcagttatggtatatcttaattactatactcgtcttcttcctgctactcgatcatatatctactcgtttactagctataattactgttgaggtgtttatatatatatatatatatatatatatatatatatatatatatatatatatatatatatgtgtgtgtgtgtgtgtgtgtgaaaactattctacatccggcgtatagctattatataccccccctctctcctaagggcggctcaacccacctcccctctctttcaagggttcaaaacccacctcccacctcagttaaaagtcggtcaaagcattctcacattgatcaaatcccggtcaagccgcctactaactcctcccaccaaccacctcttctcagctctcgtctcgcagaacggtgcagtaacacgacgatcactatgtcttacgtgtagtaacgaagttcgaatatagttgaaatatagtcatgacggatctactcttgataagtactttttttagcatcatggtgcaaacggttttaaaaaaatatacatcacgtgagagatattgttctttaaacattgattttttggaatttgactctccacaggtagtaatactatagcattcttgttactattttctgttttacgttattacaatcgcatcacgacgttactgtaaaagtgcaatacagattataaattttatagtaacaatgcatcttactgtaattcttgggtagtgttactgtattttttatatagtgttactgcataaatatatggtaacgtgtgtctatcatgtagtaacactttcacttttgtgcagtaacaagtatatttagcatgtaaaacttttatatatgtgtgtattattattaattaatttggcatatatatgcaggatggacgtcgacagccccagcccggaccagctacagtgtggcgaaacatggacgaaaaccaatcgttccggcagcaaatcgatgcccttaacgaaaggataagaatcctggagaggtacattgaagaaaagaagagggaattcgataacctacaacagcaatacgacacgctccggtaagcgcatgcaggatgtcctcgtagatactaaaatgaaagactacgcacatacatgcatgtatgtgcgtagtctttcattttagtatctacatgtgtatatatatatctacgtacgtacgtacctgcatatactatacatacatgcgtgtgtatactccaacctagctagtatgagtgtgaagggagtatactatattatattatttgtgcgaataatgaaactctgcaggcatgctgagcatggcttttgctggagctagctagcatatgttaacatgttcctaaacggatcgaaatcctctaacttactttcatctgcacttatgctcaaagtcagatataaaataaatttgaggttccttttccgtacctaaacccgatcaatcacatgtcttttcctgccttggagctggaagcagaccgattggcaaattaaagtggtcagcgtaaacaaattttgtaaatttgtttgtggctcatggggccccggcaccattggtgaaattgtgttattacc

SEQ ID NO: 16944 - DNA, 10627 bp, Oryza sativa
atatatatatatatatatatatatatatatatatatatatatatatatatatatatatatatatatatatatatatatatatatatatatatatatatatatatataccacctatttgctactaccgggagtagttactctctccgcttactggatcgggttagtggaataacccataatccaataacgggtgggagtattcgattcattagacccggtaacagtcattggcattagtagcgatcgaattgagggcacatagagagggagtagctactcccggtagtagcatataattttcaatatatatatatatatcaataaatttaaatctttagtgctcacaatacgggccgggtgtttttttttttagaaattagctagtgaggttagggattaacagctaatgtctctctttgtgtgctttaatttgtgcttgtgttaaagggacacactagcttataggtacttctgcctatattgacttgtgcactcttgcgtgtctaccttacaatatcacaaaaaattattttatatatttacattaactttggcgtatacttatgaacacctcccgtagctggtgctactgtcgcacctacctttatgctgcaacatccatagccaaatccctgtgatatcacaactacctagctaagaaaatggatctttctcgcgatgggccaggctaaaccatcaagaaaatagggaaaagcatgattaaatatttgagtaaattttgtaaaactataaatattttgatcatactatcacaaaactacatatttaagtagtatattacagcactattgatttaactgttataaaatcagtccaaaatcaccattagaaaccaaacgcaaaagtaacatcataggagaaccaatcaagatgacgacaccgagacacaatatttgttaatgaggtttagcaaaagtctacatgcctatgacactgattacggatactcatttctgatccagcatattacaacgtttcaaagttacaacgaccctctgtcaatgccgccgacaaccgttcccttttgtcgatatgggtacaataggtccgaccttctatgagacgatgcatgcactggatgcctcgtataggacagcatacaactcacgcctcctggtgcctcccaagcgtagagatatcatcgcaataacaagtcactggaatgatctatgtccatgaactcatattgctgtcttatttgctaatcattttgccctgtccactcatccatcatccattttgtatctgacggacagttttggttgttaatttcagagaagaaaaaaaatgggggattgaattgttaccttggataagctcaaagagcacatataaattgtgtacaataggaggaggaaattaaatactaaactgcccttagcatactaactcacacatatatacttaacattattggtgaatctgtttgaatcataatttggcttgtagttagtttatttggccatgccaaattatttagaatagctatcgtatttgttgagttatagatttgggaaccaattaaatatctagacgaagcaggtatatacactatggtctatagagattaggtgcaggtgattgatgggcatgtagccaagatggagaagcagtgatgggggtcacatagtgcatggcctgatgggagtttattggttgttattagctgttcacatggagatatatatatatatatatatatatatatatatatatcaatctaacgttcttttctattttatttttatggctgagttatagcgaccctagaatttagttaatctttatcgttttgcgctaaaaaacggttgtgcttctctacaaaagcgagaaggttatcatttgctagtttactcagaaactagtcgttcgtcgtcatgtaagtacgatatttatcttctttactaatctgctcgtaaattagtcgtttgattccacgaaagtaaattaatcttgaaatcggttccgctagccggttttgatctatcgattttggcggctctgttgattacaccataaatcgttaggtgatctcatattggccatgaaaaagcgtcaatagaatcccagaagacattttcgtagaacgacatgagagcagtaggagaactactcccaagcagagaactactactatacgagtaagggacatcaccttccaattcttcaactgagctgagcaccatcagttctctgtacagtagtaggtgctgtagatattgaagtggaattacagtgttcaattatcgcatcaccatctgagacatgcataaacttttgttcggcaccaggaggcgtgagttgtatgctgtcctattacgaggacacacgaacacacgaacgagaagaaaaactctcaagatgagagagatcgcatttcttgcatattgttcggcacaggaggcatcaggacttaccatgctacatgctttggggagagtaagttacaaaattgccttaattatcaccatttggcttcagttccagtcaaaattttgctctgcgtgcttaaactaaatttagagatcgaacatgctatgaagattatcgaactaatggctactatgtgctaacatgcagtatctgcatagcgcggcgatgactgaaatatttgagcacattggtttatcagagaagcagacaatgtcctctcaaaagaagaatcatggacaattcacccgaggaacacaacgatcagggcctgattaagtcataaacccagtgctcaacaaaatctgcttggtaaagacccatcttccaaaatccatggattataagtgtcaggaataggagagtgctccacgacggttgcaacagtcgggatgccatatatcagtattcagggttgttgtataatactctaccattgccgtgttttactgttgagatcatcacaacgctatcttaagtcctatctggccctgtttgtcacaattttccttccttttgtactcgcacaaaaaaatgggagagggttccctttgtttttcagtccacatgccactaattgctggtgctaaattcaatataacccgcacatcgaccattattgcgcaaggaatcctgcatctgtgtgtgacatggtgatctcactttcatccatcttgtttttttctactcaagagcaattgagcaaagagcagagcaagatgaaaacatgagggcagaacagaagagcaaaacaaagcattttttctgtacttgttttttttttttacataataagtgatgattgagtccgcccaacaagaagcccatatttcaccgggcgatatgttttggcccatactttgccgtcagttttgtgggcccacttaaagtgatgggccgatttaactggcccacgcggtgaaggagcagcccatatatataataaaaaggaataagttcactttaggttcctcaaaattgacattgagtatcaactttgatcttaagacagtatggctcttggttttattcaatactacctttactcttttagaattaatatttgaaaatgtatttgtaaatattgtatgaaataacacaaattaaagttgtatagttgactgaaagtgacatattaattagctttagaaaatttagggccccaatttacattttgttccgggccccaaaatcctgaagacggccctgctgcctgcctactttaagttgtggagaacacaaaacaaatacatgagctgatcatcttcttaatcatatatccttcaaatcatatgcttgattgatgtgccacgttggacgaaaccggaagtcgtactgcattgagaccaaagttgacacgatattgggagttggggaatgaactgtgtctggtatttcggttcaaagatgaatttcatactcgacgttaaattgaaggacctaaagtgaataaaaaaaccaccaatgcctcccaggcctaccactggacaggctcaactccatgagctccccttgttcatagtctctaaatatcaagctacaaaaacattcatgttgctgctacttcatttcatttgcgctttaattgagcaatggagataacatagcatcatacaggaattagtcgttccaggacctgcagctttcttcaatgcgcagttggtttgattctgatgtttgctcatcaaaagcaggggggaaagggtgtagttacacagcattgtgatgaatcaatcaatgtattgaaatggatctcatccacataactgactgagcaatcaacaaattaaataattcactcagtgatacaactctacatcgtcatgtcatcatgtgatgaaacaatcaaatctttaaaggtgtagaagctacgaggggagcaggtgataaacaaattctataatgaaatgcaatattggagcaaagcatgagcagaggggaataggaaatccgttaccatgagttaatccattaatagttagtattacttagcagtttattttgtttcactctaatctcatctttatattgcacatttcttctatcaatacagcacaagcggccctacttgttctccagaaataactcatgaagtttagaagttgcatggcttatttcatggacctacaggtgatcctaaaccaaagaaatgtgtggcttctttcacagatcaccatcgtaacaggacagctcttgattcctcctaagcctaccaccgcaaaaaaacaagccactcggagtgatcgatctccatactacttttctctcatatcttcctcaacccgtgctccttgtcttgtcttttatatgtagagcaaataggacatgatcatatatgaaaattgagggggggggggttcagtactattagaataagtgtcgaatatactagtcctatttgattacagttagacttggagttgtaataggtgttagggggtagagttagagtcggactctgtaacccggcatttctcttaaatagagaaggggcaccacaatgtaaccatgcgactacaacgtagtacacgcagggagatgatggcggcgtggccatggactcatagcggctaggtgctatgttggttggggaggagcgcccataatcagagccccggggatgtaggcttcggctgaacctcgttaaaaaatatcgtgtgttcatgtgtcatcatctggcatgtcttgggtggtcaatgattgaaacgatcgagaaggttagttgtcgttccgctatatcgactaacttttataacaagtacagctgactacaatgctcaatatataaactagaaataggtacactatattagctaggcagtactgaaacaaacagaaagctgagaccaaattaacaaggtgatgattttgatcattgacacagcaatcaacaaatgagatggttggtattatttattctttagcaatccatcagaaaatcattacccgatcatacaactctacaacatctctaatccattccaatcacgatcaagcggaccagattaatcattcgcaagcagaggatgtctctttttcacaaaacaacaacgtgaaaggtgaaagcaggaagctagcacgaacaatttgaggagttcagcaagttataaatcaccagctaaataaactgcatcacatgtacatcattggaagcatctcaacggttactcgggaaaccggacggaggagaagactcgtgctgtgtccttgatgttgaggtgatcatgacctcttggtcttgcgacttggaataagcctacgagatgcagaaactggtcagttgggttgttgctaatatcaaatgaaagaattgcagtgaactactaaaatcagaaacttgactacttgagtgagaagcaaaatggtcagacaagcagcagaagattgcttaccatcggcgcatttgacggctcctgatgtcttccaggcctacctgggctgcctgaaccccatgaactcttcttgatcatcgatctctgataaaaaccaaataatcaatcaagaaaaacaagctgctgctacttcatttcgtctgctgttttatggagcagaggagatagaatgctatcatacaggaattaattgtctgattccatgcaatcactcaagacatgcagccgagatcaatgtgcagctatgcccctgctttgattctgatagttttctgaacaaatccaaagggaagggaaaaataaggaaaataaaaccaaaagtcctgaccatttgtactatatccccactaagttgagactttaatcttggagtacatgttacagaagtaagaaggactaacaagaacaaagagtacaacaaaaaaaaaagattgaaacaaattgaaattttgggccaaatattttcgtgccagtgggtctcggaaattttgaaacgaacttgcaaaccatggttggcagtataagtaagtctagccccttggatttaagatgatgatgggcatggatcacttctactagcagtagagacctctgtaaaatttaccaattttgtgtcaatactaagtaatatttggtctgatgtagctgctcaacaccctcattttttagtacttcaatgtagcacataaatgtatgtccacgtaactgagactggattatctaacattgtgatagatcaatatcccaatacatatatattggtagtgatcaatgagattatggcagaccaataatgaatcattgaattgtactcttcatctcctgctttcaatagtataatgaattttcaccaatgctacttcaccaaactaagaaaaataattttatggttcttaaggagggtactaggaggtacaacactttttcatataaaatttgatacctattagtatctcacgcattaggatgtaccaatttttctaattaaaaatcttggtccctctcagtacctcttaaggactataaaatttctcaattaagaaatgaagcactgaataaagacgtttggatgttctcaaaaaaattaaagatgtttggtttggctgtcatggagaaaggtgaacaatgcatgaaattggtaattgttttttgttcgtgaaattgataattatttggatgaacagaagcatatgctcctaaagtttactctgaccttgtaaggacattttggaaaaatataaacgaacagatggattgaattatgtcttttctgaagttcagctaagtgcatattccaactacagtccaattcatggcatttagacgttcgcgcgcgtgttgttcctcagatgagcttccagttaatgatgggcctagcaggcctgaatgatgcatcaacctaataattgtatcaaattttatagggacaatgaaagaaaatctggatgtaaaatgctgtgagagaaagatataaattgattcctggggcatctctctcatttggttcattgggtatactgaacgctcagccaaaaagcactgcaggtaagcgacctattcacaggacatctcccggtgcctcccatgccgaattaccatggttaaatccaaggtttattttctgccaagaaatttggcatcaatttatcagataatctcattaccacacatcacatctatacatagcactggtttgatcgatcgaaggctgcacgagcacagcagccaagctgcaagcttcaacagcactcgtgctactgatcacaaagcaccgatgtaactcgctggagggcgacgagaagatgatatcaagattaacaacgtcatactaccagttaaaaaaatattcccaccatcccaatttgatcatcgtctttataaagagatttactccagtctaacaaaaagtatctcaaggtatcaatacctcacggtaccaaatcattttcgatcgttagatctaacaatgtccagcttgatccaacgatcggaaacgatttgataccgtgagataccggtatctcgaggtactttttgctggactggagcaaatctcatttataaatgggcatcaagaccaaggcaagaaaacatccttccttaaattaaatcttatcgattaaggtgagcatgtaacgatgctatttactcctgtacagataaatgaattgacatgcagcgatgacattgactcctgctcatataaacaaccagacatgctacaatgctatttaattttgcacaaataaacgaataggcacagttagatgatcatgaatttgggaagacctcaaaaatcttacgagatgatcaatataggatggagggagtagagatgtgtcgggggtattagaggtatttctcatctctattgtactcaatatatgtcattggcgctaactcaatatatacacaacaaatctattccctatttctattattcactagagttaacatggtatcagtgcaccggattcatctgtccagttgacgtcgtcttcttccagctgtgcggcctgaagaagccagcaagatgcagcagcaggtttgctagcatcaaatgatcaagagctcctaccatcaaatgcagaattcagcaaattcgctgtaatagagcagctcctggtgtctcccaagcctactagctagctcccatatcgataaccaactagccattggaatgaacaatctccatctacatgtactcctttatatgtagagcaaacaggagtcaggacatggccgtatctgaaaattgattgttttgttcagtacagctgagctcaatgcataataaaccactagtattattactctgtattagctaggcagtactgatgcaaacagaaaaaaaaactgagaccaaattaacgaggtgacagttctaattggtgccaaatttattttgtgactactaatttatcagataaacaccaataatgtcaggaagtggtgttttgcgtaggaaacccctctttgaagtcgaaatatgtcttttaaaaaagtcgaaatatcctttaactcacctgagaattggaacgctatcatcgatccaagctgtctcattgattgagcatttgagctactggcttataaaccaagaaaaataaagccaaaaaatgaaaataaataattttctagtaagacttttatactgctaagactattcttagcagttcaaaacccaagctgaaaaaaaagggcaaaatcaactttaaaaagttctaaattcaaattttcactattgctccctggtgattcaaatcgtcgccaaccaaatctaaaaaagttaaaaaaaaaactgaagttttcgggcgaaatcgattagtgcaggggggtccgaaatttcagaagacgagatcagattataacaatgtttgccctctgcatttaacaagagatcaaaggatgatggattgatgggaagtctctgtgtctgttttttttctctaatatggacaagattgtgtaagatggcacaccgatccatacagataagcacgattatcagctgaatttcgaacaaaccatgagcaaaaagaactcaactgagatcccctgcagtgcagtactgcagacgacctgcatccaaaagaactgtatcacatgtacaccaccgaattaaatcagtggcatctccaggaaattcttcttgggtgtgactaagtattttataaagtatatttacaacatatttctcatctagagatagtcgaattctgtctggctgtacaatatttaccgtgtagtggattagcaaacaacaaagagagatgtgcaccacacattgccagcgacgacattacccccaatgactaacgtagccggccagctgccgccccaagctgcccatcctcaccaccaacaagccaccttcaaatagtgtaatttgcaactttaccctctcatatccttgattctttggataattattcccttccttgtactatttttaaatgagatggagaaaatagtagggcaaggattcagaagaggagtaaaaatctcagccaccacctatatgggtttgctacattcagttgttcggcagtgtatcaaggtgacatgtgaactcctgatacctcctaggccaacgaacatgaaaatttagtttctagttccatgaacaatgttcctctctctctctctctctctctctctctctctctctctctctctctctctctctctctagcatttgtgtccattgatctatatatcatatgatctaatgccatcatttaaatgcagaacttagctctggaaaaactagagacgtgtaattaatgctaattctttcttgagagtggactatctaacattgtgatagatcaatatctccatatatataaagtggtagtgatcgatgagattatgacagaccaatgaatcattgaattgttctccttcatctcctgctttcaatagtataatgaatgttcaccaatgccacttcaccaaactaagaaaattaattttatggttcttaagaaggctaccgggaggtaccacactttttactttaaaatttaatacctttttgtatctcacgtactaggatttatgagtacaaaatttttgcaccaaaaatctttccctctcggtaactcttaaagactataaagtttctcaattaagaaataaaagctctaaaccaagacatttggatcttctcaaaaaaaattaaagatgtttggtttggctgtcatggagaaaggcaaacaatgcatgaaattagtaattttctttttacgtgaaattgacaattatttggatgaacagaa

SEQ ID NO: 16945 - DNA, 535 bp, Oryza sativa
cgagctcggtacccatgcatttttaattcgagatgtgcactagcaaggaagaaatctttcatccagtgattcttgatatttaagttgttcaaaatgtcactgctagtgcagagagattgtaactctaaccaagcactccagttccaagggtagctgttgacagattccaccagaactgttctagctagagcttcactgcctttatcacgtagaacaatgccatacaagtacaaacaaaatgaatcaatagcaccagttctccgatgtgttgcgagctctctctccaatgcaactagttcctgattaacagcattgcttttgcccagagatccctcaagctcgactgtttcttcctctttccgtttctctccagcctaaattgtagagaaaagaactatgatcaccaagcatgtcaaatttcaaaatgctaattaaactatgaagcaaatgggagacagtttctagtatttagaagattagataacctgtagaggaaaagataaatcatttaatagaatccttccatggataagaa

SEQ ID NO: 16946 - DNA, 710 bp, Oryza sativa
tttgtcgcatttgatccttcctttgttaattgctataccatgtccccttgtaaccacccagttgcgcctcgatactcgtgcactctgtgcaagtatcgacggtcgccttcaaacttaaaatctgagtaacaacttgggtaaaactggagttttacaaaagacttggaaaacccgacacctgggtcggtgcttgcgaactaaatggattttccaaagccgcggaccggggaacgtaccgggtgtacggtttcccgctcttgcacctaaggaccgtttccttggaatttcatccgaacataagacaagtacgaccacatgggtggaatgggacacccctggctgagtaactagcttatcaggggagccttgatgccgagagacatgtggattcgccggggtggtgtcggggaggacccctgggcttcctggcacagtatggtctgggacctaacctgttgttggtctgggacccctctcgtcggcatatggtaaacctgtgtcggctttcgaaatgccttgtcatgaaagcttggaggtcccccggcgtggctgatccccacgggctgggtgacccgggttagtaatgtcatgtgggtaaagtgtaccccctctgcagaggttaacaaactgttcgaacagccgtgcccacggacatgggcggatgtgaggtgattcctagcgtagttttgtttgtctactgcttgtgaaat

SEQ ID NO: 16947 - DNA, 19513 bp, Oryza sativa
gaattgaactcgacgatagatcgggaattgagatcttgagatggcacggacactagacaacaatcaaagaaacaaatttcgcaattagggtttttcggagataattttcccgctaggcgccacgacggaacgggcgctacaggatccatgttaaaaattcccacaattaccacgttctacgctgactgcatgtgccaactgctaccggcaacaaataattcttttctcagttgagttcaactacagtttagacttcgatttttcctctgacatgtgccacagtaaagtatatcaatctcatcgtttggctgtcacaaacggaaaataatttgtgaataaaacttttatatacgtgttcttattgatgtaaaagtaaaaactgaaaaataaactttgataaaaaaacctaaaatcagttttaaatttaaaattaaaaatttaaattttggttgataagtataaggataagcgacaaggcaaggcagtatattccgttctcatttttcatagaatcgattgtagactcactggagcagctattagaaaatgcagctagcttatcaacgggcaccagcaccaccaccttagtcctgccgtcgctatccgcccgtggctggcgccgtaagctgtatcagccacccaagaggcaggcaggaaatatggattatggaataagcgtggaaacgagagtaaccccgaaggcgactgatcggcgatcggtcgatcgatcgggcgagaggaggagagagaccggttgtccattgtggtttctgtcgcgacgaagcatccaagaaagagggagataggcatcgatcatccatcggcatgcgtccgcacgaggtcgtccggcccccatgcccgcgacctcacgctcaatttttcctccacgaatggtcagcacaacacgtgaggatttgtcgaaaagtctatccagaaccctttttttttcattttccttcgtttattgatcggatggatagcgacagcagtttgttcttcctcctctggtcataactcattaatctctctatataggttttggtttgatcattcgttggatccagggggcaggttcagtgcacccagagaatggttgggcccaggcgcagctgggaatccgtttcggtgtccagacggggcaacgcaaaggcaaacatcttcttctgtctttctttctcctttccttttttttttttttaagaaaggaacatctgaactcttcataaactgacaaagttcttcttcgcaattcatccattcagatactattagcgtagtgcaatcaatcgatattgaggtgcaattcgaagttctcaaaaaaaaaaaggtgcaatttgaattactagtaggtgctgagatgcaatgtcaacccctctgaacgtacgacgttgtaaacttctaaactttaatggagaagagcagcgatgacgatctctctctagaagagtccacacctcaagttttactggtggtattaactggcaactggcaagcaggtagtagtactattcaatgacaacgatgctgtcgcgtgtaaatccacgtggcatggtaattttccatgaaatggtagtttgagcatgtggggaagcgtacgagctcaaatcaaattaggaaatcaccctgaagtttcacctgtcgcccctccctctcgattgcgactagattgccgctggtttttcttcaaccgtggagcattgacgggtggagtccggcgagtcatagacgaagaattgaatcactttagattcggtaatctaaagtgaaacaaattcgctttcttgccctctctcgcgtggcggtgtgtcaaacctggaaagtccagtggaaagaatttcgtgcgtgcacacattttaatcgcgttcgtatatgttctgtgagaatagtttcgtccgtcttgttttctcctgcgtcacaattgtcccgtattatctcatacttcatcagtgaataatttcatgagtattgttgactgtagtatatacattagacagggtataagctactaaagaggtgccccgtacgagaaaatctaaaactaattaacacttaactcaaaagctataaaatcatttgtcatgtagttagatgctgacgtttaggctacagtgttgcacccaatccaatcgcaaaacaatttagaaaccattaattaaatcacgtgggggataataacgcaggaaagttcaacgaaaccagaagcgagacgacaaaagacgacgcactcccactctactatatattctggcgcgaacccgactccctccacaattccgctagtccgagtcaaaacaaaatcaaattcaaattcacgggataattcaaagatgctgcttaatccggcgtcgagagaggtggccgcgctggacagcatccggcaccacctcctggaggaggaggaggagacgccggcgacggcgccggcgccgacgcggcggccggtgtactgccggagctcaagcttcggcagcctcgtggccgaccagtggagcgagtcgctgccgttccggcccaacgacgccgaggacatggtcgtgtacggcgccctccgcgacgccttctcctccggctggctccccgacggctcattcgccgccgtcaagccggagtcgcaggactcctacgacgggtcctccatcggcagcttcctcgcgtcgtcgtcgtccgaggcggggacgcccggggaggtgacgtcgacggaggcgacggtgacgccggggatcagggagggcgagggctaggccgtggcggtggcgtcaagggggaagcactaccgcggggtgaggcagcgcccgtggggcaagttcgcggcggagatcagggacccggccaagaacggcgcgcgcgtgtggctcggcacgttcgactccgccgaggaggccgccgtggcgtcggaccgcgccgcctaccgcatgcgcggctcccgcgcgctcctcaacttcccgctccgcatcggctccgagatcgccgccgcggccgccgccgccgccgcgggcaacaagcggccatatcccgacccggcgagctccggctcttcttccccttcatcctcttcctcctcgtcgtcgtcttcctcctccgggtcaccgaagcggaggaagagaggcgaggccgcggccgcgtccatggccatggcactggttccaccaccgccaccaccggcgcaggcaccggtgcagctcgccctcccggcccagccatggttcgccgccggtccgatccagcagctggtgagctaagtggcgatgtggtagtggtagtggtgatttagccatcttgtgcgactgtgcgtgatcgattgctgcttgatgggtcgagcaagttcagaacagagcatcactctctgcagaatagaagaagttcatgaacagagcaatgcactgctccaagaaatgtgacgagttccaggcaatcacgccattgttcttggatgattgcgcagcaccagaaaaaagggaaaaaaaagattgtttgtgaaatgtggtgaggttttgtaagacttgcacaaaatttgagaaaaagaaaaagatcaatacatataaaatcttactagaaaaaagactttctcaaaccgtttctagaagggagaatactctttggtctttggtataacagtcgcacaatcggacattcctttcaaactatagcaggttgctgttttatcgtttagcgaacgtcagatctcattaggctgcgttagagtgagcgagggtgaaacggaaaaaattttcattcttttttcgttttgtggatcttcttctcttttcacttccattcaaacacaccctaatttcaaccatactatgcaaattttattttgaatcaccatttattatatttcaccttctgttattttttaaccaatgttttcaccaaagactagataaatttgtcctttttcactttggactatccaattctcttttaagcatgtgaacgatctcgtcaattcttactcgtcaatgaacttttacaactatatgtaaaatcatttatttagcatatgacaaattgaatgaaataaataaaagaattaaaggtggtctaaaatatcgtatagataaaaaataactgatttaaagtgaaaacatttattaaagggtgatagaaagcgaaacatcaataataaaaagtgatcaaagtaaagtttactcttaattgcaaagagaaggcgcaacaaattctaaatgagacaattgcgaatctccatcatgatgtaacaaacattacatatatcaaaggttgcaaatgaattgtcagttgcaataattaattactaccaagtgagattcagtccaggcttactggggaagtaggtgctagaagttcagagcgttcatctcactggtgcattgatgcaaaaattaaatttatgaaaccatgtttgaccgaaatggaagatagcttgtttgactgataaaccatgggatgagagaggagaggaggtacccattgaaactgaagattttgttggggtcaacagatggagacctgaacctgaacaacaaaatcaaatcgaattagctaatcctacatgtcatagcccttaattaagttaattgcaaaacggtcggcacgtgcaatactggcacgcactagcggattaaccattttttttgaacgcagcgaattaactaatcacccagttgctgactaaaagccgtcgttcggtgcgatctggatggttggtggagcaagagggcaagttgatgagcacaaaggactgaagatattctttgtaattacgccgtataaaatatgattgacaagaaagcggccaaatgcaaggtgtttaaagaactagcccttgtgcttatccatgataatggagtgtcattaacagtttgatgtaataggattgcgtggatttgatcccagtcgtaatcaggtgtcgggcaatatgcccactgcccataacaagttcaaggtgtcgagtaggaacggattaattctctggcttaactgtatgtcagttgcagttgagtaggatctcccttggtgtcgagtagtattgtagtaagacatttttctttgagaaaattttaaaaaataccattaactaatactcaaatccaaaaaatgctatcgatgaatgcgagtttcataaaatgtcatcgcaagaacgattctctcataaataccatcgatgttagggtttcattcatcacacgccgttcaatgtattgttcatcctatagtacttaatgaatgtctgctaaaggagctctaacgacgattgcatttctgggacaaagttacttgtattttgatatttcatgaaactcgtacttattaatagcattttttttaaattaaacgtttgttaatgttattttttggattttttttctttttctttcaccggctacttatgagtttcatagtgctagtgcaatatgactctcacctaaaatcatgcactaacctggtgatgaaaaattgccgaaaaacaatgtatatttatactcggataaacatttagaggccgggtttggatactttgccccacaaacgtgtagaggccgggtttgataatcctttatctaaaaaaaattatactcggataaacagggaaaatgctttggatactttgccccttctcttaagcaagagggtgcagttgcacattggatttggatctcttccaaatttccaagttcacaacagagattactctcgccatcaacctagctagccggtcttagctagttggtgacgcatcaaagtgatggcgacaagtgatgaccagtccatggtggtgcgcacgtgcggggagccgaggccgaggagcaattgattggatatactccctccgtcttaaaaaaaaaaaagcaaactctggatttctgtgtccaactttgactgtccgttttatataaaatttttttataattagtatttttattgttgttagatgataaaccataattaatattttatgcgtgacttgtctttttaatttttttataattttttcaaataagacggacggtcaaacgttagacacgaaaatcagggtttgtctttttcttttttttttgacggagggagtactgatgatcacgaccattgacgggtgctctttgtcatgaggccagccagtaggatccagacacgtggataccctacactcccgtcttgttcccaactagagagaaccaaccggggcaaagaagcaggcagcaatttcaccaaacgttccaaacccaaatcgatcaccaaacgcccaaacccttgtgggcttgttgctgcgctgcacgaggtgttggcttgtttgccgcgcttgggttggtttgtgaattgtgatgattttgcggcttaatgcttctggaaaaagaagcttttccaggtccatttcagtttcagcggtggcatggctagctagctttccagggcagcaaaccgcaaatacggagtagaactgtagaagtgagtaggcgtaatccgtggccagcaatatccgagtcagccgcgcgtaatgagtgcgtggcagggcgcaggacacgcacagcaggcagatcgacgagggtcgaaaaaggacaagtcaagaagcaccagagtgactgggtataaactggatctaaaaaggttgagatgaaatttaatactccctccatcccaaaatataaatattattagcatagttacaatttaaacatttataactttaatcattaatagaaaaaaataaaaaatatcaaacatgtaaaattgatttacattgatgttactagatttatcattaaacaaactatcataatatgtaactctttttatttaaaacatattatttttatagatattgttggtcaaagtagcatctcgtagaccgtgtcagggtataaaaatacttatatttttggacggagggaataggtttttgagctaaaaatatttgagagctaaggtgatttgtgaaagggctcataggctctaaccagttggatggtgtcaaaacttatatatatgtaaaaaaaaagtttgctaattggaagtgattttactttctttttgaaacataaacattcatcaataatgacagatttagtggacaagccctagttgtcagagttagctcctttcaaggtgaaaggtatatatgggcatgtttgaattgaggtcaattgacctaccaatttatttgtttgttttgaattgtacttgctagctatttggattgagaccaaatcttgctaattcagtaaagttgaaaattttggtagtaccaaattttgtctaagtttcaaacactacaaaattttaacaggacttcaaaccaaaacaaacctatatgggctgatgggcttttgattcagaatcgcgaagcgactggtgtagtttagaattttagacaacacatcacacagcgttggatgggagagatatgtttaggaccagagagtatttcacgattcttgagaagaatatgaaaaaacatcttcaccatctccccaaatagaactgagtacgcgaccatcacctagcaggctagcacgatttagaaccatcttcatttagagaactttttataagttatttgctcgctttctattaatccatatgagctactttattttgtctatattcttttttttaatggaaaacatcacagtagtgccttttcattgaatagagcagaagaaaatacaacccctaagggtaaagaaaagaaactttgagctacacactatacaatgtgcgggacgagttcacgcaatcttttagcccccgctagagcccatagactagcctcctccttgattcgtgttagaagaaagcctattgccgcctctttgtggtcgaagatctgccagttcctctccttccagatttctcagacgactagcaggatgagaaatcggaggcccttttttggacgtcgggtgtatttgccaagctctcccaccattggtggactgaccggggttcctcccactcagtcggctccaattgttgatagcccatccaagtagcaactaggtgccaaattctctttctgtatctgcacttgaagacgaggtgcagtcccgtctcagcttcagaacggcagagagggcaatgtccatttttttgccagcctcttgttgcaagccggtcagatgtctagactctattttggataataagccatgcatgaaatttatatttccccggcgcccagactttccagatcagggagtttagacttgagtttggcacccctaaacactgtgcatgataggccgaggaagctgtgtagtgcccattacttgtgaatctccaggcaatctggtccggttcttcactgtctagttgcacattccgaaccgcttcccacaaacggaccagttgctcgacgaggttgattgtgataggcgaggccgcatcgagggtcaggtcattcacctaggcgtcaccctctttcccttggcgcagggattttcttctatttttggagatcccatagacaagtggcatgagatcttttggtctttgcccatcaatccatgcagagtcctagaagcgtgccgtattcctatctccgacggttatctttgtcgaagcagcaaaaaagtccttgtctaatccatcacaaggcatctccagtcccacccacggtttggttgggtccttccattaatatcataacaatcgcaatctcaaggcccttgtgaacttgtccaagtttaggactcccaagccccccccccccggctgatcggcaggcccgtctttgtccaattgactttacatcccccccccaatcgtcaagttagaacatgctattatttcacaaatggacctcaggttggtgcgcaccaacatcgacatataatgtgttggaaataaggagacttgtatggacctgtaacgcacatatgataactttagccatctgcgttgctaatgtataactctatagaggttgatgctagagctattggtgttaacttcttgtacgttgatgccacctttaggtttatgaaaactaaatatgtagatttatgctgctgtgttctgttgtcgacctcttccctatatgcaggccaatcaccataatagctacactaccaagaaggttgacactaacgatttataggtagactctctggttttgatgtcaatgtgaggtccaaacttggaatatattttgtagaattactttttgcaaaggaccaagatgcaaaaatgtcgctcaattcagcaacaatcaaactctactaaagacaagcgtcggtcgtgctcacgtacgcacaacccactaacccatcttcttcctcgctcatccatttcctcggaccaactcggcacggcattatcctctgcgctccgaaccacattaatcacctaccatggattcaggggcgaagccactttgggcggcctgggtgcccaggcaccccccagattcctaaaatttcttagagatgaacaaattttggccctttaggcacccctacagcccaataggaggcacccccaccagaccttgaatcccacgatgccacttattcagcccacgacgcatcagctgcccaactctttttctcctcacgacgacttcgcgagacgcgccgtatacgccgacgcagcgacgcatcgactgcctgcccttcctcccgactcccgagtcgcgacgccgacgcccggagcgagccgctgcccacgaagacaggactgcacgaagacgaagccgctgcccacgaagacgcatcagctgcgcgtgcgacgatcgtggctgcctgcctgcctgcctgcctcgccggcgttcgacttcgacgatcgacgttcatctgatcatctcgccgatctcgtcctcgtcagcgtcaaagactcaaagagccgctgcctgctgctcgactaactagagtgagtgttcgtcctctgtcctcaaggatcatctcgccgatctcgtcctcaattaattttttctcttttgtgaactgcaatttatttatacaaaataatgaattataggtagccatggagaggttttataaacctaaacggaaagctcaagatatgatcgatggtaacggaacttcatgtccggaagagatcaattgggatgaggagattaaatatgatcccggattgaggaaagaaattgatgcttaccatcctaaccacagagaaaaggtgagaagaaaatacttggagaatggaccttgtcagcctcgcacatttgattttcctattacacaacttggggggaaagagaaacctagaagatttaatccagaatggtttgatgagttctcttggcttgaatacagtaaggaaaaggatagagcatattgcttttattgtttcttgtttagagaaaagaaagatccaggatatgatgcatttgttgtcaacggttggaatgggtatcataggaaagaaaggctaagatcacatgttggtgaggttggtggtttacactataatgcaatgaagaaatgtgatgctttgagaaatagaaagcaacacatagatgttgcttataatcagataagtgaagttgctaagaaggcctattttattcggttgaatggttccattgatacagctagagtattgttgaagcaaggattgccttttcgtggccatgatgagtcaaaagaatcctacaatagagggaattttaaggagttctatgattgcttagcagaacatgatccaattttacacaaagccgtgactacaaatgctgcaaagaatagttgtttgtatgctcctgaaattcagagggacattgctgaatgttttgcaaatgagattgtacagtctatcctggatgatcttggggatgatttcttttgcttgctagttgatgagtcaagagatgtttcttgcaaagaacaaatggctgtggtcttgaggtatgttgacaaatttgggatggtgaaagagagcttcgttggccttgtccatgtgactgaaacaagttctgcccacctcaagtcagccattgattctcttcttgcaaagtttaaactaagtttaaagcaatgtcgaggccaaggatatgatggtgctagcaacatgcgaggtgagttcaatgggttgcagtcattgatcatgagagatagcaaatcagcttattatgtgcattgctttgctcatcaacttcaattagttattgtggcaaccgtgagaaaacataagggcgttagcaattttttaaatatgatttctatcttattaaatgtggtgggtgggtcagctaagagaagggacatgattagagatatcaatcatgaacaagtgcagcaagcattaggttgtgggcaacttgagaccgggacagggttaaatcaagagcaatgtcttcaaagacctggagatactagatggagttctcattataaaactctgaaaagtttgcttaatatgttccctacaatagttcaagtgctcaaggttgttgagaaggatgacagagattggaaaaatagagatcaagcatcaaatcttttggtatacttccaatcttttgactttgtattttatttgcacctcatgttgactacattagctgccacaaatacattgtcgcaagcattgcaacgcaaggatcaagacattgtaaatgccattggatgtctgaaatcaactaaactccatttggatgatcttagaacaaatggttgggaaaagttattagatgatgtgaatcagttttgtgacttgtatgaaattgatatgatggaaatggaaagtacatatgttgatcccagacaacctaggaaaaaatcaggaattacaaacaagcatcactatgcagtggattgctttaatgatgttattgattggttggttcaagagcttgatagccgttttagtgagacaaccactcaattgcttgtttgctcagccgctttcaacccaagagactcatttcatgctttcgatggagagacttttatgagcttagcaaaactatatcctgatgatttcaacaatgatgatctgagggaccttagacatgaccttcgcctttacattggtgatgtgagagaagacaacgaattctccaacataaacactattgctgagctatctcaaaagatggtacagacaggaaaacatcaagtgtatagattggtctatcgacttttgaagcttgtgctagtattgcctgtcgctacagcaacagttgagagatgtttttcgggcatgaagattgtaaaaacaagcttggctaatcgtatgggtgatcaacaattgagtcatagacttatttgctatatagagaaagaggaaatgaaaaaagttagcaatgaggctgtggttcatcgtttcatgaccatggaaggaaaagggcgcaaatatgatctctaagaagtaacacaaatgcaatgcacctactttcgattgataattgtacatttttttttgctaaatgattgacctatttgttctctttttttaggatccatcacatattttgttataagggacatctttgtgcaccacaatcatcaatggtgtattcttttattaatagtgagtattattgtccattcccctactagtttactaatattttcacgaaagtcactttgccattactgaaagtttaattttgatgttaaaaattatgtgttagctatactatttgcttgaacatcacaaaagacattatagtcttgataaagttaggcaccccccacccatttgctctagcttcgccactgcatggatttgcttcgtgtctcagtaaacaccaaccgccacgcacccacaccaagtcaccaactcctcctcggtcctcgccttttctcctcctggcgaaagagctgccttatctagcttccacttccctcgtcgtcattcgtcaacccggccgaccagaagcattccagaagctaattgagcaagcagtgatagagaacaaaacagcggcaaaagattgcaaaaaatcgctttagaaacatagcattaccgcgataattcatccgtgtgtgtgtggattcaaatgccagcctttgtgaaaggtgcggcgccacgcaattcaagcctttttttcacaaagcagacgcactgagacgcgaaagccgggggacagaaggggaacagtggaaggtgacaccgggacacgtacgcaggtccgcgggagctagggataagcgtcgccgtgtttctgtacgtacgtacgtagatccttcgcgcgggtgagtcagtcggtcgatcggtgatgagatcctctcctttttccagttttttctcgacgagccgagccgacagcccacgattcagttcgcaaaggtatcagcgattcagcgtcgacgagacgatgactcggcgagcgaggccgacgaccagtgactgcatggagtgtacactgcaaatggaaatcgggctctttactactcctacctatggtcgaatgatttataactggaataaaaactgagttagccacgtggccgcatggaagcaggcatgagttaacggaatccctaaaatgcatgtgtcgcgttctagttcgtatctacgcacctgaatatgcgacatgctccttcctcctccttttcccaccgccctttcctatcattcgatcttcttttgcctttcttttgttcgttctccattgtgctgtgtccataaacaacaacgcgacgcggccattccgacgagagcgccgataccgataagtacgtgccatctttgacgccacactacactacacctagctcgcctaaaacctatacttagcttaattagcttccctcttgctccatcaaatcacctcccatatttagtcccacatcgaccgcgcaactccactccatccgacctaagactcgatcgatcgggagtgtcgcgcttgcttcccacgccggccgacgaacagaaggaaaccggcagtgatatatatatgggcgccgtagcgtcgcgcgggcaggaggacgccgcgcgggtggccgcggggcgggagcacatgaagcggtgcagggagaggcggcggctgatgcgggaggcggtgcggctgcggcgccacctcgcggcctcgcacgccgcgtacctccggtcgctcacccacgccgcgtccgcgctctcccgcttcgcggtcggcgagccgctcccggtgtccgaccacgccccgcccgccgtgatcgtccaccgccccgtcgtcgcgccctccacgccgccgccgctcctccgctccatcgagcagcagcagcagctgcggcggcgcgcgcaggagttggaggaggaggtcggcgctgctgttgatgatcatcttgttggcggcggggccggggtgccgtcggtcacgcgagaggaaggcggcggtgatgaggagctgaggatggtggtgaggcaccgtagcctcgcggaggtcgcggcggggttggaggagtacttcctcaaggccagcgtcgccggcgacgccgtgtcgagccacctcgaggccagcaacgacgagttcaagcgtaagccactagcaactctacttaattcgcacattcacatttactgtacatgtggccactgcctcactggccaatacaaaggtgtgacattatgatcagttgatcacttaaaagtaaacactgacagagagcatgagttgcagagcagaaagttttcttgccactgatcaccaccaaatgaattgattttgttgcaggtggaccgcacagcatcttgggcgcgctttgctgcctgtcggcgccgtcggttgcgcacgaccgcgtcgacagcatcaatggcgagcagaggcatagctccaacttgcagcagctgctggcctgggagaagaagctgtatcgagaggtcaaggtaatgacaaaataccaaaaaacacatggtcgaatcaaaactactagccgtcataccgtacgtattaccgtgcgtgttgtaacttgtatggccagtagagtgatttgacgttgcaatgcaggcgagagagcggctgcaggtccagcacgacaagaagaaggcggagctgagtgaccaggagtacagcaggaagatcgacgtggacgtcctgaagctcaaggccgcgtgggagaaggcgcgcgcgcagctcacgacggcctcgcaggccgtggccgcgacctccgcgtccatcgcggagctccgcgacacgcacctggcgcgccagctgctggggctctgccacgccacgctcgacatgtggagggcgatgcggcagcaccacgaggcgcagggcctgatcgcgcagcagctgcgcgggctcagcagccggacgtccatggaccccacgacggagatccactacgagaccacgcgggcgctcgaggtcgccatgtcgtcatggtgcgccgccctgggccacctggccaagcaccagcgcgactacgtccacgcgctgcacggctggctcaagctgacgctgcaggaggcgccggccgtcgtcgacggcgccgaggcggtggcctcccccgtcgccgccgagctcgccgccttcgtcgagcggtgggggcaggcgctcgaccgcgtgcactgcgccgacgtgctcaagtcgatcaagagcttcgccggcgccgtccggtcgctgtacggtctccagagcgacgagctgcgggtagcgcggcgcgtcagccagtactcccgcgagctcgaccgcaagtcgcggatgctgcggcaggtggagaagagctactacgactcgtacgtgccgccgatgggcctctcgctgtggcaccgggggatgaggcattggggggacgacggcatgcacgcgcgcgacgcgagcaacgaggtggcgcagcggagggacgagatagcggcgtgccggaggacggtggaggacgagatgcggaagcacgccaaggccatcgacgcgacgaggtccgcggcggtgacctgtgtgcaggggaagctgcccgccgtgttccagtcgatggccgtgttctcggcgtcgctcgcgcacgcgctggaggccgtgtgccggcatggcacccatgtgcagtagttagctacacatagacacagttcattcgtttgagtcggccatctccatttcctttttccattttacttatctatacgaccatacagtatacactatacaccaaagatatactccgtatacacgaaaccctgctaggatgtaggaatgtataaagactaaataaaaatcaaggccctactgagtttttacttttgaccactagatagggcttgggacctttggaaagggggggggggcatacgggttttattttagggaaaattgaaaccatgccattataatttggataagcttgacattgtgatccgttcatcttgcatcgatgtataaaaacgacaaggaaatcatgtataaatcgctctagtaactaagtactccattcaaaaccaaaacaggaagattttaaatctgtgataacctctcgattgacaaaacgtgaatacatcatccaaacacattggtctatgatctaaaacccctgcaaagagcaagcaaactacttttattcaactgtagttcctcatttttcccccttcggtagtatgcctatggaaatgaaaaaggtctaacgctcatttatcttacacaactttcgaaagagccatgacgttgaagttcattgagtcagggttggacgcaattctggctttgatgacttttgcagcatcctgagaagaaatcaaagcaaattaaacttcactcatggttaaatatcaaaagaagaagaagaagaaattagaaaatacaccctaaatccatggatcataagcattccgaatgtaaaaatgctaaaagttaagttcagtgcatatacattttagcttgtgcccccctaagcaaatataatgtataagttccatttgacaaataattacgattattcatttcacaaaaaaaactgcttgcactaaaataagggtagaaatagaatgtacaagaatcatttcaaaacaataggtgataaacaagcaagatacaagaaaaatgcaaaatttgagacctgtaacaaagtatctggtgatgaagggccatgacatattggttgcgattttcgtccatcaagctcataaagttcacctgttgcatgccaaaaaataaaatgttgggaacagattattgatagttgaaactaggatttgttttttgagtaaaggcagtcggatacccaccatcaacacaagagaaacatacaaagtgctcgttcacctcaacattagcctgcaaaggaaagatgattaggatggcagcaacattaaggactatatcatggatatgggcaattagtaacatttcttatcttctcccttttcttttggctaaaggaggttggtccacaagtgcacttatgtggtactgtggtagcatatttggttattcattgtaattgtgatttaaagcaatcctgttataacttataagaacatccctcgtaagttcaattctgcaatatgagcttgtaaaccgagggcaggaagactctagtataatggcatcctaccagcagcatttaccatctcaaggagttattcgaattaaaacagtaagaaattatgatggcaagagataaatttatctaatctactcaacatgatgttgtttaaaactgtattacaaaagtgaacatatagaaaaggggcatgcgagtggttacatcagtgtcgccagccgaagcagcaacggaatgagcatcctccatctcatcatcctcctcaagaaaggcagcacgctgaagacaacaagaactgttcatattaggataacaaaaaagtttattagtgattaacacaatgaatttaacatacagacattacctggactggatccatatcaacagtttgtttataaaatctatcaaaataggatccctcaactgcaaagaagaaagcagacatcagatcttgttacaaataaaaacagtaagaataagactaaacaaattaggtcatacatccatgtttaagccaacaaattaaagggcagcccaataaccataaattgattaagcatgccaaatttctcctagacatgctggttgtctaatatcaatgtccttgtaccattttttcacatcatcgcatcaaagatgtgtacatttcagtaagaaagcaaaatggggaacactatgaagtatcacaaatcaagcaactatattttgctgaagaaggagactgagaagtgaggacagaatagacatggataccttttcttttagaacaacaggcatggatacttgctttttactgttcaagcaaactaacataattggatgaatatgaatcccttgagcaaccttttaaaatatctattggattatttctatctgatagtttttccttatttactactatatagagagcactttaggacagttaatgactcaatattaactaaccggaggtactagctaagcgtggatacaaagctaaagtaattacccagcttgagtttggatgcagcattccctattgcatggataacaccaactgttccgcatgcgttgccaacagtctgctttgtaaagtataccctcttgctcaaatcctgcatatcaaggtattgggttaagaaaatgaagggtatataaagttccaagtaataaataatttaaaatgtgcacatttcaaactggtaaacttcaaattggcatcgtgcattgagtgaaagtagatatccaacatatcatatacgtcaacactcaacccatttaatatgccagatgaaggaaacagaaaccaacaccctaaaaaagggaaagcaggctagtatttctcaattagaatatgaatatggaacaatattaatgaaccaaaaactgaatgcagtacataccataaaagtctcctagtaaaatgaaagctgaaccatagtttcacagtgagtgcaattttttatgcactccctaagaaaaataatggtcaggacaaggaacatgcacaacaatcaggccatcagacaatctatacaatcatcacagttttactataaattctgccacatcttgtatatgtgacaaaatgctttttctgcaaataaaacagcatcttaaccagttgtggaacatctaacttgactcatgactatggtgaagtgactctacatcaggtcatctgcagtagttgtagagtcatactgtacaaattaagatgcagtagttgtagaatcacttgcatgaggattgaacttccacatcaagatataacatgagaattggaactgcagtacatccatagcagcatgtcaattgacaattgatttatagttcaaaaagaaacataaattaggcaattgatctaaaattgattgggcacacagatttaagtgatacagtgtagcatatcatgtttacaaattccaagttacaaaggatagttaagtccattgaccatttgcatgcatcctcattttttttacatagcacagtagttgtatctataagtactgcaagagaatcaatactacagcaaatccattacaaaaatagaaaggaggagaggaccatgtttactgcagagagtagccacacacccaggtgttctgtattgttagtaaaaggctaaaagcacattgatgcaacctataatgtaaaagaaatttcac

SEQ ID NO: 16948 - DNA, 1227 bp, Oryza sativa
tcccatattcatattgatgttaatgaatctagatagatatatatgtctagattcattaacatcaatatgaatgtgggaaatgctagaatgacttacattgtgaaacggagggagtattcaaaaacagccatctctggagttcacttgatggtactgagagaagaaggcactcttgcatttcatgatatagtaatactgaggttcaatgtcctgggtacctcagaactaacacatctagttcagcaaattctacaatagtagattcaactagcaaaatttccagtacagtaatagtgcaatcctgtgtggatagagtgaaatatcacaaatcaaacaagcatacaaattcatacacaacattcagtaaaagagaacaactacttaaaactttacaaacagaggtcaccgaaaccaatatatcactacacaacattaattttacagagtaataaaatgtatgcataaaaaagaaggccaaacaccaatcaaactgtgaaagacctatctgaatcctgatcccgtgcagtaactttaactggaataacaaatccaatccacaaaacagtctaactcaattgctcaaaccgaggacaattccgtaacaaatccgatgcacaatttgtagttcagtgcatgtacaccacaatgtatcaaaccgaggcaagactatcgagcacattggatgcgctatgcggcaaaaacaaaacagatgggtacagccgtaccttgtccccagccgtggaagtggcagcagcgcctgattcctcctcgtcgtcgtcctgatcaccccacgaagcagcattcatcaccctctcgacaccacgtaaatccacaaaaacctcgaagcggaagcagaacgcgagggtgggaacttaccagggaagtgagcgggtagaggaagaggacggcgagcacgggctggggcaccatggcgagcagctcgtcgtcgaggccgtagacgtcgcagaactgcgcctccccctcggcgactcccagcccccacatgaactgcgcgacacgagcggaggcgccaaccccgcgacgaccggtgaggcggtgagtgtggaagaggaggaggaagaagaaaagaagagcgcgcgggaaaccctagcgatggacgcgagggcggcggaggagagagaggcgctcacctggttcatgacgtcggggttggcctcgagagggatccaccgcttccccatcttctcggcacgcggcgaggaggag

SEQ ID NO: 16949 - DNA, 10684 bp, Oryza sativa
tccatccgtccaaaaagaaactcaattcaaaaaagatgtgagaaaaaaaaaatcaattacacagtttacattgcgagataaatcttttagagagaatcacttatatgccactaaaaattgatttgattccttatatgctattgaaaattggttcttcccttatatgccattaatctaaatttgcacaccctatcatgctactcccgtcagttggccgttaattttcaagaaaaaaagacgtatttacccttttgagtatagggcatgcctaacaactcagagagggtaaatatgtcttttttacttgagagttaacggtcaacacatggtcaattgatggtagtggcatgagagggtgtacaaatttggaccaatgatatataagagaatagccaattttcagtggcatataagggatcagaccaatttccagtggcatataagggattatctcaatcttttaagcataattacgccatgatattacaacgtgatgctacagtaaacattttctaatgatttgttttgttattagtctatatttaatacttcaaatgtgtgtcagtatacttcaaagtttttacacccaaataactaagcacacccatagacagaataactgattaaaaaacatgaatttatttatattattgaagtgaattgtacttcttacctacttgtactcacccatcccctacgagtgtgtttgcataatgggaaatgggggtgggattgggattgggaaataaatgaagggttaggattaaatggaagggggagaatgaatagttagaatttaaagatgggtgggaaattatttccttttcccatttgccaaacactacctattcggttaaacaagtgaccaagagtaggagattgcttaataacacatacttaagccagaaaaacataagtatgaaataatatagcggatgttaaatcttataaccgaaccgaacccggggtttaaaaaaacggaaccaatgtctagtccgacgatataattaacttgagaaccaaaggaaaaatgagctaatataattaacttgagaaaaatcatttaaaccaaatgattttctactgaaccaaagtaaaaatgagctggcttgattaaatccccgatgtacaaggtctgtattttttaaaaccctacctaattcttaaatattttcataccagaaatatataaaaagtgagcacatggcaaaaaagttgggcccgttactacctttactgcatacatgcatgcgcgcctgactatttgggctagtcgctacaatagttttagaaacgaaacaaatatatttttatgtgttgattaaatcaaaattctcaataaaatacactagtactcaacgttacttattttattgaaccggtcggattcaccggttggaacacaggtcgggttcagagtggcaatcagtaggtcgtcccagggccagcgccgatccccatccgtcccgcgagcaagcagaggcggcgccgtcgctcgtcctgctgcttccgccgcatcctccgccaccgccgcctgggccgatcccccaaccgtcccgcgagcgagcgagcgagcgagcaggggcgccgtcgttcgtcctgcttcttccgccgcttcctggttagcacatcctctttcccatctctctctacccaagcactctttatatatatatatatatatcgaatttgcgttaaccctagcttctgttctagaaatttgccttaaccttcacactaataacagtttgtttgttcccaaaaagtttgggggttcatctgaatccccatgtcccatgttagatccgcccatgttgccgcctgctgcgtgttgggaacctgctaggttaattgttcactaacagctagtagtagcatgaaaacactctcgtgcttccctgttgctaagcgatcttcttgactcaataagagagagtcatgtcttgattgctagggcatgtctggttgtttgctgattcgggctatagctcgccgaggtaaaccgaagcgaacctttccttggaaagctatttggttggtttgctttgcacactagcttttcactcggttttgcataaaacttgtgcgagagacgagcttgccatcaaaggcgagccaaatgggctctcctgcgcgagccagttttttcttgcgcgatatggcttgatttttttactgctaccaaatgcctctcctcactgggcaaggcttagatccaaacgagcacgtgctgtcttgtaccatattgttcaagtagccatgcactgaagtctgttggtaccctggtagaggtgaccagactgtggagaggggtcaatatttagaaatgaatttatttggtgctaaacttacccaaaaatagatgcccttttacaatacattcaatcaaaccttaaaaaccttgtccaccaataatacccaaaaatagatttgttatgcgaaaactgcatatgattaaaaaacaattgttccttaaactgcatttgcacacctgtgtgctttgagttggtctcttgttttctttgctttttaaaacttgatgtccattttacttgcaggttgctgttcctatggacttcacatatcatatcttttgaatattgtgatcaccccattttcttgttgagggtacatgaataatctccatttttgcatttcaggtactttaccccagaatagcagtgatgtgtcaaaatctatagttggtcaggtgcaagcagaagagcaggaaggaaatggccaggcaaaccaacaagcagtgcagcaacatatgattttagcaggccagttgtctcagccaaaatcgttaactgaaggtttggaaaataatgtctacccaattaacggaacacgatcaccagccagaacaagaaccaccacattctgaaaaccatctgaaacaggcagagccaaacagcttccagttcgctgaaaaggaaacaggctatgctggtctacagaatttcacaggccccaaggtggatgtgggtcagacttcaggagagcagcagcatgtaaaacagatggtcggtcagcaagcaccacctggtgcacaggacgcaaggaagcggggataccaaccgtctataccatttaatatgttgattccaatcctacaggctcatcttgacagagacaaggatatgcagcttcaaactgtgtgggcaaaacttagggtgcgcttttgtctcactcctctgttgttagctgctgtttttcatcaatttgattggctagggaaactacacagccttgttgaggcgaagtggggagcaaagttaacctgcttcgcacatctattaatttgttcaaagttatatatcctctatgttgttaatatcgttgttagacttctaaaatttgttgctaaaattaggacttagggcgtgtttggtttgtggccgaacccaaccaagccaaaagaaagacatctatttggtttgtggccaaaaaattggcattgccaaattatttcgcttagtacactacataaatgcaactttggtagtaaaccaaacaaaagcctagccaattattgccatttttaatccatttgaataaaagaggcgcctgggatctttttttttctttttttttttggggggggggagggtgagataaatgaatgctagcaaagatgcctcatcatttaaaatggagtttgcaccatttccactgaaatgaaactaactcagctgtaccattctatgtttgtagcgtaatgaagttcataaagatgatttcttgagagttatcaggaacatcgttggagatcaaatgctaaagcaagcagcccataaagtttttgcacaggtgaacggattgtgttaacttcattgctgccatttgtttccctgataactgtttaataaatatcaatcaagtttgatgaaagtgaagtcactcttaattgtcatgttggacgagagatcactgagtaggaaatatctttatttaatttgttttcagatgcaagcccaggcacagagaagtggccaggcaaatgcaaatcagcaggctaatgcaaatcagtattctttacaatcccaagtatcttccagcggttcagctcaattacatgatcagcaagttcacgtgtccaccacacctaatcagggccaaaaaaaccaagcattgtcttcatcccaaacctttgtgcaatctggcactcaggtgcagagcagtatgactgctcatgataattccatccaacggccagatgcaaagggaatgcatgttacgccgaaccgacctcctgttatgaactcagcaatttctgcacaaacaatgaacaaacagcagcaacccacacaagtccagcaagcctcacagcaaatatatggaacaactaatcgccctgaccagccatacactaggccaatcggtggttcaacacctcttagctcactgagttcagaatcagaaataaggccttcctctcatcctgcaaaaatggagattcttccttctcatccaatgacacaacaaaatgcagctgcgcagcaaatgcaacagaacaaggatgtgaagactaatgcttctaatccaaggagtaatgcaaagcaagattcggggacaggtaagggtcgtgcagttggcactggaggttcttcaacgaaatcgcaagggaagcaggtaattcaattcctgcatcatctcacctatctgtcttatgatatattcaaatcaaatttccagattcatatgcaacccaattcctcgatccatctaaatagtctgaattaccaataattttcatttatgcaattccccatgttacaaagggatagttacatgcataaaaaaattcctacaagtttatttgcattccatcacaattagtttttgttggactcaacacaattaattttgatgaacgccataataaacggaaatgatcaatgttagtgagatctgatgccataattcttcaggtagaagattgatcaaacttacctaggatagcctgcacttgattgtatcaatatcttggaggaatggaaatatgtagtaccagaacagagaacctccactgttttgaagttttaatttttgctgttacactaagttgcatacaaattcactcagtaattgccctttttatttgctcatacgaccactcttatcattttgagaatgtggccatctgtagtacatcccgctgttacatgcagggttatttcattgttatcaaggtgtttactaagtagtggccacttgccccaccatctgacacctcacctgggtccctgtgtctggacagggccttaacacctgacacaaaaaataggggatgggggattggttcatggagagggctaaacattagtcacaacttttgggatctttgtttttctgccatttctcttttctcaatctatttcactccagtttcctctactttctgctgcatcctggtcaaccaggtgatggcttgagtgcttttttttttgtgaaggccttattatcctatgaaaataattttgtgaaggccttatttctgaggagtaacatgtgatttagtcagaaaatggctgaaagtgtatttggttgatttccagttgtatggctatgcatgcatacttcaataggttcacagcaaccatgaaactattatatgccttctcacatgtagctgtacgtataattatctgactggactgtcagggcccccctaacttttccacacctcccgctgcaaagagtaacaagaaaactgctgggcagaagaagtcattggaaacatcaggctctacaccaccccctcctaggtttttgtagttcatttcaccccatatgctctttcattagcagattgttcagtacattcaatttttggataatcctaaggtgatttcctttttgtcactagcaaaaagcagaagacttctggaaccttccaagaacaaagcttcgatcaactaaatgatgtcacggctgttagtggtgttaatcttagggtacgcatctccctctatgattctcatttgatgtttgttttatttttgtatatcctctttatattccatcactgttttactttaacaggaagaagaagaacagctactctctgccccaaaggaagagagctgggcctcagaagaagcaaggaaaattgcacaggaagaagatggcaagctttttctgcagaaaggcccacttctgaagaaactagcagcaatcggttaggaccttggaatttcatattgacactgtaaaacaatattacatggcaatatatactatcgaagcaatactaactgatgaaacatttttcacagttcctaaatgcaatttgaagagcattggtggtgatgttgagcattgtttatcaatggtgagctattcatatgattgtccttaagaattttttcagagtaatgcagtatatctaacataaatgccttcagtgcgtggaggagcgattgcgaagatttatcagtactctcataagagtttcaaagcaggttattttacacaacattcaattactaaatttatggtattgttgttattttgatgtactaaccatgattttcttattgctagagaattgacacagaaaagtctggccatcaactagttataacatcagatgttggccggcaaattttgcggatgaaccagaaagctaaggaagaatgggataaaaaacaagcagaggaaacagacaagaacaagaaacaaaatgaggtgttccataatatctatgttatttgcttgtgtacaattttgcatgacatgcttgttccgttgaactatcatgttattactatggcacatcatcttcagttatttatcactacctttatgctgtcctaagtcctaaattattatttgttgttcttttatccatttttatactgaaatatctaaacacctctctctctctctctctctctctcacacacacacacatgcatgcctaccccgcacacatcccacactctcctgtacaacttatcccaaaggaaaactgaacgatttaattaatatatttctattttcaattttgacacgaaacagtttataagcagcttcacatgaaaagggactgtagcagatttctttgtcttctcactgttgaagatcatacattttttatggttacgaaaggtccatcaagttgcgatgttgcagttagtcattctaattaaccatatccttacacacaggttgacggcggtggcactgtggaattagacaaggaaaaggaggaaactcgttcaaagaatgcaaaggtaactttactaatgtgatatttaggtttggtggcagcccttgttttcctaatatgcttgacctgtagcccaacaaagaagaagatgacaagatgagaacaacagctgcaaatgttgccgcccgacaggctgttggaggaagtgatatgctgtccaaatggcaactgatggctgaacaagctagacagaaacgcgaaggccttgatctggctgcttcttcacagcgcgggacagcttccaggtcgcatatggctgggaaaggtcccacagatcaccacgaagcttcgaagaggacccattctgcagcgtttggaactggtaaatcagcaaccttgcattgatttatttcccgccctttcatattatgctagaaaaagctgcaacttcagtatccatgtcatattgctattgcaggaggcatgaacaggcaaggcaggggtaaatatgcagcgtctcatccaaaaggaccacaaagacctatttctatgaagaatgtaatatgtgtcctcgagagggaacctcagatggcaaaatcgcggttgatatatcggctctatgagcggttgcctgtagattccaccagagattaggcttgaatcgtcatttatttggtgtatgtatgcacatttgtgtaacaatatcgagctataacttattgttcacttccttccattttctctggtttggagttgcgaggtgtgggtgggtgtgttgggggaggggggggggggacaaaactagtgttacaagttagctgacatggtactcttagaatatgaacacataagatgtacttccaaacaaatggtcatgtaaagattatacagtgtaacagatggcaagattgcccattgctgcctgctggtgcatgcgcttgctcattgtactgttataattcagtgagataatttggagaaatccattgttctgatttatttctttccctgggttccagagtgttggatacattgcgcactaaaatcgcgctaaatctaacactggttacattgatccaggaaggaacactgcatgcaaaactacaatgagacaccacacctaaaatgcacacactagtgagactgggcattcagcaactcattcataatctaaaagaattcgaagtcgaggtatttcccgccggacctgacctcggcgccgaccacccttttgccgcctccgccgccgttcgccacgggttggccacgccgtacttggccggcagctcggcctcgacatgcctgggcacctcgggaggcgtgctgcaccggatgagcgcccagttgacgccctcgaagaggggtgctgcttgatctcggcggcgccacgcttcacgccgagccgctgctgcggctctttcaccaggaggcccctgatgaggtccctcccggcgtagctcgtcgacggcgactccgggaaccgcagctgctgcccgaccacgttgaacagcgtggcgcggttgcccgaccccttgaacggcgtcttgccgtagaggagctcgtggaggaagatgccgaacgtccaccagtccacggcgctgccgtggccttcccccttgatgatctccggcgccaggtactcgtgcgtccccacgaaggacattgaccgcgccgacgtcggctcggcgacgagctccggcagggcggcgccaccgccctgccccaactcggacctcggcctccggccctgcttcttgctcctctggccgaacagcttgggcatgaagcacgccggctggatgcacaccgaagaaggctccatgcaagcaggctgcacgcagaacgaaccgccggctctcctgggatcggagtcggacgccgacgctctgatgagcgtcggcgacaccgcgcaccgcagagagaggtcgaagtcggagagcatgatgtggccgtcatcgcgcaccaggacgttctccggcttcaggtcccggtagacgacgcccagcatgtgcaggtactccagagctaggagcacctcagcggcgtaaaacctgatcagttttgcacattccaattcctatcagtacttcaactagcagacagtactatgggatggttaaagaagatgacaagaatcagagtatatgctaagcattattactagcagttattgcaagtttgcaacacaagaagttaccaagcagaagaacacagctgtgcattctaaattgtcatgccatcggatgccaaaactatactgcatgtactattgcatactatgtcccaatcaatgcagattgatgtgtaaacatcagggaccctgtgttcataaatactgtagtactgtactccatggctgttagtctggagagaatatttcagcaggccaatttctcaaatatccatcactaaaaaaacaattaatagttcaagaaaattaatgtatcatgggtacaactgttgttaagatggcattgaatttgaataccaacattaaaggagtgctaactaacatgtcaagataaatggcatagaatcataggcaaatttgctcaagaaattcaccttgctgcatattcagagaaatgctttcgtggctgccgttgccgcagagtgtgcagatcaccacccggacagaattccatgaccagacatgagaacctgtcagtctcaaagtgtgtgtacagagttggaaggaatgggtgatccaaaagctgcagaatttccctttcagtttgagctctgttcaacttctttcggcttgctaaggacgccttgtccattactttcatcgcaaagtagcaccttgtcccactcaactctgagaggtagacgctgccaatgtcaccacagccaagacgcttgagcaatctaaaatggctcatcccaaggacattgccccgaccccggacagctagaatagccctccatctaggatcattgcccttgtgaggcttgttagcacttcctgtgatgttactccagttgctgtcatcgctaacgccactactatcactcgctcgactcatgctggtctttgtgctttccattgagttgcctcgggtgctatcctttgcgctctcacatgtcttctccacggtaaggatggattcactagttagaactccacttctacatgtgcttgtggatcttcccctgatgcttgtggcagcgaccgcaccagtgctgtcactgctactgtgtgggctgacattgccactgggagggaaggaggcatcccagacgcaatccttctcctccgaggcctgagttgaggatacggcttcaacagcatctggtgctaccacagcacagtgcaccttcctctcttcaaccaaaccattgacattaactgtgcaaacaatcacatccggctttgcatccatggcatggactgagaggtcctccatagatgctcctttgaccgataggcctcgcatcaagcactcgggtggctcaggcttctcctcgtcgatcgcgacatacaccgtgctcataagatccaca

SEQ ID NO: 16950 - DNA, 10571 bp, Oryza sativa
tctattaaaaggtagtattatgattattagtaaaggagaaaaggatattacaacgtttattatagagactattccaaattattaatccctctatcccatagaagaattagcctttagtactaatcttagtatcacgaatatagacatatctctgtacagattaattgtattataatatattacattaatcctataacatttttttgggattaatcctatatttatttatttttaggacgggagaacattaagtcattaatcttttttttacacccattattaagaatgcgtactaggactattactactgcgaggtgaactgataactgcatgcttcctactactaccggccaaggacgctgggcctacatgcctggctctccagggccaagggagccccacatgtcaccatcctttcacggcagcggaagcaaacccattaaacgctgatgctttgtggctccaaatcgctttctcgctgtgagtagtttgcctatctacatgtacttgtgcagttatgcgagtgtactaagtactaacaaatctgttgtctgagcgtacatgtgtttatacgagcgtccgtatctacaccgtgtttcaaaaaaaaaaagttatctccgtgtaataccaatggatgtgttgatgtggcattttttcctgcgttctactgatgatgtgtcacgttacaaaaggcagtgtgtactagtactagatagccctgaaactaaacaccattacatagtgcttggaactgattgagctgaatggcatgcagtgccagatgccatatgccatgcatgcagattactactgcataatcctcctgtccaccggtctcagcctctcaggtcttcaccacgcacagctgaaagcctcagtgttgcagcagcaaccagggcttccggtttgcagctttcaaatctttcggtaaaaccaccggaggatttctgcacgcatcctttctgagttctgaccatctgatagtttgatcctagctcatggctctatggaaagcatcacgcaatctgtcaaggaacagagaaatgatcgagggaggaggaggatcacaaggtagaaatgatgatgattaactctgctgctgaagatcctaatactagtattactaactactatcagctggacccccattatatcagaccaaaactgttaaccatcgggattacccctgcagaagcaataatcaatcaatggccccatgcagcagcagcagggccactcactctcgctctcttgtgcctgacaggttcttgacatgaagaacatggcgtgtgtttctggctgctgctccctggccatgccatgatctatagccattggaatcggggaaagttgcagcagctgagagacccaagagcttctggtcttcgtgaggcgtccgtccgtccatcgcgctcatcagtggcatgagtggaacggaatgatgcctggttgcttcggccagatcaaagcatgtgagaatctgaaggtgactcgtctctctgctttgctttaccagccaccgccatgagagagagagagagggagagagaagagctctagacttgcatgcttggtgggttttgccttccaaagctcatcagtcatcatggccgacttgcatggcagacaggcctggcagtctctcgaacagcacattcatattcttttatcatttttgctttgcctgtttttagccgggatattttacctttgctctttttgttttttccctgtaatttggggcatgtagttaaacaattatactccttgaccaattaactaacttgacgccagcttagagctctcctgatacttccctttttaatctgtttcacatgtttgttcattgtctgatttgtatctgaaagtgtcattgtacagtgtttgttcagtgaccgaggagatcaagagcgtacctgttacaatttgtccactgcggacacttagtccctgaatctttacgagagggaaaaaaatgactatttgacaccatcagatataatgttgggagatttggtattgctaattattcacttgattttacccacacctctcatattctaccattttcttccctttttgcctgaaattcaatctgaaaagcctctgatatgcactcttcttttttcactttgtttctttgctttaccaagaccagtattctttagcacaaaccggcagagtgagcagcaagctctctcctcacgctatgcttttatcatccccatgtcctccccaaacatcaaatattcaatatctacatcgattcagtatttgtgtatgtccttctccaagcatcagtttttaatttgtgcattgtaatgttagggcttgtttggcatgcatggaggaaagaaatggacttttgaaaaaggtgcaagacactactccaatctgtgtaagcaggcctgagttctagacaagcaaaaggtgatgccggccaatggattgtacaatactactaataagccggaaggaggctaacaggtaggctcctttgtgttacccattagtcgtcaaaaagtgttctttgtgctgcccttttgtagccagcaagacaagggtacaatgacatgacaaaactgcaacatctttacaagccactaatgcttttcaaggataaataaggcggtctaaaagtagatttgctgcagttttcatattgcagtgcagagaacatgtgtaaccttattaacttgataaaatgtagcatgaattggcagatgtatcttgttcttcttacatgtatggagaaagatatgaacacagtagaaagtctaaaaataacctgctcaacccttctggatgtgagaagctcaattgaaagcaacttgcaattttaacaccatttacaaccttatttccctgtgtatacaggtttccttttctcagcaaatgcagctagaccttcaagacgatcttgagtgtgcagaacttgctcgtagcattcttcttcgacagccaatccggcggacagatctacctccatgccttgattgatggccttcttagccattcttatcgctaacggaccctgaaagaacaaatggtgcttagatcgtctacaagaacggacagaacagtgatcttgttgaatttgattcagaaagttcattatcatttgtagaagctgctctatcagagatcatgaacatctcaaacagatcaaatataacatgttactcattcagaagcctcttactttctgatttatctcctgggcaagttcaagagcccttttataagcctccccagcgggaacacagtagtttactactcctgcaatgaaaacatacatgtcgtagtggttcttctaagaagtcatataagcttttactaagaaatcacacctgtagaaataaaatgtaacaagactcctctcaaaaaagaaggcgccaggccaaccttacccatggttacagcttctactgcatcgaatctacgaccagtgaatattaattcctttgctctggactttccaacaatcctaggaagacgctgcgttcccccagctctatagattgttacaaagtgatgttaacagcagaagcacaccattttgcttgagacatttcaacaaaaatcaaactagttccactatgatatgctattcaagtacaatagaacagcataacaaacttttcgataggatgcaatttcccactttgatatgatacacggggttgctgcactagagcaagagaactgtgaaaaaaaagggaacaggtttggcatatactggtgggtaaatgactagattttttttgacgcaaggtaaatgactagatttacaagccaaacaatactcccatgttatttaataaagtgccagctacatttataaaaattacttacaaaagtaaagcgccatcttgaacacatacccaggaataatagcaaggccagtttctggcaagctaaatgttgcattttcccctgaaaacacaagcattgaaatgtttgagttttggaaggaaggaacaaaactctttgataagatggatggaatatgatcaattgatcactgcaggttgaaagagtaccacatatacggagatcacaagaaagagccaattctaacccaccgccaaaagcagctccctcaacaatggcaattgtaggaattgacaatgcctagttgtgcaagatgcattttgtaagtattctcaacatactctaaaaataaaacttgcatcaaggctttagaaaaaaaatagctagaatgcgaaagatgagcgtgcataactacttataatttgaaccgcgagtaccatatattgcttcactaaaatctactaagatacaatggatgttagcaaaatatatttgaatcatgcacccagaagcaaacctcaaaggacaggaatgtagatcttagggaattgacaaattcgcgaacttcgcaagggctcattaacctcctttcctgtcaacaatttatgtacaacggttatgattttgtttatgatcagcaaaggacaaagggacataagtacttacaaagcattcaccatttttttcctatactatagctacaatgcttttagttccataactgacacaaaagttatctacgccgtggtggatagcacttatttcaaatgctcaataattcaaacaaacttcttcaatcaataccatctgcacaaggacactttgattagttggtgtgtacacttgtacttactgaccatagctagccagtaaccagcatttcaaccatccatctagtaagtcttaacgtatatgaggaattgaggacatatatacatatccctcttaataagtcggaccctgctactgctattaacccttccaaacttgttgataaaaagattgaaacaacggtgccaatccatttgtttctctccatccgatattttttgagggactagcttctcaatgctgtcacaactcatttaagccttgattgatgtttgaagctcctgatcatgttgagtaatgagtacgtcaatcatcagttttccagatcgattcaactactcccttaaaattagaacactcaattaaaacatcacattaactcaaaattgaaacataccaaccttgccaaaaaaaaaaaaaacagtgaaccaatccttatctactttcagactcttctaacaactgcttagctagagtatgccacaaacatataatccttaatccttatcctactgtgagcagaaaacctatcgagatttagcagaggaactgatagagcgttcaccttgagatcagcgccagcgcagaaaaccttcgggacggagctcgccagcagcacgactttcgccgtcgcgtcagccttcaccttctcgatcgcgctccgcaacccctggagcatctccctcccgatggcgttcctggcctccggccgctccagcctcatctccacgatccctgagtccaatcatcgcagctgtaataaaccacaaaccccaaaagaggaaggcaaaaaaaaaaaaaatgacaggagaagcgagcaagggacggaccggagtcgggcgccgagagcttctggaggcggacgggctcctgctgggcgaggatttggagggcgcgggagaagagtgccaggtgggcgttgttcgccggcgcgcggcggccggcgaggtggccggagacggcgaggattccccggaggatgcgcatgctggagcagcagcggttgggtcaggatgggaggaccggaggagtcgtgtgggactgtgagtgtggaaacgagccgagcgtaaaaggctcgctagaagggcggctcagctcggttggagaaacgaggtaaaacagcagctcggctcggctcattgacgggctcgagccagcttgaggctgagccggtgactaagatgtggcaggctggcagcgaatttttttcattttttaatttttttcttttaatatttaaagaaataatctatcgacgcaaaaaaattacaaaaataaaccctgccgccctccaagttgacgtggcagatgtcggctcgacggcgccatctgctgccatctgcgaaaattgcatttagccccttgccgcccaaggctaaatgcaattttcgcagccctaaagagcatttggctggtactttttgcatctaggtaccagccaaaaagtattaggcccgggttggcttttttttttgcatgggagccccttgccgccataacatagggcggcaagggttttcgtgcaaaaaaaaaaacctccctctcccgtctctcccgtctgccgtcaccacccgtccctcccccatttgccacgtcagcttgccgccttagtagagggcggcagggtctatttttgtaattttttgcgccgatggattatttctgtaaatattaaaagaaaaaatttaaaaatgaaaaaaattcggctggcagcgccctgccggcaagggtgaggcccaggaagcctcgggtgggcctacaggccagcccaggaaggttggtccgctgagcccaacaagccacgagaattacaagagttgggcttcttgtctcgaacctacctaggcaagtgcaggagaattcatcgacacaaacttctttatttactctcgactaaagtcaccgggaacgggcaagcgaagatgatcaccacgacaccaaatggcagtatactgtatacacagataaactactttcctgagtatacaggtttcctcctctcggcgaatgcggctaggccctcaaggcgatcctccgtgtgcagcagctgctcgtagcactccccttcgacggccaacgcggacggcatgtctgctgcctgcatcccttgatcaatggccttcttggccattcttatccccagaggcccctggaagaaaataacaggattcagaaaaaagctacagattggaaaaagacctcgtattgtcacagcacactgtatgtgtttggtcaagatcttcatatggccaaaattgtggcttctgttttatttgaacagtcctgtgttcaaagccgacgatatggttcttactttctgggctatctcgcgggcaagttcaagggctttttcatgagcctcccctgctggaacgcagtagtttgcgagtcctgcgtttcaaacatccaattaaacctcatttgaagaaatgcaagtgaagataatagaaggaaagcgtaagggaactcttacccatcattacagcttcagttgcattacatctacggccggtgaatatcatctccttcgctctggaccttccaacaatcctaggaagacgctgtgtgcccccagctctacgtagtacagtaaaagatgaagattatctgctcaagctgaatattttcattgaagaaacacattttggactgtaatttatttatttatttatttttgtcaacgtaaagaatcgtttatatgttgactaaaagaggtattggaaataatgatgagtgggtcatcctgaatctggagctagcaatagcactcacaagtgcacaatgatcgactctctacaattttagtgctaacctaaaagaacattagtacattacccactgattttttttattatatttctcctagtggatcagattatcttttcattgccaagcataagcaaatactaccattaagacagaaattcttgtcagtaatatttaatatgaacattagctccactaattaattttctttttgagcaaaatgaaatcttttctgggtgttggactttgatgtaaacagattgcattaagatgggaaattctaaagtatgaagacctgccttattctggtaggtaagtgcatattccatttagtttcggatcatcttgacaatttcacgagaaacctatgtacaaaagtatggagtactagatgcatacccaggaatgatagcaagtcctgtctctggcagtccaagagttgcattttctcctggaggggtgaacacattatttcaaaaatttgaaagaaaggaacaatgattatgtccataagatgggaaatattgaattgctcatatactaagacaaaaggaagcaccacatatacgcaggtcgcatgaaagtgccagttctagcccaccacccaaagcagctccttcaatgacagcaattgttggaatagatagtgcctgaaaaaacaagatgtggtttttatatacacataaagaaaaatgcgccatgtataggatctgaaattaatgggcatagtttctcataaaaacactggtccactcgagggtggatgccaacaaaaaaaaaggtaaattctgaataaatacagacctcaaaggatgagaatgtagatctcaaggaatttgcatattctctaactccagaagagctcattagtttccgttcctgtcatgaactgttgctctgttatcttagccatgtggattgtaaatttgtaagcaacaaaaaacaacatgtaggaacagtataacatgtttttgttaacatcatctcatgattttaatatagtccatgagatggttttggttctttaactagtctagaggtcaatatttggtttaatggcaactacaagtacgagaagtcaaataaattggttgagaaatcaatatcatctggactgtgcaagatgacttatattaacttctagtaccaagttttaaagcttaaaatgatctgtctggttaagcagctattcctctctagaacacagccccaactagtaattgaccccaatttttaatcctttgtttaaagcatgacatcctccttttctcttatagtatgttctttgagatagtgactcctccatatgctgtcccaggatcgcaatcatgatatttcattttctccatgaatcattttcttcgtgacacgccatcacagtatttctttctatgaatttcgttttcagcactacaccaagctcatggatccatatttcttactcctgcagtttttccacagctactgagctactccaatgtctttgatcgttcagaattcgcagttgcatctcaactgttctcacagccattctactcaaatgcgaaacgctctaatcgatctgtattaaaatatgaagtatgaaaacacatgcttgcatttccaagtagtagaatagacagagaccttgagatcggcgcctgcgcagaaaactccaggcacggagctcgtgaccaggacgaccttcacggtgtcgtcagcctcaaccttctcgaccacaccccgcagcagcctcatggcttcccagttgatggcgttcttgacctccggacgctccagcctcagctctacgatttctgtttccacccacaaatttaggaaccgcaacaagggagaatttttagagcaactctttcagaaaaaaaaaaggattcttcagaaaatttaggcaaaggctaaaagccatgctgatccccgggttaacagaatcatcagaagattagtagtagacaagacatgagaggacaatctttaacagtccttaatagaccctgtcttttgcacatcgacattgttgctatcactgggtagcatcacacaccccatcagagataattgaagggacctctgcagtactactaaagacatattgtgaattgagtggctactggctactgctggaagggatcaagaagtggatggctttgcagcaaagtacagtgtctcccaagcccctgacctacctacttgtaccgctccactgttccagggcctcgccgacgccacgccgagtcgccgattccgcccggcgggaaccgaggagatacaaagcgagcgggggatcggcacccacgccgcgtcaggagatggcggcgctgacctgagagcacgagagggagctgccgcgcgggaggaggccgtgcctggcggcggccggagaggagaggggtcccgtgccgaccgccggcgacccgacccatcgagtgctccgatggtaacatattttgcggaacagcccctccttccgatcgatattaatggcagcgatccaaatttctgcagaataccccctataggttttgcaaaataccccctctccctgtttcgatgttttgtgagttgtgaccggaattacggcgatagattttggaggagaagagggcgaatttacagcaaccctaaaaaaaaaaagggtgaagattcacgaaccgcagtcgggtgccgagagcttgtggagactgacgggatccggcggcgccaagatctggatggcgcgcgcgaagagcccatggtgggtgcgggtcgccggagcgcagcggccggaggcggcgaggaggcgccgcattgtggaagtggacggatgggaagaagtgaagaacacggcgatgcgcgctgctcatgcggatgcgggtgagtttgttggctgcagctggagatgcatccaacggtacacgtaagacacgacacatcacacatgaacagtcaccaagtgcttaagcttggaactgcacgagcattcaacatttttctcctgttgatgtttctgaaagacgttgatagtggaagacgaggctacttgccgggcaaagctttgaccgtttctagttttactaccttgtcttggtaaaaaacaaagaagggaagcagtcaataattttcagtgacaagagattgtacttctctttgagtaaaaaacaaag

SEQ ID NO: 16951 - DNA, 529 bp, Oryza sativa
  unsure (1)..(529): unsure at all n locations
cgtcagcctctgcacgcgtctgtcgcccgtgtcgtcgcgccgctccaaaccgccccgccgtcatcgccgtcgtcatcgcccgtgtgctcgctgtgcccgtatcgccgtggtcgctccgccgctcgtcgccgccgcccgccgtccattcgcggccgggtcgtcgtctacctcccgccggcccgcgtggcatccacgtaggcgccacgtcggcgccagcttagccagaccgggtcgggccgaccccggttggtccctccgcgtgcgcgcgatccaccgcgagccgtgaggctgcgcgtgggcccgcccgacgtgcgtncaccgcggaccgcgcgcatgcactgcgtcctcttcccgcccgcgcgcgtgcgtcgcgtgctccctccgcacggtgagccgagccgctgacaagcgggtcccacccgggaccgcgcgtggtgagcccggtccaccggctcttttttcctccttccgcgcgcgcgcgagtttgggcccgcttggccggccggccatttagctcggccggaccgct

SEQ ID NO: 16952 - DNA, 3888 bp, Oryza sativa
aaagttgttggcccgggtggccgtttaaaaagctattggccgggtccaacttgttgcaatcctaaagattgacacattgcacatactccgaccggacgagacgcactgtctcatccgtgtcgcctgagaagcactcacttagttattttcagaaaagaattcaaataaaatcaattgcaaaaacaacagccttcccttgaagcctgcattaaacacttatttcccctggcttgctgagtacccccgtactcacccttgctctatataaatatccccccccagttgctgaagaagatgaagcggatcctgctgatgaggagttcttccaggagcaagccagctacgatgagttttagggtttcggcctagttcccaagtcgcgcctgtgatgtttggcccaagtcctggcttccgtttcccttttgtaatgcagttgtgagctcgggatctgtccgcagcccaacatgactgtacctctactctataataaagagacctctgttgctgtggtattctgtctccctgtgataccagcactgtttcctgggactggtatcgattaacaggctaaattggagcgtcacgggctagttccggtcgggactagttcggggcgtgacaagagatggtatcagaggacaggcttggccctagggcgaaacccgacgcttaggacgaccctaaggatactaagttcaaaactacttgcgaaaagctaaggtttcttttgctttctttattttcaatagtttgtttctaaaacggttactgatctttctccctctttcaaaattgtagatggcagtgaacgccagcttcagttcccacggttttggtgagggtcaccacgtcgcttagcttcgtgacctctcccgtttccttggcttctcgtgtcccgagtacacggggtactccgtggaccgtgttccccctcactgtgagctctctgtgtacctttacccccgtggaggtatacacggagctggccttcgcccacaccacttcaccgtggccaggcccactctccagatcgcgtaccaggacctctcctggactgcgcttcgtcacctggcccacgactacagccaccgtctcggaggctccgccttccggcagcttccacgccttccctctggccactcagacgccaggtacccttgtccgtacagcgagtctcagccagtgctgactcgcatggttgagctttcggaggctcaggccactcagcacgacctactccttgaggcttaccgctcccttgcccgccgatacgccgccttggaggcccgtctggccgaggagggtgtcacctcagttgacactatctcttgggactcaggacgcctctgccacgccagccacctgtcctcccacagctcccgcggctctgcctgcactcccagtggcccgcgctcccccagctcgcgtgcgccgtactcaccagtgtactccccctacccacacccagttagcccttcctacaccccggacacaccccagttgcttcctcccgccgtggcccacgctttatccgcaccgcgcggaagcgtgttgttggttcttccaccgtgttccgtttccgccacccagctcccccaccgccagcggcccgtgctgctgccggccctcgacaggttccgccggtcccttcgcgccagccgatcgacgtttcttcgactgaggagccgactacaggaggcagccaggccgacgaggagtagaggaggcagtcttcagcagccgtccgtgtgataggcccttttgttccgccgccaactcttttggagtcgtggcgaggtagtgcgtgcgtgtgtttgtggtgggtgttgtttggtagtctggttctcctaggtggtgtgcgcacagtcaagctcggcgtagctctgtgacttgtccacacccgttatatcaggtgtttttatgatttgaaaaatccagtttatgcctagtgtgtgctatctgagttgctatttgctttgctccttgccctcctaagtgcttatctgactcttaccccgcccttttctgggagtttagatggctagccgcccccgccgtgcagctcgtgcaccagcccgctttggttttgaagatggtagagttgaagcagaagcaaatcatgaatcagctaatgagcagtctcaccacagcaaccgttcgcaccgtactgtttcccgcaacgcagaggttgagcaaccccgccgcagcaaccgctcgcatcgcacagttttccgtaatgcagagatggaacaatctcaccgctctcaccgcactgccagtcacaattctggagaagaacacctccctcccccacctcatgtggaaaacaacatgcaacacataatggcagttcagacacaaatcttgcaaggactaaccacagccatagccagttttcagcataatgcgcatggaaatggccaccctcacgtgagcagcaatagatccaagctgacagattttctgaggtcacatccgccagagttctctcagaccgtcgagcccgtcgaggctgacgattggctgaaagatgttgataggaaactcaacttagtgcagtgtactccggttgagaagacgctctacgcctctcaccagctaagaggacacgctgcagattggtgggagaattactgcaatgcacaccctgaacccactaacattgcttgggatgagttcgctacggctttccgtgcagctcatgtgcctgaaagcactattgacatgaagaaagaagaattcaacagacttaagcaaggcaacatcagtgtcaatgagtacctaagtatgttcaacaagttggctcggtacgcccctgaggaagtggacacagacaagaagaagatcaggaaattcttgaaagggatcgcagttggaatgagactccagttgcttgctcatgacttccccacctttcaacatatgatcaacaaggcacttctacttgaggatgccagaaaagaggctaccgaagaatacaagaaacgcaagtctaaccatcagggaaattcttcccgaggcgcacctcgccctcgctacggtcaacccatgcaataccaccagtcggtcactcaggctaaccgccagccaggctacgcccctcgtcctcagatgaaccgtccggcacctcagccacagcagcgtgcccctagtagcaataccgcgccaaacagtgttacctccttcaagtcaccacagggaccgtcagcagttcagtgtttccggtgcaaccagatgggtcactatgctagacagtgccctcagaatcctaccaacaccaactcagggcatgctaatggcagcaccgccagaactcctactccagcggcagctcagtctcgtcctagctctcaggcaagtggacaaggttctcgtgcttccaaccactttggtcgaggaagtgtgaatcacattcaagctgaaaccgctcaggatgctccagacgttgtgatgggtatgttctctgtcaactccgtacccgcaatagttctatttgattcaggagcttcccattctttcatatcacaagcttttgtgaaaagaaatggttggaaaacccaaaatttgcgtgtaccaatgatagtacattcccctggaaggaatataagggcaactcaaatatgcccggaagttaaccttagaattgaggaagttgacttcctagccaaaccgatagtcctagactcgcaaagcttggatatcatcctagggatggattggttggctaagcacaaaggacagatagattgtgccgaaaagtccatcaccttgcaaggacctggaggaaagcaagtccgctttacccctaacacccctaccgcaagtcggtctatcctaacctgtttacaagtcacctccctggagtcggtacccatagtctgtgaatat

SEQ ID NO: 16953 - DNA, 1524 bp, Oryza sativa
agcttcccattctttcatatcacaagcttttgtgaaaagaaatggttggaaaacccaaaatttgcgtgtaccaatgatagtacattcccctggaaggaatataagggcaactcaaatatgcccggaagttaaccttagaattgaggaagttgacttcctagccaaaccgatagtcctagactcgcaaagcttggatatcatcctagggatggattggttggctaagcacaaaggacagatagattgtgccgaaaagtccatcaccttgcaaggacctggaggaaagcaagtccgctttacccctaacacccctaccgcaagtcggtctatcctaacctgtttacaagtcacctccctggagtcggtacccatagtctgtgaatatcccgacgtatttccagaagaattaacgagtatgccaccagaccgagagattgagttcgccatagaactggcaccaggcactgcaccaattgcaaaaagaccataccgaatggcagctaatgaattagcagaagttaaaagacaaatcaaagaactggaaagtaaaggttatgtgcgacctagctcatccccttggggagccccagtgcttctggttaagaaaaaggatggctctgagagaatggtaatcgactatagagccctgaatgaagtaactataaagaacaagtacccgttgccacggattgacgatttattcgatcaacttaaaggagcaagagttttctcaaaaattgacttgaggtcaggttaccaccaactgaaaatcagatctgaagatatcccgaagaccgctttctcaacgcgttatggtctatatgagttcacagttatgtccttcggactcactaatgctccagcattcttcatgaacttaatgaacaaaatcttcatggaatacctggaccagtttgtcgtggtgttcatcgatgacatcctgatatactccaagaacgaggaagaacatgttgaacacctgaggctgataatggaaaagctcagagatcatcaactattcgctaaattctcgaaatgcgaattctggttggaccgagtagcatttcttggacacgtgatttcctccaacggtgtcgaaggggatcctctagagtcgaagctgtacttgcttggaacccgcccaagaacgtgtcagagatccgcagcttctttggcttagcgggatattatcgaagattcattgaaggattctctaagctagccagacctatgaccgagctgttaaagaaggaaaagaaatttcaatggtctgcagcctgtgaagacagctttcaagaaatgaagaaaaggttgaccactgcaccagttctcaccttgccagatatccgaaaagatttcgagatcttctgtgacgcatcaagacaaggcttaggatgtgtcttaatgcaagaacgaaaggttgtggcttatgcatccaggcagctcaggcctcatgaagtcaattatcccacccatgatctcgagttggcagccgtggttcatgctcttaagatctggaggcat

SEQ ID NO: 16954 - DNA, 1494 bp, Oryza sativa
aatccactatcatcctggtaaagccaacgtggtcgctgatgcgctaagtcgcaaggcctattgcaatgtagctcaaatacggcctgaccaagatcatctgtgcagagaattggagaagttaaggctgaccgtggtacagtcaggagtccctgccagcttgacagtacagcctaccctagaatcgcaaatccgggaggctcagaaagatgacgaagggataaaagagttaataaaaagaatacaggagaagaaggacaccaatttctccatagacaatcaaggcacagtttggtgcggtccacgcatctgtgtaccggccaagaaggagttaagagatctcatcctaaaggaagctcatgagtccgcttactccattcatccaggaagtacgaagatgtaccaagatatcaaggcatacttttggtgggctggaatgaagcgagatgtcgcagaatacgtagccttgtgtgacatttgccaaagagtcaaggcagagcatcagaggccagcaggtctgctgcaacccctaccgattcccgggtggaaatgggaagagatcggaatggatttcatcaccggtttgccaagaacccccagcgggtacgactccatttgggtaatcgtggaccgactcacgaaatcagctcatttcgtgccagtgaaaaccacctatgatggaaagaaactagcagaactctacatgacccatgtcgtatgtagatttggctgtcccaagaaaattgtgtcagaccgaggcactcagttcacctcaaggttctggaagcagttgcatgaagccctcggaactgatctgaattttagtacagcctaccatccgcagaccgatggtcagaccgaaagggtaaaccaaatcctagaagacatgctacgtgcgtgtgccttggatttcgaaggcacttgggatcgttgtttgccgtatgccgagttctcatacaacaacagttatcaggccagcattcagatgtcgccgaatgaggcaatgtacggaagaaagtgccgcacccccttgtgctggaatgaggtgggcgaagcactggtattcggtcctcacatactcaagtcagcagaagaacaagttaagctgatacgagaacgtttgaagacagcacagaaccgtcagaagaattacgctgacaatcggaggcgtgaccttgagttcgaaaaaggagatcatgtgtacctgcgggtatcacccctccgtggtatgagaaggtttgggatgtccggcaagttagcaccccgctacatcggcccctacctcataaccgccagacgtggcgaagtggcttatcagcttgagctacctgaaggtctcgcagatgtgcacaacgtgttccacgtatcccagttaaagaaatgtattcgagttccagaagagcaagttcccctgggtaatatcgagctggaaaagaatctgacctacaaggaaagaccgatcaaggttcttgaagaggcagaacgtcagactcgaag

SEQ ID NO: 16955 - DNA, 10697 bp, Oryza sativa
catcgccgtcgtcatcgcccggcccccgccactccgcgcgctagcctccaaggggcggaggcagagagcccctctccctctgccgagtcgccccgctccctcccccttttcccgaatcggcaaaagagcaagccccttttctctccctcctttttccccttttcctcccgccggcgtcatcctccctccctcctgtcgccgttttggccgctagccggagcgccagctcgcgccttgaccgccaaagtcggtttccaaaccgacattgccgccccctataaacccaggcgccctcccttcccttttctcccattcttccctgtttctcgcccgcgccattgccgtccctctcgccgaccgcagccgtcgcgtgtgtgccggaggagccggtgcgcactaggacgcggaaggggactccgggcgctcgtcttcctcctcttccccggcccgaggccggagagatcactcccgcgccgtcggcctctcgtcactgcgccccgtcccgcacggtagtgtctctctccgttcttcctcctcgctccatctcctccccctagctttcggtagtagcttaagtagactccccgtagttagccggcgccgccccgaccgttgccgtcgctcgccgtgtgctcgccgccgtcgccgcccgagctccgtagcacccgctcgtcgccggcctcgctcggcgtagttccgcccaatccgacgctagcgtcgagttcccgaagccgcgtagatgctctcaccgccgggaatcgacctctcgtgacctcgtcgccgtttccctcttctcccgccgccggttgtcgctaccgcaatccgccaccgtcgagcatcctccggcgaatccgagccgttggctcgcctccccttgtcacgtgcaaccgcccggtgtgctcgctgttgcccgtatcgccgtggttcgctccgccgctcgtcgccgccgcccgccgtccattcgcggccgggtcgtcgtctacctcccgccggcccgcgtggcatccacgtaggcgccacgtcggcgccagcttagccagaccgggtcgggccgaccccggtcggtccctccgcgtgcgcgcgatccaccgcgagccgtgaggctacgcgtgggcccgccgcacgtgcgtccaccgcggaccgcgcgcatgcactgcgtcccttccccgcccgcgcgcgtgcgtcgcgtgctccctccgcacggtgagccgagccgctgacaagcgggtcccacccgggaccgcgcgtggtgagcccggtccaccggctctctctctcctccctcccgcgcgcgcgcgagtttgggccgccttgggccggccggcccatttagctcggccggaccgctccatttctcttgggccgcgccctagccgtccgagaaaagtctatattccctccctcccttcttttctttttcttttccaaaaaggatttaattaaatccttttcctttagatcaaaaattcaataatcttagaaattcaatatcttcccaaccgtaaatccgtttgactccgttcaacttccaaaattccccaaatctcgagatctatctaatggcacgcttagaggtctttaatagggctttattttcgccgtttgttgagttgttccgtttcgcgtatagtttcagagcccgaagacccgcagtgcgaggatttcgaggatcaagctccagatctcgagcaaggcaagccacctttgaacatcttgagcctatatttgaaatttaattatgttgcttgcaaaatattatgcattgatagatcgcacttaatctgtttgtcccgtctgcaaggcagattggcagacctacctaatttgtcgcatttgatccttcctttgttaattgctataccatgtccccttgtaaccacccagttgcgcctcgatactcgtgcactctgtgcaagtatcgacggtcgccttcaaacttaaaatctgagtaacaacttgggtaaaactggagttttacaaaagacttggaaaacccgacacctgggtcggtgcttgcgaactaaatggattttccaaaaccgcggaccggggaacgtaccgggtgtacggtttcccgctcttgcacctaaggaccgtttccttggaatttcatccgaacataagacaagtacgaccacatgggtggaatgggacacccctggctgagtaactagcttatcaggggagccttgatgccgagagacatgtggattcgccggggtggtgtcggggaggacccctgggcttcctggcacagtatggtctgggacctaacctgttgttggtctgggacccctctcgtcggcatatggtaaacctgtgtcggctttcgaaatgccttgtcatgaaagcttggaggtcccccggcgtggctgatccccacgggctgggtgacccgggttagtaatgtcatgtgggtaaagtgtaccccctctgcagaggttaacaaactgttcgaacagccgtgcccacggacatgggcggatgtgaggtgattcctagcgtagttttgtttgtctactgcttgtgaaattgctgttgtgaaaaggggttcgatgtttgaaaaatctgcagctgatgggatcagctaggcccgggtggccgtttggaaagttgttggcccgggtggccgtttaaaaagctattggccgggtgccaaccttgttgcaatcctaaagattgacacattgcacatactccgaccggacgagacgcactgtctcatccgtgtcgtttgagaagcactcacttagttattttcagaaaagagttcaaataaaatcaattgcaaaaacaacagccttcccttgaagcctgcattaaacacttatttcccctggcttgctgagtacccccgtactcacccttgctctatataaatatccccccccagttgctgaagaagatgaagcggatcctgctgatgaggagttcttccaggagcaagccagctacgatgagttttagggtttcggcctagttcccaagtcgcgcctgtgatgtttggcccaagtcctggcttccgtttcccttttgtaatgcagttgtgagcttgggatctgtccgcagcccaacatgactgtacctctactctataataaagagacctctgttgctgtggtattctgtctccctgtgataccagcactgtttcctgggactggtatcgattaacaggctaaattggagcatcacgggctagttccggtcgggactagttcggggcgtgacagatcccatattcgacttcaaatgctacagctatccaactaaacacattcgttttcggtggactatacaagtcgaaccggcactagagatgatctaacgaggataagacaggacaccctctattcaacctcgtaccagattggataataacctgatacaaatcaagatagatgtttatatatttatagtactaaaaatatgttttatactatgttcctaaaacacaaaaattaatcagcgaggcctcttgatattgtcttatcgcgcgacgccattcagattcgtccacacacgctgcgtcatagccgtttgatcgtgggagaggtggagaagcctactacacatgcatgcctttttttattagacatgcatgtctttttccccttcttataaagttttatctcaaattacttattcgatctataatccgattacatcagtgtgtttgttataattaaatcttcacaacaagatcttacatattatattacgacgaaaaaatatttatatttataaattacttttattatatactccctccgtcccaaaatataacaacttttagccctcaggatttatcccaaaatataacaacttctccaccaacattttcttgtcaaccaatcacaacccttcaccattcacctttctcacgtaccttcactactcatccattcacaattctccaccactcacttctaactactttcttaataaccgtatccaactctaaaacttcttatattttgggacggagggagtacgtatcgtaagttacttttatcatatataaattacttttagattttattaaattatttatacattcataatgctctaagttgattatttttattattgtttttaagtcaattctataatgtatggactttaaatttaatttttagatataccatttttttctccctacaacgaatttacttctaatgttgtaacaaattatttccattttgtgctaagttacttttatgatttatgtaaattacttttagactttattttatttactttcataaatgtatttacttgaaaatcttctctacacttttgtttgtgaatttacttcacatagtttcttatttcaactcagtcataatgtaattacttttaatactatagagagttacttctattacataactaagttacttctataatttaaataaattacttttaaattaataaaatgtttcgaatatattaacatggatctcgttttatcacatatttcgagcagagtacaatgatgcaaatagatcttaaaaataatatgtgatttaaaagatataagtcattaaagatgttttaaaaaagtacaccattgtattttttagctaaagagagatttatatgtggatgaagtggtcgctaattaaaacaaaccagctatcggccgctccctagtcgcgtcctttctaaaattagggcttgtctagttagtaaaaacttttgcctatgcatgtcacataggattatacagatacacatttggagtattaaacatagtataataacaaaacaaattatagattctaccaggaaactgtgagacgaatttattaagcctaattaatccgtcattagcaaatatttactgtagcaccacattgtcaaattatgatgcaattaggcttaaaagattcgtctcgcaattttctagcgaactatgtaattgttttttttttgtctatatttagtattctatacatatgtccaaatattcaatgtgacagcataaaatattttgtttgggaactaagcaggcctttattttaggatggtgagggcgggcttatatgtgcttcccccaggaataagtccatttttcctccctcatctcttgcgcttgcgtgaataacatccctcaactggaaaactgggtataacgcctccttcttctctgaaaaccagagcaaatcacctccctcattggtttggctggcgttttcgtctgacgtggtgtcgttgacccgttgacgagctgactcagcgtggtgagacccacatgtcagtgcaaactctcctttccttcttcctcctccctctctctcgaccttctctctctcccgcggtctctctctccaccttggccagagcagtggcggtggcggtagggagcgacggtggtggcagacgatgtcggagcactgatcgccgtcgtacgaccaaagtagcgagaacacgcaggacgtggagaaggggagagagagagtcatccccgtcaccgccggtgccgccgtcctagagatccctcgccgagctcctgtcctgccaccaccgccgtccaccaccgccgtccaccaccggtcgccgtcccgtgctccttcgctatccccgggcggagaagaaaggaagaccggggagagagggggggagagccatccgtcaccacgagttgcgtggccctggagcgttgcgatgctactgctggcttcttcctgcgatgctactgaggttgaagaaagcctctgtctaggtaattctttttgggtgtagctatatgtatggcgctatatttttcatcaaaaaatagtcggtatgtatttatattgtaagtccctaaattacatacgtaattttagtgtatttacaatgtaagtcttaaaattacatatgtaaattcgaaaattacatactattacatatgtaagtggggtgtaaatgaggtgtaactactgtgtaagtggctaaaaaaatcgattgtagcatatggcgccatatttctagcaactccgttctttttcttcttttctctcactcactccatcagctgctagctttgctagctaggagtagctagctgcttgtgctcttgctgtcgagaggaggaagaaagactcgaggtggttggctgtcatgttgtgcatggctacattcagagccccgacggtgatgtcatcgactgcgtgccgctgcacctgcaaccggcgttcgaccacccgaagctcattcatttttgtttcgatttgcagtgatcgtttctatctccggcgacgtttcttgatcgtgtttgtgactgtgtgcgcgtgcaggttgagccggagccagaggagaggcccaaggtcggcggcgcggcggtggcgcatggggaggcggcggaggaggaggtcgtgttcccgatggcgtggacggacgaggacgagtcgtgcctggaggggacgatgccgatgcggcagacgacgaagcgagacgtgctgaggtccagctcctctctctatttcaggatgaagcagcctcgtgcctgcgtgccgctggtgtcgtccgcgtgaggaagaagatgggatgggggttgctaacaggtggggtccataagctgactcagctagttaatggaggagccaccgccacgtaagtgccacgtaggacaaaaccgcctccgaaaccgctgagggaggtgatttcctctggttttcagagaagaaggaggcattatacctggttttccggttgagggatgttattcatccaagagcaagagatgagggaggtaaaatggacttattccttctgccaacggaggtgtgtcgtgttctctcggccgttggtgaagccatctgctgaaaggaagcccaagaaaaagctgcaaacctgggcttgcgatgggccagaaaattttccgtagtcgcgatgggctcaaccgctcgagaccgaagggtctagcaattttgggaggcccaagtagaggagatggaacatggaaggaggacactagaagccgatgggttacaaggtcttctcctcccgctcgccggctcctcctcgcaccaactccggcgagcgcggcctcgccgccggcagcggcggcggagggggtggcatggaccggtggaccggtgtcctcaacgtcccgctctcccgaggtggccctcccttccgcgtcgccgcctcgctcgtccttactccggccaaaaccctcgccgtaagccccaatcccctgcaccgtcgtctccttcctcgctggccctctctctctctctctaatccgaggcctgattctgccaggtcccatgcgccaacgcgattctcttcacgggcgaccgcgtccggggcagcggcgacccggcgatcgagcggctgtcggacgccgcctacctggctcggctcctcgccgggaagctcaccggggaggccaacgcgtgggtggtggatgccgcctgcttcgctggttcgtttgcagtttaccgagatctcgttccgtccgtggacgccgtgggcgaccccgagcggtatgatcccactggcttcccggcggcggctggcgttaccatcattttaggacattgcattcgtgaggtttggtaaaattctgtaatttctctattcttttatgcaattagaatcattacaatcaagcgtttattcgaatactttgtacttgtatcttaatatttccgtagtagtatgtttagatacttacatatacaggagtaccattgaattactgatgcaatcgtgaattcatgaggcacattattcatcactggtttcagttatagttagtatacgatgctacaataactgaattcttgatattttgttaatttttggttaccaacacaggaatttcgcgctaacatttttttttgtcaacgtaaggtttcagcctgctatatgaatcagcttctcagattattagttcacatttggtaaagtaaatatgactttctaaggatgacttgattgggtttctgggatggtgatttttgtctttcttgcttgatttaccttttgactacatgagcagctactactgtattttttttttttgctaacgtaatgcttagcatattggatatatagatatactgccatggtgcgctaaacttcaagaactttgcttataaaataaatacttcctaaaataggagaaaacgaatgcattatatgttagttttctttttactccaatgcaatttctgtcttgatagttgtttacctactgagatgtcaattgtttattgcaatatctcactattttgagtcttcatttcatgatttcatccatttatcgtgtcaaattattgtgctgaattgctttgtactgaattgcatttcttccatgcacaatttgtggttaccagatacaatctatggttacgaaggccacaatgaagggttcatcaggcaatcaaagtcctactacatcactgttaaaatactgtcctccgaagactgtcatcctggggttcagtaagggtggagttgttgtcaaccagctcgtgacagaacttgcctgtttggcctcagaatcagcaaagatatcagatgatgtttcaggatcaagcccacctcttttaactcgcaatctccttgttcctatttcagctactgagtttttgtcaagtgcgtctgaattccattatgtggatgttggcctcaatcatgctggagcgtacattaccgatcatgcagtgattaaggagatagcaaattatcttatgcacactagtaagaatctctgttttgtccttcatggtactccgaggcagtggtctgatcctaaccgctcatggatccagatggagaaagaggtaatgctgcgcttgcttcaagatgaagctcaaaggtgtgaagggagacttgtgttatcccaaaagagatattttgatggcaaacctcgcagtctgctcatgcattttgaaattttggaagtaatggacataggctgactctatgtaaacggtctgtagcttttttactcccgtcagggatatgcatagaataccagaatgtgaatatatctgagggtcttggatactttcatccgtgctgacttcacggtatcccattccataagttgttttgtgcatgagaattcttgacagaataatcaaccacagttggattcctcatatcaaatgatgatctatgaaatgtctataagatgctttatccacctacctttccatttgagacaaatgtccacgctgaacttgtaaatggtaattggagctttccagcaaacgtaattttttccattctgacctcaagttggtcgtgatgaactgctgaatagtttggattacggatgacctgccggcttaccattctggtacgttatgctgtcacggatacttgttttttttttggtcaattttttttcctacagttcaagtgagaacaggtctctggtatttgctttgccaaattagcggcacatggtatcttgctatctactggctccattgtacttgtcaaatgtatcaagaccagtgtatttagctatatgacatttcgacaaaatcagtcttggccgttaggttacctattttgagttatggacacacgagcaaggccaaaacatgtgtgccgggcgtgcgacccatcaacctactagcaataggggggaaaacttagcaatggaggcccggcatagaaagtcgtggaattacaccatacctggaatttcatccaaattcaacttctgatcagtttcctgtatcagatgtcagaacgaactacatgatcgttccattgctggccgaattgcacagtgcagattcagcggtgaatcattcgtagtcaaaagggaagaatatcgccgtccacaccaactttacattatccatcaaacaaatcattggttatactaacaaagtactccgtaagataacaccattagtggttctgttagtaaagtagtggcactatagtatactactactgcctgctgatccgtgattccagctacactcttttaactgttcttgtctcactctctgtcgaacacctgaaccagtcaaacaacagtgtgctcgaccaagtggctgccgaattaacaaagttaaaaccggacctgcctttcatttcgttcggttgacaagttggcagaatacttcgcagtgatatcttaatcgtggcatacagtttgggggtaaattatgcctcggaatcctgtccgggcggccgcgaccggatcacggagcttggactcttgcgaacggtgtcgttgctgcctttcaggttttagacgtttagtcgcggtacaatccgcaacctctcgctgcgggacaaaactcgagtaaaaccgcacgaacggatcaaacgctagacgccatcggcgcgagtccaaaaaactactttttcgggggggacgcaatatcgcctcttgaaacggtcagttcagagaatcagagtcccagagatagatatcctttctgtaatttttttccccctgaaatgcaatgtggcatagtcaggtagtagcttatcaaatgcgtcaggttgtttggggttttgcgaagcgaatgagctcgtatactcgtatgcattgcgtgcatgcttctcggcgttggcttcagagttcagaatatcatggacttcagcagtcctgaataaaccggatttctgcattggtttgaactctgaaatcgacctgtgaacagaatcaagcgatagattcaagagataaaagcaatgctgctttcttttagtaatttcactgg

SEQ ID NO: 16956 - DNA, 10772 bp, Oryza sativa
atcgacctgtgaagagaatcaagcgatagattcatgcgttcaaagcaatgctgctttcttttagtaatttcactggacagcgtgacaagttgatggtcattttcctgcgacgccgatagagttttcgctgaacggggattggcactggcttcaaatcaatgcaatcggtgaattattctagctgctgtgctcgttactacccatgagacaattgcgacgggatgatgtggatgccgtggtttctagcagggtacgacagtggtaggcgtgtctgctcatttctttacagtgcatataccaatcgtatctcttttctctgcctgtctattcgtctccatccttgtgaatgtaaccacttaattacctggctctgatagcaaaatatcgtatagggacagttcgcttataaactaatccagctactgaatgaccgaattagcgtagtaatcttctgccacgattgaggacaaaataaagagtgtagagagcgcagactgcagagaagtccagtagaacaataccggtaagcaagcacgttagtcgagccgctgatgattggtcagtggtgtattctaatctggtaccctattaagtatgagagcaaaaactggaccaagcttggagaacaggagtacatactactattagataaggtgtacattatacagtgatgtagtatgtatcaggggtcacaattccgacgaaaatcggttgaattctgcgaaatttcaaggttttgatgaggcttgaaagtagaagccatatgagatttcgatgagttttatctaaattcaaatttgaattgataaaaaagaaaacaatcaaataaaatcttgtaaatagtatgatattcatagaatttattgggatataaatttttgaaaaaaatgatgtatttcacgtatttactgaaatttatagtaggaaagaaaataataacgaattaaaaaaggggaaaaataagtttacctcttttaccgattgaaatttcgattatttcgccaaagccgaccggttttcgcgagcttatcggtaaactcaagaaatttatatttaaattttggtttatgaaatttgtttggaatctaccggcttttcaccggatttcacgaaaaccgttgttccaccagagcacgaaacggaaggctatctcgaaatcgtaaaccctttatgtatatcttcgtccagttggccagttgcatgcgaacagattaaggattcgctgggaaacaaactggataagctaactcaaattaaaacgcgtggcgcggtacgcgacctggcacgctgtgtgctgtgtgcttcgctgccgtgcggtacgggtgcgtgtctggaggcaggccggccggccggccgcctcgctctcgcgttgcgttcgcgtcggcccgcccgatccggagggaccgacccacagatcacgcgcgctgacgcgtagcgagcgtccgacaaaactggacgggggccgcgcgctcccgggcgtgtgccgtactagtagtagcccgtaggacggggtccaaagcgcagcgcgcgcgacgtcgggtactcggactcgggtggccgggtggggggcgtgcgcgtgtgtggccggcgataagttggcgtttggcgcgcgtggtcaaggcgccgaacagtgtttggctgttggggttgggctggaacttggaagtccgctctagcgtttgacttggttctgcctggtccttctagcaaggtggtggcaatcacaaatttttggagtgtttgcatccacggttactacagtaacctcgtgcagtaaccgttgtggtttttttatcttagttttagtaacctcttaatttttattttagaaaaggctatacgcactaattttttcttactaaattcttactaacactgatgtgtcctatgagtgcatctaaattttttataacttacatatacttaaatcaaacggttgagataattgttagtaaaagtttagtaagaaaaatttagtatgtgtagcattgctcttttattttttagagtgtatgagatttttaccgcacggtaagtaggttaccgtggtacctgctctcggtaggagtaatccctttccaaacagtagaaatctgtcgcatggtttgacgtggattttagcggcgatgtgtgtcacctttctttcacggcttgtaaagccttgaatttggaacagaaacatagtttcattttacgtatataattttaaacgaaattcgagatttttttcacttcggttgtatttcacgtacgaccagtacgtgacaacccccaccatatattttttaatatatatagagagagtgagtgagtttagaaacaataaaatatacggcatcatcttttctcttatacttatgtttatcagctaaaatttaaattttcaaccataaatttatagctgattttaagattttttcatcgaattttattttccaaccttttattttagatcaataagaacacgtatataaaagttttattcataaattattttccgtttgcgaatatgttgtttagcttattccaccaaacagctgaatgatatggctgataattttctgaatagctaaccttcaaacacgaatggtaatccataatttccggctactgatgactttttacaaggcgctaaaaagggctaggttgtcagttgtcacgtactcctacaatctctatcagagcaaatctgttggcggcagctagtgtggccatgcatgcgtacaagctcacgcacgttcttgtccagtactgctacttctgctaggctgctacttctccgtgggaaacagtaagaacacgaaaccgagacgtgtcaagcagcgcttgagctagcggcccccctgctcgcttggcgtagcagcaggcggcggcggcggcaaaaactcgatctggtgacatgacggcatgcatcgtggcgccacggcctgctcgacacgttggtgaacggctatcgatcgatcgatcgatcgatcgtttcgtcgcgatcagcccaatccacgcacctggtcgtccggcaccgcttcatttaatcgttgggcgcgtacttcttcccgaagttttggtacactcatctttttgaaagaaatactccctccatacttataaagaaagtcatgtttaaatcaaactttaaaaatataaatcatgaataactcttaagttattgagtttgaaaatataaaaattatatgaatagatttgtcttgaaaaatactttcataaaagtatacatatatcacttttcaataaactaggaaggtagcccgcgcattcgcgcgagcatgtatcgtaggctgcatttgagatactcgtaagtaataggccgattgtgttaaaatgtcgtatttgttatatagtaaactataggcatatggatcttatatcgttggtttgattataaacagagcaatagttagattagaaatcaaacgtgaaacttataattatagattatttatattttagttaaataggaacgtaagagaaatgaaaagtgtagagcttgagccagagaggggaaggagcgggtgtgtagtgatgggcgtgtgtggaggggatttttttttttgtaatttttctaagtgattaagtgaaagccaattattaaatgtaattttcctaatatttgcaagatttttttaaaagatgtgacatgccacttatcaagatatatttttctaaaagtagattatatagttgaaaataatgttaataggtcatcaatctaggtgaaaactgttagctagatgttttatttttttcttttaatatataagattttactaatttttaaaatgtgacacttggtaatttaacatgtctctaaaaggtcatacatgatgactttgtatttttctaatttttattacgtagaatgattaagatgacataatacatattgtcaattttttaatgtttcagtgttgttcgcttgttggtctatgttaaaattaagtattttaaattttacatagtaaaatatgagtaacataaatcaacggttcaaataaattaaaaataggatgttatttgggttgtcaggtaaagaataggtggcagttcaaataacacattttattttttaaagtgaaatattggtaatattgattctaaattatttagctgtctaattatgaaacaaccgttcaaacaaactaaataaaaacagatatactacctctgtttcagtttcatattataagtcattttgaacttttttaagtcaatttttaagtttgaccaagtttatagaaaatatagtaaaattttcaaaaataaaaaacatattatggatatatatggaacgttatatctaacaaaacaattttgtgtgatagatgttgttaaattttttatatatttggtcaaatctaaagaaatttaattaagaaaaaagttaaaatggcttataatatgaaatagagggagtaaatttttaaaattatgattattttgctatgtaactattatctttttttttaaattgttagttaaaaatagatttgttatttataaaagcatgcatcagatcattaatcatttatatatttaggcatgggacatgcaatcaagaatccacagccattctcgtgagatagaagtgaagaaattaattattaagtaataaaacaaaaatcttaactactatagagaaaaaaaggaaagagatgaggagaagggattgaggggaaggaaatgagaacgtacggtagtggttgaggaatgatttttttatgagataaatccaattggcccaccagttcaagttatatattttttttaatttattagagtgccacgtggtggcttaggagtgtttataggaagtttaatgaacttttagtatataataatagatagatagatatatatatatatatatattatatgttgttaataagtatttaatttatttagatggcatgcaaacttgcaaaatgcaccgtctataccacaataacatattgcttatatatagcaaaatattggatgtaaaattgtcaatttaattataaatagagcaacgttttaatagaatataaattagctatgtacatttaaattatggtcaacttaactcgtttttaatttgataacataaaataattaagaagagaaagagatagagatataaaagaataggaagaggaagagacaggagagcgtactacgttcttatggttttttctttttccggcccatggttatacgaagccacacgtatgcacgtatgtttttttctttttctgacccacaacagaggaatggattactttcttaaataatagatctaatctaatggtctaaaatatcgagtccaccaatttaagtgaaaatcgacggtaagattatatagtgtcatgtggcggtttaggagtgtttgtaggagtgacacgtggcggattgagagcgtttgtaggaagtttaatggacttttagtatataatagatagatagatagatagatatttttatagaaaaaagaagtcaaagttgtgttttggagaccgtgtcgctgttctaaacgatttcttttacgagtatgaagagagtactatattatttgaagaataaagaatttattaaaactagactattgcgctaaccccggtaacatcgagataaagttttcggatcaaatttgccaaaatttcggcactcgtccgtcgtgcgttgatcgctccgagagtcgaaaaaagaaacaacgcagtgccgagaatcgaggtaccaagttatacaagcccaagaaaaaaatgcacacgtacatcgtacgagcctcgaaatgtacttgatggaacttaaatacggcagcacgcttcatcaagtatttcgtcgtgcacctgttcccgaagccccaatggatggatacagttacgtggagtagtcgggtacgtacggtacaagcgctggacattctcgactagctgctatgtaaggttatgcatgtgaagtactatactacgtatgtacaaacttcaaattgtacataacactagcccgtcaatgactccgttatatgaaattttggaactatttggtatatatgttgaggaaattaatcgtaaaatatagtgttattaaatttggtaagctcgagaatgtgaatgagtttttaagaccccataatttggtatagtttgatgagtagaaggttccaaaattgttaaaattttgacagggattggtaaaaacgtgatactaagatttcgttagagcatcaccaacagtatcctaaaatttcaaaggtcaagaaataatttaatcacctcctcgattgatcacctctatgtataaaaataatgtgataggggatttgatggtagaagctttaaaacaaagtaaatttagatgatgatattttagttaatgtacgcatatatgcaagttttataatattataagatacggtgagaaactgatatgcattatatttggggtggagtgaatattaactattacaaaactgtcgacgtttgatgtcgcgattccggtatttgcatagtatgagaatcgttggtactaggatatacgcgagactgaggtaaaagagacggggacaagtatttttatacaggttcgggccctgaatgtcaggtaataaccctacatcctgttggccgaagccggtcgttgctcttattcaccataatcacaccagtacaaaatttggggtagcctatctaactgttgtcgacatggcggtctgaaggtctgactcgtagtcgacaacagggtagtcttcctcctcgaatccgtgcccggcgagatcaaagatagcgctttcgtctctcctgacagtatccggagacaccgtaggggactagctgtgcctatctccgaattcgatatctggcgtcttgtcttggcgtatgttggcttgtattggcttgtggctttgtggcgtctatgttgtccgtggtgggtatgtcccctctcctcctagggggctttgtatttatacccatagaactagggaaaccaatatgtatacaatccgagtagtacttgtcgtttccatgtagaagtttggttgtctttccttatctggaactcctcctatatccacatgttgtttccgtataggatatggtatgtggtgggtcctgccgagatttagtcaactactattagttatgtggtatctataaccctaacgaaaactgaaatgtagatttatttattttttagaaaaaaactataaaatttttatacaaaacacatcgttcgataattcgagaaatatacccacgaaaaatgatggattacctcagtccatgagctgaatcaaacacaacctaagttagacaccccagcctcgttgccgatgctatgctactcttcacagtcgtaacgcacagcacacggcccccagtaggtctcgcccatgtcagcccagcacccgtgcacgctcacgcacacagccactgcacagtgcacgcacacagcacagacagaagaaaaaataattaagcgcgggatcaatcaccatctcatcttaactcgcaacgcgccttggatgatcaagcggcgccgggcaaaaagtcagcccgtgacaagtgttagctagctagccactctgcaacggtgctgccaattatggccgtgagatagctagaagatcgatagctgcagacaggaagccaggcacgctgcgatgggaacgtcgtcgatcaggtatagtcgatcgttgtaccaccattttgccaagttgcgagaccaaattaaagcatggacctgatcgagctctccgacctcgatctcttattttaccagtgaaatggtggtcacacacacagcagctagcaggcgagaatcgtgacatccactgcaccgcccgggctcgccgacttccctttcgcggtgagtacacagtagcgccccctgcttggaacccaatatgaccagttcgatttgtcgtgtcaagcggcctaacctgctagctatagcatgtgtccacagctagatggtactatatatcagtactaataagtgtgcctacacaaatctttcgtgtctatatggattaattaagttattgttgttgtgaatgggatttgatcaaaacgtgaaagtcgatcagcagggctgtatcgcggcaactgtgtgaaaccatgattttaacggggcattttaatttgtcctgcggctgatttaatttggtaagcagaggtatactactgagaatgaccttccacataaagcagtgcatacagaggatctaatattctaattcaaaacatgaaaaactagccacagtccacagaccacctcgtcccaatactttacacatggacatcatgcccgggataagatctgatttattttgatacggtacagaaggaaacattttccatggactaaggtaagtacattagatatatttatgtctgtgccacaaataattcctcaacaaatttgttggtacactgcataaattcgcatgttcaatgagtatacagaatgtgtaattatgcgaacagttgtgtgtttgagtttgtgttctagtcaaagaaaaggtacggatcgactttctcccttggtgagatcaggaaaaaaacagaaacatgcatctacgtgtaaaaagagtgcagattgagtctctctccacgtggtaggagaaatttaggaatgtcatttctgtggttcagttaacgcaaccatgcttatctcgcttctcgccctatacatctagctatcctttatacagttataactgcccaacacgaccccttttgagttttgaccgagatggggagtagaatatactcctagctagtcatctctcactgcatgcaccgtatgtacctctgtgataagttacacagatgaatgtcacaaaagttgggaaaaaggattttaatgtacactttcttttaacacgtggttcaaaaagttttaaatatttttaaaaatatagatagaataaattattatgttatatgtccctctataaacatagagaggtttaactcgatctacgtgaaaaaaggtcaaataattaaaacatgtcactgtgtgtaatattttttgtgattttaatttgatcttgcaagtttatatagtgatattaacatcacaatcgtctatgaagtctgatttttagaatttctttataactatatatttagcacgcatgaaactatggtgaacatgtttaatttactttcatctaatagtctcactattttacaaacttaagtcaatccgagctacaaaatttactgcatttaaccttgttaattagcaagggcaagacatagaacctaaataaaattgggacccaaatcttaatgaggcttgtgtccgaaaaaatgatatcttaatagaacaatcattggcaaagtcttatcttaataaaacaaaatagagaaaatagctacaaaatctactcttttttttacgtaaaatagtaaatacatctcaaccagggtttaaaatttcatttgagctatttctattggggctaccgaatggaccaaaaatttgtctgagataatttgaatttttgaacaaaattttccaaattctagaaaaaagaaatttgggcgaaatttcgaaaacttctgtatgaaaatttgaatcatgatctcaacccaaatcttttgccggttcgtacatacggagtatatattattaatattacttctagctccagtaatactaacttcactgttctatattaatatttgatatatttctaggtttgataagaaaccatatgtattcaagttgtatagtaagtgaaaagcttaagcctgctttggttatatgatttattttccatttttagagtctaattaagtcaaaaagaaaattttacagctactctaatttcggttgtgtttagatccaagggtgtaaagttttggtgtgtcacattggatatgcggacacacatttgaagtattaaacgtagactaatgacaaaacaaagaatccgcctgtaaaatgcgagacgaatttattaagcctaattaattcatcattagcaaatgtttacaatatcaccacattgtcagatcacggagcaattaggcttaaaagattcgtcacgcaatttacccaccatctatgtaattagttattttttcgtttatatttaatactttatacatgtgtctaaacattcgatatgacagggtaaaaaattttgtcaagcgatctaaacaggacttcatttttcacaccgggacagcaaaattgccacaagttatttcgtatcaaatcacacgacccaagtaactagtccctacatgcagctcgtcaaatcaggctagtagtggctttgattagtgcaagccttctctctgattactctttgctgcttaacgcggaaaggggaagagcgagagagagaaaaaaaaaatctttccggccgccaacggtcaccccctataagtagaggagcccatcttagctttctcctcgcagatgcaattgcgcgaacacctccaaactcccgagtcccctctcctctctcgtcttcctctccacgacgacctctccgcttaattgtgcgccgccgcctcagagcgccatggacttcagcggcgacatcgatgacctgatctccctccagctcctccacgatcagctgctcggggtcgaggccgacgcgtgcctcccggtggcagttcatcacgatggcgtcgccgcgttcgccgagcatcagcagggtttccatccccggcgttcttgccgcagcagccgatgacgatgacaccggctgggtacgtggacatggcgaatgatcagtatttgggtgcgca

SEQ ID NO: 16957 - DNA, 9059 bp, Oryza sativa
ccccgccgccgacgacgtcgacccccggcaaacggaagcggcacgagacggcggcggccgacccggacgtcgaggtgatcggagaatcatccaaatccgtcaagaccgagacgtacacatcgccggcgtcgtcgtcgctggcctcaacgacaacctcaacggtgacatcatcatccacgtcgccttccccctcgtcggaggcagctgcctgcggcggcggcggcggcgagctgttcgtcccaccgatgccgtcgagctggtcgtgggatcagttggaggggttcttcggcatcctctcgccgctctcgccgcacccgcaaatgggattcccggaggtcgccgtaaactaattaagcgcgctaatgatctctctaagcatgattaattaggcgcaataatcggcaattaattagtggcttctagttctcgacggccttcgctttggacacatctcaggagatttggcttggagcagtgtactatactgtacagaggagagaagatagtatattagcgcatgcatgtgacgggtactgaatgtgtgcatcgacataggtgttggagatacactctagatatcttgaaaataataagaggaaataatagtataggatgggtgataataacattgtaaattaattaattaaatgaagagtaaatgtgtactagtttgttttatgttcttttcttgggatcagatcgatcaatcggtgtctatccagttgtgtttgcctttttgcgccataaatttgattatgacttccgagtcttcaaatagccagggtaggagacatgtacaacgcacaagattttagtcatatgcatctagatgctgtaaatgccgtttgcgagaaaaagttccatatatatcttctgtgctttggatcgactagctctggccagaagtgtagtttaattagccacatcgaaatgagatattgtacatttccgtttagatgttaattcttgcagaaacggaaacaattctggttaacttcaagcaacaaccttatgccatacaggtcgatctcacactacaagtcatcatctagtacatgtgcatacgtactaatcagtaatcacatactagacgtatgcatacatcgatttcatctacagcgtgagtcatgcatgtgtgatgcacacagctaacaatcaagaggttgaactgagttagaatttcaaacgatgtccacacttgatttgattttcttggacgtgttcatatgtgcaataagtctaaactgtcaccagtaattctgaaagaaacacacgtacatactattgatctgtacgtacgtacttactataggtgttggtctgaatgtagtgtgtttcaaacagttgacactgatatacagtagcgtgtttaatttgtggattgcatgtgaatttttatgttgtcgccaaaaaatttaagttccagcctcctatcatataatgtcatattgatgtccacaatgtaaattcaagctagtcaaactatatgagtggccaaagggtaatacacctttaaaaagctaatgatatacggaatatgatatcagaaacagatgaggtttgcacataggtaaaaaagtttgcatgtgtttgctttgttgactacttgagtcttgagctagcatcaacccaaattaaaaatgggccttgaacgaagcttaaaaccctttagataagtctcatgcatgcatatatgcaatcatgtcaactcttgtcaagattacgtgctggtaaaatactattgagttatatcgtcaattcgtcataagtcagaacagaatccagatagccacaacaaagtgagtttactgccacatggttgctcggcgtcagtttctttgcacgactggaataacctaatcgatcatgatctaattttaattacattgagaaaggatcgatgccctacggattagtattggtcacttgttatggaagatggcatgaagctgctgcttatttttttcttacctagcgagggaacagaggaagtacgtattccctctttttttaagttgtaatttagaacactgatccaataaacatatttttaatcattggtttttctgtcttctaaatttattttttagataaaacaaatatgtcaaaaagaaaacaatacgaaagatgttatcaagaacactaatatatactccctccatcccaaaatataagtatttttaaacttcgacacgatcttcgagatgttactttgaccaataatatctataaaaataagatgttttaaacaaaaagatttgcatattatgatagtttgtttaatggtaaatctagtaacatcaatttgacatgattaatcttttttatttttttcgttattaatagttaaagtgaaaaatatttaacttgttactatgccaaaaatgtttatattttgggacgctgggagtactatatatctccatatatcaaatccttctttcaatctgtacatgcatattagagattagatattttgaggtttaattatgcatattatgcaacattatctatttgagaatggagccaatatctgtgtgttgtacaaagagatgcagtgaaattaacctcactcccgtgatttcatatatcacactaccgcatccaaactcaactgacagaaaggataactacagatcgtctccatgtacttggtccagcaagaaatttggtactgcaggacaacgtgtcgtcagtgaatgaggtggcttagcctgcatcactccaacgaacataaagtaagttcagtttcaacagtcaacggctccacgttgaagagatcaaagtgctcatctataggggaactttgttcgtgtagcattcacgtgcatcgatcccgatgcacgaggtgcagtatatgtcagcatgctggtcaagaaatgaagcattgatcaatcgatcgaccgggccgttgatgcgttgagaattataccctactacacgaacaaagggaaaatacccccatattgtggtcgttttcccttgctttccgttacagaaatcaaaacggaaatggttctaggcttctagctagctaggcgcgtactccctccatccaaaaatagacaaaccctgaatttccgtgtccaacgtttgaccgtccgtcttatttgaaaaaattatgaaagaaattaaaaaggcaagtcacacataaagtattaatcatgttttatcatctaacaataataaaaatactaattataagaaaatttcattttagaaggacagtcaaacgttggacacggaaacctagagtttgtctctttttttctttttaagaaggagggaggatctgtgtgtgaaagaaacaattagaaaccatgtttgaaacatgctggcccaaatacatgtcaaattggctctgaatttcatgaagcacagcggaacaggctgccataggacataggtactccatccgagacaggggaaaggctaaaatggccgaagaatgcactcgcaattttttgaccaaaagtattcgctctacaacactagcccgtaaccaacacgtccaaagttcgatacgccctactcccccgttcaccatcagactaaaaaagcgtacgacgccgccgtcaacggcggcgttggtagcagcaaaaaccgacgtaacaagccgcaaaaccttaccgacccaggatcgatcgatcaagagctagcggcgtcaaccgggcgaagaaaaaccagaaattttgaccgctataatcatgaggtgatcagagaccgccggtcaagctgtttacggcctttgcggtgtgcgatcgaattgaagctgtagctagcaggggaccgtgctggccttgtcgctgttaatgcgttcgtaggcagttagttaaaccggcacaggggagttttgacgtttcatatcgtacacaaccaatactaatggcaaggtggtgctagtagcaaggtgctatttcatacagccttttgacaagttgatgaagaattggacttgagagagtagctgaggaagaatttcgaatgggtatatatggtcagagccaatcggacatgagccggttcaaagtaaacctgaatgctgtttcagcacagcctagagtcaatttaaccatggttcagaagtacacgggattcaaattgagatcctgaaactaagtttgctactagtattatcaggagtaggttaatttagtagtactacgaaacaatgttccagtaggctctagaacgaatctttacaggaaataatcttatttttctgcatattgaataaatttcttgagattaaatatattaatcttctctgtctcaacgctctcattatgtcttttgtcggagcaattaaaagtcagcgtccactgtaattttgctggctagttttagttgacagattgaacactcgaatgaggcacaaacccatagaattcacttcattttggcatcaactttcttcgtttcataatcacgagaggcaattcagagaatcagaaacagaaaggtgagaggaaagcgagaggctttacagtacatggctacatcatcaaggtcaaagcgatagcgatcgaagggctagctaatctgcaataaatacgcctgcattccaatctctcgatatcgctctatttttatttctttatgtgtgcaagcaaaaaagtcagaaatcttgttagagaatctgctcaccgttggcagattgaggctggaaccaggagatgatgacgacgacgagctcttgcaagaaagggactgcaagcagatagagggccaagaaaaatgttaaccaagagaaccttactttgatgtgcatatgtgtcttggtctgatccactgtctcctgcaattaactgcattcttacaaataattcaatggttgacatgcgatcatgaactgtcgtcagacgttgtcaaatcaaaccaattgaccctagagagacgacctctgccgtacatgtacagtgcccagcagactatcgagagtaagagtttgacttaagtttctctttattcatgtcgctctcgccatgggagaaaaactaattaaaaaaaacaaccaagaactgtctgctgaatgattggtactgctagcttcaaccttgcatgctgcacatcgactacgcgtgcctgcacaatgtacagacgctgttacgcatgtaaaatacgttgcctgaaactttggcatgcaaattgcgttgtccttgagatgaaaagaggaaataacaaaatggttgttccaaactacaaacagaaatctatatgcaagtactactaatgttttctggcaaacaatactgaatacggcgtgcgtgacaaataatctcggatcacgagttttgtacgcgtgcgtacgtgtatctgaactgttgtccggccacaaaaccccagcctccgaagatagccacacggcacactgcaaaccaaacgtgtagcagcagagtgagatcgacagacggcatcggtcggcatccgatcccaacaacaacattgacaatcagagcgaaacaggtgttccccaagccaccagttttaagtcagctactcccgctatttcagattttataatcattttagttttgatcaaagttaaactattttaagtttaatcaagtttatagataatatattaatatttataataccaaattagttacattaaatctataattgaatatatttttataatatacttgttgggttaaaaatgttactgttttttctacaaacttaattaaatatggagcagtttaatttttaccaaagtcacaacgacttataatatgaaatgattataatgtgaaatgaagggagtagctacttggcggcagctacagtaatgaagtcttcacgcaacgttgacgttctggagtgagcagtaatcgagacgctacgtcgtgttccgcagtagtcgcgctcgtaaatcgaatccatgatgcggatcgacggcatgcgagaccttgttgtcagtgtctacagtaactgccccgccgtcgatcgttttccgtggcgcagcagcagtactagtagctccaatttgcgagcccattaatgccatcagctttgccggtttgaggttaaccccgtacacacgcacgctcgctcggctcgatccgtcgatcggcattgcttctgtctctctgtgatcccgtgaaacaggccggtgatctgacaccaaaaaaagtgtttgcgagaccaataataatagggagagatgagagcttgcgaaacattttctgatgctcctcgctgggtgtaaacgcctcgcgtcgccgccgccgccgcgcgcgccggcaaggcgcgggcagccgcacaagtcacaacctctgttgctaccgcgcacacgtacgccgcgcccgcgcgcgcggcggattttggctggaggctgccgtgatctgtacaatccccgtggaaactgaaaacccggatttttccaacaacatcaaaaatttttcctcggtttccgttctaaactccaacaacatcaagatttttcctcggtttccgttagcacacttttcactaaacggcgtatcttgtgcgaaaactttcaggagaatagctaatatagtccctaaagtttcgctcctgggtcattttagtacttaatctttcatattgtctaaacaagtcctttaaatttgttatgtgggctaatatagtccttggtcccaccaaaatcaccacatggacatgccatgtcaccttcgtacgcaaaatctatatgatttgtccaatttacccttacgcataggaaaataaaaaacaaaagaaaaagttaaaaaatatatggtatatgtaagagcaaaaatatacctcaaaagggtgaaaaaaaagaagtattttttctatggttatgtctaattcacccttatatttatttttctacgatatatgtaagggtaaattgaacaattcatcatagattttgcatgaatgatgacatggcatatccatatgatgattttgatggacccaagaactattctaggccttatgacaaaagttaagaatttctttcgaccatttaaaatgttagggactaaactgatcctacagataaactttagtgactaaagtagctattctcccaaaactttctatatagaagttgctataaaaaaacaaataaatccattttcaatttttttaataattaaaacttcactaatcatatgctaataacttatctcgttttacgtgcgcacttaatcttaatccgataagcagattcgaacggggtcgaaaacacaaatataccgatatttcgattaagttctttttttataagaaaaatcgaactgaactattaagttttggtaatatttgtttggattttattagtttttatcggtttatcaatagttttcgtgaaataccgctcttgagcggttttgatccgatactcggagtcgtaaactctggtgtcatgtacggtggcggcgggctgaccgggtggttgttggtatgtgcacacggttgccccgggcgttcaccgttcgcggctgggggtggtgtcaccgtgtcagcaaggtgagattttggggtagagggccactacgtgacagctttgggccgggaaatccgaagttatatccacattgcaacgagaggccgtccagattgtatcccgttttgcaggtgaaaggtcgtagctatcacgtatgagggcgagagaccgtccaagtggtgtaccgtttccagatgaacacggtcgtaactggtatcacgtatgggagagctagagaggtgtacattagctccgacagtggcttcaggccttcaatttggtcagttccagccaaaagcaaatacattgccgctaccatgtggtgtgaaatagattatctgattttggtgtaatatttgagggtacatgtaaataaattaattactataaagtgcaaaaaatgtttttagaaagtattctaagcaacttgtacacgcaaaattttgtaaaatcaaaccgtttaggagtttgaaaagtgtatatgtgattatctataatctgtaaggggaaaagaactgggcctctgtccagggcattggagatgtgagagaaatagagaacaaatgcaatgaaaatagcagcactttgctgtagctgtagcagtactgaactttatcacaaatcaaacggccgtacaaataattctaaacggatatgctgcgtgtaattccaaatgcatgttgtgcagtgttgccatctgccatactcacattttggagtcagtccgtaatttggagtcaaatgtagcctcacattttgtagaccctgtccaaatgcctactatgcattacagtggagatgttctatctagaaagtcagataaaatggccctccatgacatgtgaaattcacttaaactctttttctttcaaagcaccaaacttggttttatccataacgagcagctgggcatcctattcaccatagaatggttgagcctaaatcaaagtctcctattttgaaacaggaatatgaattgccattatataatgataatttctttggtataagaaacaatattatcgaaacgagataggcaaatcggcaggtataaacgagtgtattacataaggtgttacataagatcacatggactaatacatcatagttcagtactctgtaacttttaacttattccaaaaacaccactgatgacacacaacctaggtaaaaacagcagtacaactgatggacaatcgcatagaggtgcaataggttcaaatccacaacccagtcttacttgctatctgcagaggcctcgactatcttgacagcagaccaaactcgcctgtaagttcaatgacacgtcatcagcgtatggcagtaaaattgtgaaagaaaaagaatcttgacattgcatcaaagcaaggtggaactctgcatccagtgccgactgccgaatgaaattgatgtgatgtttaatgaaattaaacttagtttcaccaaatttcagctgtatggaattcagacaaggtcatccgaacagtctagtccttgataatgtccacagaaaataaaaaggatgattgtccaaccacagcagattacaggaaattgcatctacagaatcaaagtcttgaaattttgatatatg

SEQ ID NO: 16958 - DNA, 13638 bp, Oryza sativa
ttgtaatggtttttttctgaataggcaaatttgcaatggcatggatccaattaaccccaggttcaataggggaagagaacccatgtagtttgagccatagaaggattatcttgatacagtttggatgaagggcagacatcacttattcactttcaaactactgtaagggatggaactgtttggtaattgggttgtgtttaatgataaagcaaagacacagagagaaacttgatctgaaatgctctgcatcatgtactagtaaaatttaagccctatctgtttgctcttagcctctgggaagccacagctctcagaaatggactatcaacaatgcatcaatttaaacactgcatgactagggtttcaagtttcacttttcaatgtatgaaatttcagccaagcattatttcaaaatgagtagaaaaactagctcatcagacaatcaccagcatagtagaacactcagagcagccagaaatgtagtatcaaatcaaatcaattgcttaaagatggacatcagcaaactattccaagagcaacatacagtacaacagcaaagtgtgctatacataaatgtacatatttttcattccaacactgcagtacttccaatgtgtggtgattacccagtgcttaataggctacatattatacactagattagtatcatggaacaaaatttctcagagaacaataatatttaaaatcacacaactgttgtaccctaaaccaggttacctagatatagtatattgcaataggtgctattgcgctagagctggaaactaccagatgcagttggagaacaacatgcataaatctgttgctccccaactgttactcctgttatcgatcaatcctggggttatagtagcagaacttacataatagaaatcagtaataaaagatgaaattttgttgcttaataggaattagaacaaaattaatatgacgattgaaatgtcctacctttccctcacgcagacttggatgcgatcattccggtcttccgggcataggcaaagatcccgcctgcctcaataaccggcccggcatcgccgataggcttcagcttgtactgcttgccggatgtgtggttgatcatgacgcaattatcaagttccaccgtgaccacatccccggtcttgcactccttccaggctccagtgtccgctagctccaacgggtagacctcaccggtggccacggagttgcggaagaagatgcgcgcgtagccctcggccacgacggcgcgggcgccggcggcgcccagggcgacgggcgcgtgctcgcgggaggagccgcagccgaagttggcgccgccgatgatgacggcgtagcgggtggtctcctcgccgggggcgacgaacggcgtcgggtaggccccggtggggaggccgacgaaggcgaacgagccgagcttgcggtactcgtcgggcttggacgggaccagggtcaggtgctcggccgggatgatctggtcggtgtcgatgttatcccccacgacgaagcactcgccgtggaatacgccggccgacgtcgagtcccccgccgcagcggcagccgcagccgcggcgaccacgggggtcaggggacgactgtggtggcatttcagggcgggccggcagatagccgcgacccagctgcggcggcggaacgtcctcgagggcgtgggacacggtgccagaactgctgtcaccggcgccgcctcggccaaggatagagccggagccgccgccgccgccgccatggtgttcagtgtgtgagggagaacccgaaccgtgagaggcttagggccggggaccgtgaagcaaaagaccattatgccccttctccccaccggccttgggccgtaacgagatcgtgggctgcgtgaagccccattattattaggccggagcgggatagttgggccagaatgggagagtgtggcccatggctgtcgtcagcacagcacacgattgttgtgctgctcagactttacgatttgaattctgctccgattttatttttttcccgactagaagaaatgtccatgcgttacaacagataaatgctattttaattttattactgttatacggtttatttaaagtaaaattcactgtgggaattcgtttggatatatattttcttagaaaataatgagctgcagttaggaatctgatcgtctaaagttagcatgcgagtttttttaagggatttctatacgactcctttgcatttctaaaagcaaacgaacttaaaaatcgactcaaatacggatatatattttcaaaagcgaacgaacttaaaattcagactcatatacgaattacgtaacaaaataccagaaaaacatcttcaattttataatagtacagataaaagttgtgctccgattgtgcatgcatgtgctgatttggagggagtgatattgctgcagttttttagctgcatttgaagactcactttttttttcgattttaaactttgatgaataatggataatcgagtttaaggttgtgttctctaaagttttgatggataatgattataaataaagtctataacatttcacataaataagagatttaaatattagaaagttgatttaaaagttcttttttttaagacatgttggtaaagaaagtttttgtaaagattatgccatgtaaacacttagcaagctcaagtttttgataaaatataaggagagaactccgcgttgggcacccgatccgggaggaaaatatcgggcactagctacaccatcttatctgggcaaatttgcatgcgtccgttggattgaagaggctctctccatgcggatgaggtagatttacgctcaggcacgcagcccaagaacaaaatattttaaactttaaaatgttttttcttgtaaaatatttatctcatttatgatccgagtacaccgttaaattcgttatgattaaatctttacaacaagaccacacatggttatattccattgaaaacaatatttatcttcttagtgatttttaaatattgcaccacgttttataaagtttcaactactagtattttacgatgcttcacctgtttaatttataagcgttgcagttggttttcttttagtgtttcactaagtattttataatgtttaaacagttagtacaacttaatattttacacatgatatagaaaatgtttcaataacatcaagcttcagacggttaaatatttcagttgactaccggtgaaacattgagatatacatggtaaaataaaaaatcagtcactgaaacattattttttttaaacacacagtgaagagacacattgaaacatattgttatcgcgtatgaaacattgagtgttaacaaaccgaaacatatggggtttttcatcatagtataatcatatgatatcttgttgtaaagatttaattgcaacaaatacaacgatatgatcggatcatagattagataaatagtttaggagaaaaatcattttgaaggtcactagatgcatgcaatctagaggagagagagaaagtatgtgtagttaattgtgtgaattttatgaaacatggtaaatgcgtacattgaaccatgtccatatcacgcatgaaccattgagttttaatagtttgaaatatatgtttttcttttatcagaatataactatacgatatattgttggaaagatttaattacaatgaatacaacggtgtgatcggatcgtaaatcggacaattagtttaggaaacaaatatttaaacaaaggatgtgggaagctataaactagctagcttctagctatagcttcgtgcatgagcccgatttttgttggctcaatcaatgtaccgattcaaggcattttctaaaatataatcatgtaatatactgttgtaaaaagatttaatgtaacgaatacaattatataataaaactatagattagataatagtaaattagaagaaaaaaatttaaaattttgttatggaaattattatagagagaggtcagagagacaacgggtatagtatcaagccaaggacacgagctgcgaacaaaaggggaggaagggcacaagatgttttgcgttttatcaggcgcatgatgcgtagtctcctaaaaaaaagtgaattggggaaaaagtggccgccctcgtccgctgcatggatccacgccctagccttgcccgttgatggtgggcgggcttcgccggcggcggggtggagatggacaccgggaacaaaggcacggcgacaccggtgctgctcaacgtctacgacctgacgcccgccaacgattacctctactggctcggcttcggcgtcttccactcgggaatcgaaggttcgattacatgcattcttctccgttccccttttatctcttgattgggccaaatcttcatcgtgttatattggtcgccactctgttgcaaaaaaagattgatgttctatttctcgaacaaattatcgatcatgatgatgctttgttaaaataaaaaatcattttattattctgctgtaggatcaaattagatgtttcagtacctattgcaattaattgtagggcaactcagttttgctcttgctgatggacgtacagtaataatggggaaaggggaaaacagagacaatgtaagtcttggtagcaaatggtagcaaaattggaaggataattatgcatgtagttagtttttaatgctatttttcaaaggaaaatgatcacttatgtcagaatctcacgaagggaaaaaaaaacactaaaccgtggcctgccaagcagtttgcaatgcataggaacctcaaaatgaatcatagccctatttggatatatgatttctactatccggctaaagcaagcacggcgcgtttaaaattttttttcttatcgattatatttccctttttactatctgactgtcatgtcgtgatctaggtagttcacagaattatgaactcaagttgttatttatttttcttgtctcaaatgagcagttcatggcatggaatatggatttggagcccatgatttcccatcaagtggtgtttttgaggtggaatcgaaaagctgccctggctttatatatagaaagacggtgtggctaggcacaactgacatgtcccatggagagtatcgctcgttcatcgaaaagcttgcagggaaataccatggcaactcatatcatttggtttcaaagaattgcaatcacttcacggatgatgtgtgtaagaacttgactggaaaacccatacctagctgggtgaatcggctagcaagagtaggttggtattgctagcatgtgttttacttcctgaattggtgaacatcgtaagcaattgaatttttttttttgattgaatctgtaggttcattttttgattgtcttctaccagaaagtgtccaggtttctcctgttgggcgtgtcccaactcttcgtccagtagctggtcagtatcttcctaatttttccctctattgtttccttccagaaaaaagaaatcctctgttattattatatgtgatgtacaattggtttttgttagaaatttattaaccaccagttgcagtcgattgattggtttcttttcatgatccagatgatgatttggattcaatatccacagttagtgacaacaatgaggaggacaaacacttgctgccagcaccgtcgaatgacctacattccgtagatgtaccattaaagttagccaaagatgttctttgaattgtttcatattttcacaaaacatgccatattatcatcgcaagtgctgcagtcggggtgctgaattgtttctcgaggtgacttcataggacaacaccgttgagcagaggttcccgttcgtgatactgatttcttttttcagagtttcctgtccaagtaggtacactgtatacaaataggaattgcccatctttccagctatttgttgtttcactatcgtacagtgagattgttgtatcgtccttgctacttttttatggaatatcatccatgctactttggtagcaatggtatgacattagtccatatgtcatggcagagctggaatagacatcgtactatggctatatacttatatttttctattagccttgtgtaaaaattgcttgtatgagctcggaaatgagaatacacactataacttactatcattttgcatcattgcatggtcaatgatttgtgtaatcatgattggttttgttgtagtgcagatgaggacaagaggctgccaaacctcgattgatttcaataagctacacatgaaattataaataggttgtctacataataataccagtgagttccttgcaaaaaaatattatcaatgaattacaatagattagagattatgattagaaattacaataaaattggtccatcagttggcgcgcttgtttattccttgcccttagcccatatatgtaatttgcatctcctttacaatctaggatatttatatgattattacaaaaattagttaaatgaccataaaactctttcgtacaatatattaatggttttgaaatttctaatttaatatgcaacggatctatcccgaagttccaatcatagtagagaattccattatattttaaaatattaaaagccctttaaatttcctcttttcatttgtcatgcttactagtaaaggtactattcacgtccatgtttctcatatcactaaccaatatttagataaaataatattaatattagtgtaaatattgtagtcatccattgtctagttgtatagtaaccgcacggcctatttaatccaaataatatagaatgagatatttcatccaaataatatagaatgagaatcgagtcactttatctaggttcctcttctcgatagttctgcactattcacgtccatgtttctcatatcactaaccaatatttggataaaataatattaatattagtgtaaatattgtagtcatcaattgtctagttgtatagtaaccgcacgacctatttaatccaaataatatagaatgagatatttgatcgaaataatatagaatgaaaattgaaaataatattaatattagtgtaaatattgtagtcctcaattgtctagttgtatatagtaaccgcacggcctatttaatccaaataatatagaatgagatatttgatccaaataatatagaataagaatcgagtcactttatataggttcctcttctcgatagttctgcttgaagttatttctttgtttttttccacaaagcacacaatggatctttaaaagctagatgtgctcaggttcaccaaactgttttggatggggttaccgccaccccatggtaagaccccacggtaagacggttatcgtggtaaccgcggttacagtgaggtataatgtcacaatatatttgtaacatattttaaaaacatgataggatttgaccaaataattatagttttgtgacatttgtactaaatataattattgtattatgtatatacaaatacaactattatttttttcattaatcaatgtaaaatttttaggcgaccaaagcaaacacagtatcattgctaagctatctttatcatataatagatagattattttcacccattgcaacgcacggacattattgcaacgggcattttgctagtaatttttataatagtagaagaagagatagggatagatagagaagagattggctgaggttcttgccgtttcttatctatttgaattggaattcgcctttgctctgttacttgtaatcaaaccctcctttcaccggttctggactctagtggtaaatcctttttgtacttgttctggactctagcggcttatgccatctatgagagttcgagttcatcccaaattataaatgcaatgtcgggtttaactatacccaaattataaacgcactgtcgggtttaactagacaattgcaatgtcgggtttaactagaaaattatttgagccattttccgatctcgagcagttctcttcagctaaactcgatcgagaaatcttagggcagcttggcagcttgaatagtacatatacacaacccaacaaatgtttgtatggaactaatctaggaattgctattgcgtatgtctgtctattaatctacctttttaatttatattatatgctactcacatgattttttttatttatgtttaatttgttctatgatgtgcatcaattgtctgacaattatttttgggcaacaatggtgaataaataaatcattttaagtgtaacgatggtaaaacatttgacattttactttcataagcaaaaatctggaatcgtgcacctgacattttttagtatgatcttattttctttgatcatattagcaatgtatagattacaagtattttaaatgaaatatgttacgtgatatatactcctaataatatgcatttgcacatacttctaaatataagatagaataacatctcttattacacgacttatgcatttgcaaatacttctaaaaaagtgttgcctaacacaaaatatatacaattgtagataatgtaagtgggttgaacaatatatatagtgtattatgaccattaaattcataacaaatgtcacatttatattctttatataaaaactatagatagttataggactatctatatataaataataatgcatacaaatcttattaccatacaacatcctaaatactttttggaaaaaaaaaatctctcctgatttcaaaaaacgagttaagcaacatagatatataaagtattatttgtatgtacaatatttgcaaataaaataacacaatcttatatgtgaaaataaattatatacggtgactacagagcttgggcgcgggtctacttacactagctcagggtgcaagcataagtggtcggagctagtggcattgttattgaagatggaaaagagcaagcaaacaaaatagaaaaagaaatgaagggacaaatccttaatttcacactgcattatggcaaaaagaatgaattggtattacaattatgaaatcccacttatattagtaattagtcttaatttaatcatccaaaacaaagtgactattaaatttactagctgacgtttgatatgcttttttttcttatttagccggttacgaatacgcgttgccgttgtattcccaacaagtgccaacaatactcgcatatccggaccaaattttctgaaacaaatgcaggcggcgtcaacactcaagatttaaataaatcaatgatgaacatttacaatgacataccggttatattccagttacaacgaacaacgaacatgatcataatacataatgaatgacgaggcatctgcagcgagttttctatttctcctgtatatatgtacttgcctatcagtttctcctttttagtgccatttatcacacaaccgaaacctggattttgcgataaacttgctcaccaggctcggcaaatcagcagttagcaactgacgttcctcgctcaagcttgcttctagatatcggagctgttttactataggacgaaatggtcgatcatatggtttatgacatcggcaccttcgctatgcataacgggatctttgacctgtccaaatttcatttataagcatgcgttaatctcagcgctatgtcaacaaacagaaactggttgctaagttaaaagaaaactacgagtaaataatatcgactctgtttgtacacagcatataaaagaacaaggcttagacgggcaaagagatacctgaatcacactatgtgctgcagatcttactttgctgttgtggaagctgacatccaccttttcccacgacacaagcttcagacctcttaaaagccgttctggaaatttcagaagaagttatgctcatatggacataacacatggcataggaaataagagcaggtcaggtcataatatggcttatatgatcacttggacagaacacttctgtagtgcatattattgttccaattcgcagaaaatattaaaagcctatcggaaaacgaggacagtccaacgacatcatttgatttttggaacaccacacgcatgttctaatatattgacgggaaaagtttttgcacattcacgaaaaaaaaacatagtaaacagacagatacaatcagagtactgtcgttgagcatggtctcatttgcaaccatacatatggagttatggacattgttaagtcacaagaatacaagcaacgtgcattctgtatagtcggggggggggggggggggcatgtatgggagatcgcacgctagacccactcagcaatgcagccatgtcctggttatcccaagagccttagcaaacttagaagaaatagcttatttccattttcccaaagaaagaactataactaaagaaagaggtcaccatatgtcatataaacatgcataataagtagcatcccaaaaactcttttctttcactaggtaaaaacaacaatctaattaggaaaatataaaacatggaattacataaaccatggaaaaatagttatatctatagcactgaatatttatcagaaatactgttattgataatatgggattacaaatattaccaaattttgaatataatcatgttgatccattatcaatcaaaacaataatacaaaccttctaacatgcagctgtccacatcggcaacatcagtacattgattcattgtttctgctttggatagttcttcatatacaatatgtgggtaaatcttgcttcctgaatcagtccactgaaatagcaagaaacgcgtatgtgggaaaaattcaaggttcagtatacaggccaaactaacaaagtcacaaaaaagtagccatgggggtaaaccttcggtagctcagaatttcgcctgatggatgatgttctccacccaacaatatcttagtcaacatcaagttatggaatgatattttaaacaatacttagtactaaatgtatatttagtcttttagtagtaaaagaaaaggatacgatcatgaccaacattggagtatgcaactcttcgtttgaatactttcagagcagacctaaaacaagaagttaataaacttaacagtcaaatgattcatgatccaagcatatagatccaaatgatgggggaaaacatacatgaactgtacgcccccccaatcatccaccatgcgtagcaacaatggaggcttcccatcatcattgtccataagaaatagatgcttgccagtttttccgaatatcaaatgaatgatgtagctggcaaaagtttctattgcagtaaatccaaaaaggaaaggaacctgcggattgaatttcagaacaaattaataatgatatttcaacctgaatataaccaaagccatatgtatctctacaaaagaagagttctctgctgattgcatggttgatcttggcatcacaatattgattaaagaaaccttagcaacagtactgagtacagactagcatgtgcttaacttgaagaaaatgtacatgtcctggagcctggagcatgaatgttcgtgcaagtatagcaattcagagtaaggtaatatactatattcatatcactaaaagcaagtgattgttcaacctcgaaagttttaaataacttatcaattcttgaattaagtacagtaaaacaaggtttaagtagtacctgtttgtttcctctagaaccaagatgcggtgacgcaacagttatgaagttcactgcctcaagcccatgtatagtacccttattagtgttgttcagattctgagaactttgggatgtttgtttaggtggcctatagagtcttccaatagcatatcttgcaaccaatcctccaacagaatgtgcaacaaaagagatctttctgatctgtggtcttttgttggtttcttcaacaatctgcctttctaaattttgtcatgaatttgggaaacaaagacatacatactcagcaaataagcaatatgcacaatgaaatcactgacctcttgtgccaaccgctcacccatcacatcaacgccatctaaagttagcttgtacatgttgcgattgctacctacaaaattaaaatatcactgaagtaaggtaaccataatgaaatggttcaaagcaagaaaacatccatcttaattatggaacatatgctgtatgactccagcctccaatgctgtagtgcaaatacaaagacacatatgattgtgcattgactgggataacaaagttatctactatatttgaatttgtgtttcacatatggaaagcaaaataattatttgcaacaatccccttaatgaatcataactttgtaactgttgctcacaggtagggacatattctacaagcgcaacacaccttggtgatcttgttgcaatgaatgatttggaaagagtgcaaagttaggatattcaatggttgtttgaattggacaatagaggatattgtttgggtgatccgtgaggaattatgggtgtgcaaggcagccgagagtctgttgtaaccgcgtagaggggcatgctccctcttgcagtcttacaagtagcctctgagcaaggagatcccaaaaaacatggaagatgaggtaaaattcttttcttttttcattatgatcaccaaaattgcaaaacaaaaaagatggcaccaatgagaggtgtccattgggcacattcccatcgtatcacactttgtaagttgtaacaggtattgctattagataagatgccataatggtcttactgaagtatatatagaaaagtggcagtacaattgctcaccaaacaccattcagaaaaatgatatacacactcgcgaatagggagaagcttacgatgaactataactttgtctgacagcaacttttcaaattgctcagctccaaacttccaatcagctgcactgcacagatgaagaaagaaagatcaatgcatggaacagacaaccaaaacgatatacagaagggtaaaaaaaaccagttagcaacggggctcagtgatgcactaatatatggctgaaatgtgcataagcatcgtgctatactgcaaccaggtagttaagcactctcgattctcaagcgattggtatggatctaattttgcgtgccttgattggaaacgccgacctgcccaatatgaaagaatgccatagcatctaagggatatctcaaattcagtttgttaactaagtgcccaaatctccatattttctgtccactgtccagcaaaaaaacgcgcgagcccgctgctcacgcttgctatagcgatacctcgctgaagagaattcagagaacactgaattcagagagcgcaactgaacccatcagagaataaaccatacaaaaaataattacttgaattcagagagcgcccccgagccgaaggccgaagcaattaagcagccaaaaattacggcatcaaaccaaaagcggatcagcacacgagccccccacgagcttagtatccattacctcccgacgatcccgtggaccatgaccaccaggtggtcgggctcgggcccgacgccgccgcccggtgcctgtgcctcctcctcctccgccgcggccgcctcatgccaggctcctcccaggtcacccatacctgccaagccagccacgcaagcgcgcgccgcgaagggggaagcgaggaaggggggagagggaaaagggagaggagtggtgggggggaa

SEQ ID NO: 16959 - DNA, 9720 bp, Oryza sativa
cttggttttagtttattaggacaaccaatgggtttttttgatcgttttattagttataaaccggtgtgagtaatactcgttggtttcatgccgatcgccctattggtgacatatactgacgtttcatgaagatctatctattcaaaatctacttgcacatgttgataaactttttatttcttattgcaatagaaaaattacttaatattggcagcaatactttgaacttctttagatatatgaactaatagtatcggtttgatgtggagttcacaaaatcattagctgatcgaaaactgctctggagttgttttcaattttcatgaaaaccagttgaaaacagaagtagttcagataaaaaactgaaactaggttttactttaatttgactgttttattgagtggtttgtcaactagagccaactcaaatctcgtaattttacaaaaaccaaatggttttcatcggttttttcaatccgggtgtgatatttgtctaacttaggtctcatttgaactagtagcggataaagattaattggatttaaattattttaatttaaaaataaatttatctaatatttgaaagtaatttctatataaaaagttttcacacaaaatatattatttaccagagtgaaatcagtatcttaattaaaaaaaaggagcagaggagaaaatgtatcctattaattaggatggacgaagcagaggagaaaatgtatcctatatatctaatattacgatccaaggagggtggaaattggtgacatcaacaggctgtgtgtaccatggcaatgtacagcatgtgctcacgacgcctaagaaaagggcgaatttgtctttaatcggtagcgtgtagaagcactaagcactaacagcaacaaaatgacccgttattatgcggtgtctaggtcgtagaaggcacgcgtcgatcataaataaattagataaagcgacaaccgaggaagaattgcatgctttgtggagtactgacaagtgacatttgatgactaacgtcgcttctctctatatctcaattcgggccgtgtttatagatttattttatttcttctaacttccaactttttcgtaacatcaaatgtttatacacatgcatagagcattaaatgtggacgaaaaaaaccaattacacagtttacatataaatcgtgaaatgaatattttgagcctaattacgctatgatttgacaatgtggtgatatagtaaacatttagtaatgacagattaattaggtttaatagattcgtctcgcagtttacaggtggaatctataatttattttgttattagtctacatttactacttcaaatatgtatccgtatacttaaaaaaaattggagcatttgcaaatttgccactgttttttctaatattgcaaggttgccacttaaatgatagttctagtggcatttttataatttttttagtggcagttttgcaataacgattcaaagtagtggtaaatttacaattgcctaaaaaaaaattttggcacacgaaataaacacagcctcgatcgcttcctctgttcttttttctaggataacttaacatcgttctgaaaacgtaggatatatattcgttgtgttaaactatacttgtcgcgaaaggaaaatggaattaacagcataagagctcaatgtcccgtaaatgacaaatgaataaaagctagtgattgtgtagaaggcatgacaaatgagttgatggttgacagccagagctgatatgatttcgcccgattaatatcgcaaccaagcttgttcagtgcacgcaaaaatagtgtgctagccaggaccacgtaattgcgtgcactaatcctcgaatgcgaccatggaatagaatgaactagctaatcattagaatcctcaacgacctagaatttcaattccatttcgttcgtgtggatgcttaagcctacaaaataatattacgtccgtattttaatatatagtattattaactttttgaaatatgcattcatcctataaaaatataagtcatgctaaaaacctttagtaataaatcaagtaaataataataataattttaaaaataaaatgaatcatcaaacttattttaaaaagtaaagtaaattatatataaaaaaattaatggagtactttgaaatgccgtttaatgaccgagtaatgcttatgaaattcctctgaaaaaaatgagtaatgcagatgaaatgaccatttcaagtagccggaccgtttctttttgggtcagcgttcagattacccatagacacagccacacaagcatcttaattaacacaatacaaatattctctccgtttttaatacatatgttatcgttggcttttcaacgtgcgtttaaccattcgtttcaatcaaaaaatttatatgattattattaattttattgtgatttaatttatcatcaaatgatttttaatataacttaaatagtgttatatttttttaaaaaaatttgaacaagataaatgatcaaacgattttcagaaaatcaactgcatcgtgtataaaaacgaatggtcaaacttttttcaaaaaatcaacgacatcgtgtattaaaaaactacagtgtgtgtaaccatgtgtttgagactttgagctttgaggcgatgcgataaaggcagaggcttcaaagtggacagcgaccgagaacgacgataagatttgcgacgccgcggcgccacgtcaagagatagtaggtgtccccattcggtaggctgtttgggacctttcgaccacaactcccacacactatccagcgctggcatcctcatcacggcctgatcaatgatcccctccagctgatcgagatactaactaactgaaattagctctaactactccggattacttaagttgatatgatcaccatggctagattatcagagcatcaatatgtatctttgcagagccttgcaggccagggctggaaatggcaataatgtttttgcttaatcctcgttgattgggtccgtttcgtcgcatgctgggtcatggatcatcttatatcgtcgcttataagattctttttagcattctcttagcctacctagtaatagttagctctttactatgactataggacctacttatctttctcatatagttttttttggttccggtgtccgaaccgaaagtttacagcccgtttttcctctcttttttttttctctcctacacctcggcatttagccggtttatagcgtaccattatacttgctcttatggcttatccgcttctcatagcttccacgtcaactgcaagacaggcaggtacggcgagaggcaaatcattggcggtttttgtagtggattggcatccaaacaccagcgccaaacataaaacatagctgtcgttcgccctgtccacgatttcacgaatccgtatgcactccgctgcttgagagcggtttgccaacagccaaccaactgctgctgctcggtgggtgcttaattaattttcgtcggcgtcggtgtcagcggcggcagaaagcgttgaaacacctgaaccgaccatcggctctaatgccaaacgatggtcgtcgtgccgtttgctgagtagcttttggcgctggtagtgcgctactactcggtccatttgttggaagaggtcgcatattgcatattgtttttttacttgtgtggcttgatttctgcaacttccaagctagaaataataataataataataataataataataataataataataataataataataataataatatactaaagtagatatcccgttcgacgaaatgatacttggtaggtaccagctgatgatacctcttagatatcgtcttatgtctaataggaattagtcgatagcatatgatacctgtaaagtaccatcccatccaaacgggttaacatcttatagcatttttttaaaaggaaattaggcggcagtttttttttcttcttttaaatgtaatcttcaaaggaaaaaaaagaaacatttctaaagatcttgcacgaagcaaggtttgagtcagtggtgggtcttgtggtatgttcttttgggcccaactggttccagtaagaaataagttcacttaaggtcctttaacttttcaacgaatccaattttcatccttcaaccggaaaaccagatacaatgggtccctcgactattaaaaccggtacaaaggaagtccctcaacggtttctatggtggttttgattgacgtggcgtctacgtggctgctttgacttggtccttgtcctacgtgacgatgatgtgacactataagcaaaatataaaaactaaaattaaaaacaaaaatgtggagcccacgtcagacagacaaaagaaaaaatagtgagactcacaagtcaatgggtcccaccctcctatctacacacagaagacgggagacgagagaggagggaccgacgcctcctcctctgtccctcctggccatccttcctcgtcggccgacgagcacgcgcagagagggagaagggcggcagccagtgagaagaggtggagattgacgcggaagacgatcgctggccgtcgccccctgcgcgcctctctttccgcccgtcgccgtcgagccctacccacgacgccccgccatcaccggcctctctgcctcctccctccccacccgcctcaccggacgccgtgcgccgctccctcctctcccgtctcccgccggccaccgcacgcccatcctctccagttggccgtcacacgctgctctctcctctcccatctcttgctggccgccacgcgctgcttctttcccaccggcaaccacgcaccactgcctgcctccctgtggccggacgatgttgttcatcggggatccctgctccagattcgactgtgatgcgagaggaagtcgagcgcctcgctggcgagcgacacatgcttgccgagcccgccctcgcctccactaccacgaccgccctcgccacctcccacgcctcccctgggttcggtcttgggcgggctcgacaaagcctggagagaggagaggggagagagatgaagagaggggagtgggagagaagaggaagaaagaggggtgagaatgacatgtagggcccatgtgagccccatcacggtttttattattttccaaatcaaagtgccacttaagcgtcacgtcaataccacgtcagattaagacagagtcaaattagccacgtaggcgccacatcagctgaaaccgccgttcaaatcatcatagggcttatattgcactagttttgacaaataagggacctgttgtatctggttttgagagataagtgaccgtttatctggtttttggttgaagggcaaaaatcggattcgttgacaagttaagggacgtcaggtgaacttattccttccagtaaaactgtagctaataaatgggccttacaacttctcaaaaattgggccatgcaaagagatctagtaaatgggcctcccttaagaaaagctagtaataatgagcccaataatgacttgtaccagtccgaaggggactctgcgcaacccggtcccgaccgaaccacaccggatgacgcaagagccgacgtcactcctccccgtctgggcgcgggcgccaacgcggaggcccaagaccacacggcgccacccgctccacctccacgaagcagccatggaggaagaaggcgcagaccaccggcccccctcctcctcctccggcggccgcggcttcctctccggcctttgcgccgccgcgctacgccgcaagcccatctccgcccacgcggcccacgccgcctccggcgagggcctcgtgcggcagctcggcgtcttcgagctcgtgctcctcgggatcggcgcgtccatcggcgccgggatcttcgtcgtcaccggaacggttgcccgcgacgccggcccaggtcaggcccaaacgccccctctttttttcctcgttcgcttcggtttagagtccgcggttgcagcactctaatttagcgttggagcaactctggtcaacttgttggcgccactgggctacagtacaatcggctgcctgcatatgacattgacatatctattgcaagaattcagcagtgtagcagccaggcaggcattagggaattgctaggcagtttgatcatactgctcgtagtcgtaggcagtagttggttaaacatatctattgcaagaattcagcagtgtagcagccaggcaggcattagggaattgctaggcagtttgatcatgctgctcgtagtcgtaggcagtagttagttaaacatatctattgcaagaattcaacagtgtagcagccaggcaggcattagagaattgctaggcagttgatcatgctgctcgtagtcgtaggcagtagttagctaatcgctgctcttttatataagcagatttgtgtagtggccatttacggactgccttattgttgttgatcacggtgcaaatgattggtagttgatggccacatcaaatcaattgcctctttgcactttgcccatttcatcatttccgctaaaacttacatgggtgctctaagcaggtgttacaatcagttttgttcttgctggagccgcatgtgtgctcaatgccttgtgctatgccgaactcgcatctcgatttcctgctgtggttgggggagcatacttgtacacgtatgcggcgtttaacgagctcaccgcgttcctggttttcactcagttgatgcttgattatcatattggggcggcaagcatagctcgtagcttggcaagctattttgtccaattccttgagctaattccattcttgaagggccatattccaacttggataggtcatggagaagagttctttggtggtgttgtatcagttaatatattagctccaattcttctcatcatcttaactacaattctctgctatggggtcaaagaatcatcagcagtaaatacctttatgactacattgaaggtaaggctgcgtttatggggttttccctgcactaggatgcataactttgcagctttcatgtgtttaagtgagcttatcttatagcattaccattaggcgttctatgactatgaattatgatatataaatttctgcatgcacatgaaggtttattttactttgttgatcaatgaagtggtgttcttgtttccctgatgcagatagtgattgttatagttgttgtatttgctggtgtctttgaggtggatgtatcaaattggtcaccgtttatgccaaatggtttcaaatctgttgtaaccggagctacagtggtctttttcgcatatgttggatttgatgcagttgctaattctgctgaagaggccaaaaaaccacaggtgatttcagtaactacccatatttgttgtgttcatttgactctctggggttggaaataacatttcatttttcccattttatttccagactatgatagtatgatttttgctttaacttctctttctgctcatgcattcaaaattcttcagagggacttgccgataggtatcctagggagccttctagcatgcgtcttattatatgttgctgtatgcttggtgattactggaatggtgccatatactttacttggtgaagatgctcctttggctgaggcttttgctgctaaggggctgaaatttgttactgtattgatcagcatcggagctgttgctggtcttactacaacacttcttgttggtttgtatgttcaggtataccttccaacttatctataagtgatccgtctttgctttaatcaaattgatcaactttctgaacattgccttctttgaaatcacagtcacgtttgtatcttggacttggaagggatggattgctaccttcaatatttgccaaagtacacccaacgcgtcatactcctctgcattctcagatctgggttggttgtgttgcagcagttttggctggtctctttaatgtgcatgaactctctcatattctctcagttggcacgctggtatgtaaacttcagttaatattcgctattacaagtttacaacacataactgtttgcttcttttttttttccttttttatgtgtgatgcagaccggttattcagttgtatcagcttgtgtaatcacacttcgatggaatgacaagaccaccagttgtcgctcccttggaaatatgtcaatctggcaggagggtgttctatgtcttgtcataattgctctttgtggtttcgtagcaggaatgtgctatcggtttagctatgccattgccttcatgataatagctcttctcatagctgttgctgctggttttgctctccagtttcgacaggtaagtaccttttatattagccagtagtactaattagtagatcctcgcatacctacctcgtgtcatctcagatgtgctccatagtctgtaccaagtgatccttattggagtgattacatggatcaccctcttttgtttttctgcttgcaaattgcaaccgtgcatgaatgtgttaataaactaaactgtacatatcgaatctactgttccaaggtattgtacagttgtttattcaaaatcttgcatggcatgcattttcaggtatatgtggatccacctggcttttcttgtcctggagttcctattgttccaatggtctctgttttcttcaatatgcttctctttgctcaggtttgcatgactcaacttcttggatatatctgcattttctttctttgaatttaaatatgaaaactttgtttgtaccctctgtcttggtgtcttggcttctgttgactgatgaatcttcctaagtcataactgatggcaatcattctacatctcgcagctgcatgaagaagcttggtatagatttgtcatccttagtctccttgctgtgggtgtctatgccggctatggtcagtaccacgcagttcctttaagttcagaccacccacacccggccgttgcttatcatggaattccttctgaagctccatgagctactgcaatttgcaagcctccggcttcatcccaaagttcatgtgcaatacatctgggtagcctggggcctattattttccccagctggaatattaaacctcgccttgtcaccatgcatactccatagttccacaccgtacactgtaaatcgccagtcttaaacgaagatattttagctggcatcataccaatataccattcaccatagatgccaaaaggacagacaagttgccctcctgtatctagaaagaaggaatctagcaaagtagtagcaattttttgtcacttctatgtgctgaaatgaaccttttgatatcacttcttatgggtgaaggatagatgattgcgttgctcatttttaaatatatgaatctcaccatatttttgtaggaactttacaatagtcagatcatttctgctacgaatatcgaactatgagaagttaaacttaggggttgtccagatcgatgtcatttcaaactatacccttttatggtaaaattgttaaagatgtacatacatttagttttctttttttaccaaactttggtaaatacataagcaatcatgccaaaacattaatattgaactatgagaatatataagggctgttcaggtttattttggcttcaatttgaaccgccactttacacggcattgtgtgcatagtatatcagatgctggattgctgggccgctgttgttctttgccaattttaagcttaccaaaaatttggattgccgaaaaaaaattgtcactcattt

SEQ ID NO: 16960 - DNA, 6335 bp, Oryza sativa
tataccattcaccatagatgccaaaaggacagacaagttgccctcctgtatctagaaagaaggaatctagcaaagtagtagcaattttttgtcacttctatgtgctgaaatgaaccttttgatatcacttcttatgggtgaaggatagatgattgcgttgctcatttttaaatatatgaatctcaccatatttttgtaggaactttacaatagtcagatcatttctgctacgaatatcgaactatgagaagttaaacttaggggttgtccagatcgatgtcatttcaaactatacccttttatggtaaaattgttaaagatgtacatacatttagttttctttttttaccaaactttggtaaatacataagcaatcatgccaaaacattaatattgaactatgagaatatataagggctgttcaggtttattttggcttcaatttgaaccgccactttacacggcattgtgtgcatagtatatcagatgctggattgctgggccgctgttgttctttgccaattttaagcttaccaaaaatttggattgccgaaaaaaaattgtcactcatttggtttgctaccacaaatttggcaatgccattttttatttcaacactagcctagcaggtcttaaaaaaaaattggtagtaatccaaacaaacatcttgccaaaattttggcaattgctaacctgccaaaagaatcaactaggcccgagtcatactgcaataagcgctactactactatactcccttttagttattcctaaatgatctacatatttgtgttcattcattaggtctattcgttatttgtacattagagtaaatggacattgatacatgcatccatgcacacaaacatttgtaacatatatgcaatatcttgatttgctattggctaggaaatagtggggatggtgcatgcattaagtttgttgctagagtaaatatagtatgagagttattagcttttcttgttattagtgtacctatgaaatatacagataaatttggaatggatggagtagttttttcttccgtctccacacgcttcacttaactactcatcaataattctgggacagcgataattgcagaattgcagtacgtactagactagttcgtgcagtgcaggtacacaattaagtcacttaactccggtacttgcttcccgatccaacttaacaccagtacatgagtactatctcgcggtgcagcaacaccggccaagagacagccacagcgcagcgaatcgtgaaggatggtagagtaggaggagcagcgcgtagcaatcaattcattccactgcacctttacctttccgttcccgtcccgtccagcgcaacaagccgctcctaccacatgccccgctcacatgcgattgcacgaacgcatcatcatcgcactcgcgccacgtccggtggcgactggccgtggccacgcctgcacgcactgctgcaagtggttaaacctgccactctagcactccttccgcccccattttcacttaagctgtgtttaattcacactaaaattaaaaaattagttaaaattaaaacgatgtgatgaaaaagttgaaacctgaaagtttgtatgtaggaaaattttgatgtgataaaaaagttgaaagtttgaagaattattttggaactaagcacggcgctagtactcattgtgttccattttaagtattttaagtatatagttgtgatttctatgtccaacctttaatcgtctattttgtttatttttttatggtttatatttttattattattagatgataaagcatgaataatattttatacatgacttattttttttttaaaaaataagctttttaaataagtcaaacggtcaaacgttgatccacaactacacttaggggctgtttggttcttaactaacattgccataactcattttagaaaatgttagacaagtgtggcttgccacactttttgtggcctataaattgtaagccacacttgtggcaaagttaggcaaatgattgagtctatgacatgtggggtaggacggcaagaaagtgtggcttgccataactatggcaatgaaccaaacacaaggctaaggatgtgtggcagtctaaagtgtggtgtggcaagttaaagcattgaaccaaacagcctctaaaaattggacgtagggagtacaaattatactacaatgcagtagtacatactcctactagctactccattgagtagtagtagtactaacaagtttttttttttgcggggaagtagtactaacaagttgaagagattttgtggtagtgtgatacagatcgatcgtggctggctactcaagcaagcaaggagacaggcgtgtttcatggcaatcgttacagcacggagcccccggtgctcgacgacaagatctacgcattagagacgccggagaggacgggcggcccgtgcgtcggcccatgggttggaagctagtatagctctggtggtggagtttggaggctgcgttgcctccgttttgcaccgggacaggtctccttcacgtgcactgccgcttttgcgccatgatggggtctcgtcccccctggcccgccgtgagtgagacgcaggggctacccggtaaaaaaggggaaaaaattgtaaccttcacaccaacccgactctttttctatttaacacacactcacctcaccaacctgattctgacacaaagtaaaggctatgttcgtcggtgaagaagatgtcgatcgaatctgtagtaggagcactagtagatgggagtagatcgtagtagagcaatacgccaatattaatacggaagttatactgcagcctgtacgcttgtacggctgtacccatcaccagtgcatcagaaaatgggagttgttggggattttcagaagctgtggatgtctgtattctggtatgctagctccgaaaaggaaaagtaatgatagcacatgtatcctttgtgtcggcgaaaggaacgggattgatttttgaggccactggggtggtgtggtgagcaattagaatcgctcatagttaaaccatggagtaagagcacccgcaatagtaaaataagatattctctataaaatatgtacatctcagcaatagactagattaatagtaaaccacctcaataatatgtctacatgggatctatagctctctaattcattgtctcatttttctctatagactatctccaggttagtaaatagctttgctttctcttttcatttaatctcttctaaatataaaaatatgctgacatggatcttttctaaagagcctatagatatccattgcggctgccctgagtgtgtatgactagacgccactaagccacaggctatcagaaacaacgaaccgtcgtgggttagttacaattgggagcagagagtgaattatttgtttactgataatgacaaatctccaaccttgcaaggaccagcattggggaaggagccaatggcaccactgaaaggaatcaccattcgtggttgtcagtatgtatagcacaaacgcacatgcaatgagaggtgtgggagcatcgtaatctctacagtaactttagtttcatggcgtctggatgaggaacattccagttcacatggagtgtttcgatgcattaaaagtacaacatatacatttcactaacagtgtgttatacagttcttcaggggcactggcctatgaacagcagttctacattttttttttcggttccaggtaatgcacaagaaaaacacagtgatcctgcatctgaagcacccctccagcatgtatgttactctgagttcatgtcaaggctattcagttccctggccagcacaaattcagcaggtttctagccttggccaggctgaaatgcctcagtactcgtcattgctgtatatgctgctataatgcaatgccgattaaatagcaagccggtaaactacccagtttaatttattttgcaatctcttcgagctttttgagtataaactttgtgttaggtctcaatgatggtgaagggctacagcaagctgttgccaactcgaagaaagcattcaaattcttttccttccctgacttcttgctctgcctgacaagatcggagctgaatgcatcagaaatcttcctctcaagaaccaaatttttgaacgagacaggcaataggatgtcgcgagggtttggcgtgttatcctttgctgattccttctgggcaagcatctcaagcagaactactcccaagctgtagatatcagtctctctagtggcatctctcatcttgatcagctcaggtgccttgtaaccctgtgctgctgaagtttcaagcatctcctgggcaccagcaggattcagcagaaggtagaggccaaagtctgatatcttgcactcgtaattagcatcgagcagaatgttgttcgtcttgatgttcccgtgaattatcggtttctccaaccctgtatgcaggtaatccagtcccttgacaatactgatagagagcttgcaaattatattccatctttgtgaatcaacaattccctctgttttcggtagcaacagaaaaacattgcatggttagcaactatcacaatgaatgccagaagatgcctaataacaactttattgacaaataatgttatccaaaattcagccatcaattaatatggtgaattttcatccacaagcccaacactacataataaactgacagtttaacttaatttattgaagatctaggttcaatgatcgaaaaagaaaaggaagatgaaatgcagtggtttgaaagtaagacattgctagtacaaaattctgggagttaacttgaaatatcaaatatgtaaatgtgtgctcttctcttcaatcaagaggcaacaatacttgtatctaaaggacctttctacaaaagcctgactgattaattgaacacgggaaacttgttatatcctaatgattatggtagttaagggttaattaatgacttcaacaaacataaggagtcaggaccatgtcaccagtacacagtgctatgtcatgtttcaagctaaacaagagttgacaaaatactttttgcaatcagcaattatagcaaggcatagattagaattaacaccataggtccatagctatgaggttccgagcatgactatcttctccattccacttggactcaaatcactcaaaattgagagtttgagaccaattgccctactggttttcttatgtcttcaaactctcttagaaacttcactatgccttttgcattacaacaaattcttgacagatctgttgcaggcttgcagcttacaggtataattcatatccagctatattctccatgctcatgtgagtttttaacattttaaaaacgctgttactaatttaaaacggaattcccctaaaaaattaaaatggagttgaactacctcttttacaacaaaaagttacattttttttaaaaaaaatcacgttgctaatttacactgcactttcacaatggtggataactagatacagaagatgagatacgtgcattgcagcctgcgtgcttttgatgctactctgcagtgcagagatgactactctaatatcgcagcattgccatcattgcctaacatttcggggtgtaagatctcttctcctaaaactctgaccttgatccccatactcgaatagtataatcagtcacagtaaattatacttcgaacattgaaaattttggaacgtaacaagattactacgcaaagaagagctaaaaactgcaaaaggatacgagagaacagataaaatgctccacatttgttaccaagaaactaacaacaaggcaagtaaaataagcagagatgcagaccaaccttgcaagaatcgccggagcgagccggcggcgtagaaggggtgcacgagcagcttctcccccctcggcccgacgtagaacgcgcggagcggcacgaggttcgggtggctgaccgcgccgatccggcgcgcggcggcggaggcctcgtcggaggtgagcgcgcacgcgggccgcacgaaccggagcagcacggcggcctccccggagcgcatcgcggcgcggtacagggtgctgtgcgacgacttggccaccacctcccccggcgccttgaggatggcggcaacggagagcgcctcccccccggggaacttgacgagcgcgtccgccctgccgtacgcccctgcgccgacgcccgcctgcgcgcccaccccgagacggtcggcgatgggggccaggtacggctgcagcgcgccgaggcggtcggcgatcggcgcgaagtaggggagcatggtgttggccgtcctgctccggcggaggcacgccgggagg

SEQ ID NO: 16961 - DNA, 15487 bp, Oryza sativa
acatgcgggacgggaggggaggaagggagggaccggcaccaaccgtggttggctgctccgtgtggcccgtggttacggctgctttctgtttggccgtttcgacgaacactgcgagtgcgagcctaattaactgcggtcggattcagccttaagatccgtgctatctggcgtcgatccgacggtgttgattgatttcatctagtagcggacatatctatctaggagtgcagaaagaaaatttcccggtccgactagctttcgtgaggtgcaacacatcaaggcttctgttgttgtacagtcgtgttccttcatgaaggaaacaggtacaagctgatggccacggaagcgtcgtatttcgttgtgtccaacatagaaacctcctatcacatctcgcttttagcaactactatcaataataaaccttggtccagactctaaacaacaagtccctgtcaaactttcgttgtatttacatgaaaatccttcatcaagattcatttcgttgatgcctgcataccaacatcaataataaagtatattaagaattggtgtcctcccagttctatagattgtttttttaacaagtttgtcatcatcatataaagctccaatagttgcgtaggatttctaatgtattttatacctttatattcatttcaaaattcgtgcattacctaacttctcctgttttttaatctctaagagcaactccaataaactatcacatagctagctcttcaactgacttggagagccaagcttgttgctctaacactctctctatttacacactctatttcgaatctataataccgggacacacatatcaacctctacttcctcattcttcttcctcctctttctccccttcttcttctcccgtggccatccttgagctcttccctcggcgacagcgatggcagaaccatgcgctcatgaggcgacgatggcggcggtgagaggggagaagacgatagtggctgatccgtgcaacgataagggatagcaatagttatggctacgacgacagatacggctacagtgatgagctcgacaagaggggtgaagccggcgacgagaggggaggaggtgcgaggagggctcagcggagcagccgcttgtcccttcttcacccgtaactcgagcggggggaggacggggaaggcggtgtgctgggcgggtgacctaagaggatgatgacggcgatgctgggtgagcggcactgggagtatgacaacgatgacgctaggcgggcagggagtgaacggcagacgtgatgggaaaaggaggagaaagagagagggggtgggacccatgtcgatggtaagttgtcttgccttgccaactttggccaatgtggagatgaatttagccagccggttggtaggtctattggagcttttttttatataagtttgctaaaatttggcttggagagccatttggccattcttttagagatggtctaacatgccatcgaattaggttaccgagttaggtgtcactattggcatcgccatcaatcccctctaaccctatctatatctatcactatctctactattataaaaatcgaagatatttttgcccaaaattttagtgcgtcgctctatttcgataagatgttggtgtgcaagcatgtgagatatctttgcctctatatctattataaaaattgataattttttggttcgtcacatcttttcttttgtccgtctttcatttccgactctattccctgttccgtgcgcgatgcgtgagatgagcgatggccaccatgcgaaatggtgccgcaacaaatgagcggatctgaaccggtatgcaacaagcgtgcaacctaggttaattctgattcccacgcttattcatcgtgtcatccctgtgatctcccgcacgtgccttaacaatcctactcgatcaaattctggagcacgtttgcggcaacgaatccaacgctgctccgactccaccaaaaatctctccgccatatatacatgctctcgatcgatcgatcacatctgtgaacagatagagatggctagcaataaggcgacggtaacgctccacggctgtgacagcacggggtgagcgtctaggcagagatgatgtcagcaacatcggttgatcaccgtgatcaggatagcgttgaaggtcaagtgtgccatgggccgcgatcgtgaccatgctcccgatgaagccatcgtctcagatgtcatcatcattcccgatgtcacagaccgctacatccttgtcatgtcgtcacgtttcttccggcggagcgatcagactgaagtatgggtgaagatgaaggtttgtgttttgccgttacggagtgggtgcattcttcatggttgccaggatggttgtgttggccctaaccaagcttaggccaaagaccgagtcagtcaactactccctcagattccataattcttagcattttgaaaaaggttgaggtctaacttttattactttgactatcaataattttaaaaatatgtagtttgaaggcattaaaacaacacatatagatttgtcttataaagtactatggtaaagtaaaaaagtatttattttattgtacatattataatacaaaagcgcaatcaaagatatattttgaaaaccgtatcattgttcaatacatcgagaattatggaaccgaagggagcagagctgcacaccacatagccttctacatgcaaagtgcagccactcctcagtcgacgaatagatagtagtacaaaaaattcaaaatgacaaatggtaatagctgaattcagaacatcgaaataatacttggatcatgaatattaaatcctaatcatcccatgtttaacgtaattttagttctttcccgttgcaacgcacatgtcttttagatataaattgaaacataaggggacaaaataaacatctaagggaccgatagatataaactgtatcaaaactgagcgtttatttgaaaaagaaaaagtttgatattttagagggggagggggaggggccttgagcccttgacccttttgctcctgtaagttttgtgtcagaatggtaagagaaagccgtacatgtacatacctagaaatggatgcatccgaagaacgttattttccgttcattaacacctccttttatccggctcctatcggcataaaatcaccaaaataaaatcaaaatagaaaaagagagaaaaaatgatacaagaaacatgacgttaccgatgaacagatcagctgttcacaagtacacccatgtcacgatcccccttcgtacgtaaaatggctcataatggttttactcactccacggtacggtgcatgactgcatgcatcacgtatgcatacttgccaagttgccatgaacgcctacaacctctgcaacctgatttgctccctgaacttggcgatgaactcgtcggccttcctgtccacctcgtcctccacctccgccgccagctcggagagctcatcaccgtcaccgttgtagtcgtcatggtcgacgtacgacctttgcggcgacgcggccatctcgtcctgcacgtcagccttctcgtcgtcgtcgtcgtcccagtcggtgacctcgccgtcgtcgctgaacgactggtcgcaacgaggcgccggagaaatgtagctcgggaagcccttcgacatggcggacggcgccgccgccgtcgcagtagcagcgggtttccgggacctgcagacggcgtcaagaacagagggcggcgaaggggcggcgccccagaatcccgccgtcgatgcggagctgtccgtctctgcgccaatgccgtcgtcgctggcatcgccggcttcggactctatccccggcatcgtcggcgccggtggcggcggcttcagcctccgcaccggcaaggaaagcggcctcccgctcgcgccgccgccgccgccgtcgtcactcgccgcattgtcggcgaccacgacgagggggtcgtcgctgaggtaccgagagttccacgccctggcgccatcatctccaccgccgccgccgccgcctccgccgctgccaccggtggaaatcttctgggcgaagacgccataggagacgacgaggccgaggaggaagaggtggggcacctcccacaccgcctgcgccagcgatggcagcagggagacggccccgacggcgacggcgagcagcacggccacgggcgcgagggccgaggagaactgcttgctgctgttcatcgcgttcttcgcgacgacatggatgccgccgccgccgccgccttgcgtactggaagagaacgacgccgcggcttcgacgacgtcgtcggccattgccagcttgcgcgcgcgcgcgggcagacgtacgcggagaaggcttgtgcgtgtcacggcgcgcggtgtacgttgctgggatgagatcgccgtgctttggatgcaaacctcgcggtagctgctactgtttggggataccttgctttgcgccgcggagaggcttggctgcaaagcaacggtgaatatcgagatgatgatgacgccgcggtttcaactttggaaggctgctctgctccgcgtgatcgctttggcataatcacgtccacacggtcacggcatggtaacagccctagcctagctcctatcctccaacgaactgaacgagaaatctccatagtacctgctactgccatctcaaaataagtacagtcgtgagaatccgtatacaaagtttgactagccatcttatttaaaaaatttatgagaaaattaaaataagttagtcacacataaaatattattcatgttttatcatctaataacattaaaaatattaatcgtaaaaaaatttcaaataaaacgaacggtcaaacgtgagacataaacagtgcaaaactacacttattttgaggcagagatagtagtaatgaatctaacaaagataaagattaagtggttgatacggaaaacatgaaaaccattaacacatgattaattaagttttcaattattataaacttagaaaatgaatttatgtgatattttaaaacaatttatgtgtagaaaatttagtacaaaatacaccatttagcattctgaaaaacatgttgggcagaaatagagaaaaaaatatgtatcttaatgtcttctttttgcacattttagcatgcgaggatgattgttttgcgcgaaaaacaaaagaaaatgttagtaggatgtcgtcttctttttgcgcattttggcatgagaggacgattgttttgtgcgaaaaacaaaagaaaaaggaacggtttgatttctcgagagaagcgaaaagggaaagatgcggttgacgaggggcatggggacgtctcggcgattcgtcggggctcaggaagttacacacttggccacaaaggcaccgacacccctcgatcacggctgtccgctttgtcttgctccgcgccggccgacatcatccaccatcagtggcgatcatttccctcaatgattctccggggctcgcagttgaaagatatctggccgatcatgctgctgatacgcacagagattacagaagatagcaatttgcctattcctagtttctacagtggatccatggattctgtacgatctacagttctacaccgctggtcataacagtgcaatgctctgtttatgtgttgtcataacagtgtaatgctctgtttatgtgtttcagtcgtctgtacttgggcagtcccggttgctcaatgcctcattgcctcaaccagtgaagactgaagagtagtgctctgtttccatccaaagcatgcattgcatctactacttgttaccggctggttcatagttcagactgatgagtagtatagtattcacttgtatttttaattaacaggacactggatcgctggctggtctcatgcttgctgccctgcctacccaatacccgtgtaaatccatccagctccagcagcatcagccgacacggatgctttgccggcgcacgggggttaaaattaggcacggtgcagctgtgcccagccccagtgggctaaatcgtcacagtgtgcagatccaccaaccattccgacgaagaatattattgccccagggtacgtcgcagtgtgcccagacatgttctgatcatatgttcgcttcactctacttccggatattggaatcactttttttttttttgaaacggagatattggaatcactttacagagcaagttctgctttattacacagcatgtcattgtttcagaccaaaactactcctgcacttagggggtgtttgggaacttagagactaaatttagtctttctcacaaaattataagtccctatggtagggacttatatttttgtgagagggactaaagtttagttccactttagtccctccaaccaaacaccaccttagtaaactacatgcctgctctttccggtggcaaaattgaagcgacccaggcttctgcattccgtaatctgggcgctgtgttttccattttctacagaaaaaatagcaacagagtatcgaacaggaacttctgtacagcatacaagtacaacacgccggggccttttgcaatcgtcccttcgggagaaaaaagagaagggaatagctacacctcgggtcctgacgcaaagaggttgacaaggcctccgaaagcttgaacagatacctcacaggcctgaagaagttctccgtccaagttccagacactttcgtcatgtgacgatataaaagtaaatgcttgtgtctgcggaaatcggaagatcatgctcagatataataacatgaaggtaaaatgaagaaagaaaagaaaagaaaatgatccttatgatgttcgacaaacttgaagctcagaggatctgagcccttcttggtaaattgtgttagatgcctgcagataagtcagaactcataagaacatactctgcaaacagggatagtgaccaaatctagaaactaatttctgagtgaatttagcatgttctttagtttgtgaaaactacataaaagtggaaatatactagatttattttattttgtattcccatttctgttatgcctgtgcggccatgttcacttcagtgagtaaacatacatcaactatgaaaaggttcagagttccaactcgagcgcaaccagtctataaaaaatagctaaatagggatggtgggtcaatatataggtacccattgacccactttagttcaactgaatcaactaaaaatgaactcatctgactattagttcagctagcttgggtaaatggatatccatgtattgacctactcccttcctaaattaagaaaactttttaaacttgggataatacgcacaccggacctcttgtaacagatttctcaccataagtaaaagggaagagggcaatctctaatgagcagaagatgaagaaaaccatcagataggtgtgcgtcagctactagaccatcaggggctctttcgttacgacatgaaatgacagctgcaccaacactgagaaaacgacccttggaccagacccattttggggtctcacaagctgttctggaactgtctggattttcatcttctgaattctgttcagatgttgaagttcctttgcatattaaacaatttgttcggcagatggttttccgatgtctattttgatggtattgcagtgtttggactccatttgcattattctctgccgatgctgtaagtgaatgagtgtttccattttcaagaaaagccacttttgcctcataagatctgaaaaacaactagagactgttaatttcaaactgaataggtagataccagcacaaattcattgttaatcacctgtgcttcaaaaataccattgttccagagaagtcatatcgcgcaggacccatccacctgtacttttcactctcccttataacttctccataaaatccatatctgtaatcagatttaaaccacagggtttcagcagttatgcaaaagaggaatccgcagatggtcatatccaaaagactccattttttaatggatgacgctgttgacttttgaacacatgtttgagcattcgttttattcaaaaaatgtatgcaaatgtataagatataaaccatgtttaaagtaccttgagtgataaaacaactcacaacaaaataaattataattacgtaagtttttttttgaacaagacgaatggtcaaacacgtgacaaaaagtcaacggcgtcgtctattaaaaaacggacggaggtagtgtatgttcagtgcaatccatgactgcctgtgatgctaggaagaacacaagaaaataatatgtttccctaaaagatttaggttaaaaacataacaatctagcttgggttaactttttgaaagtgacttcaactgaagctctgaagttttctccagaactttaagcccttttatggactgatgttaacgttgacataggatgcctatgctggtactgcacaacgacacagccacatgtaagaaataggtaatcagaaatcaaatttgtggtagtattagctatatatcatgtctaagagacagtagcataccctgcaaacgaagcagcatagcgcacagttggtgaaacctcagctgatgggctacttttccatctgacaacttgagctatatcaagtgatatccttctgccgaggataataagcagagcagaagtcacaggatctcgctccccagttgtactgcaaacatcaacagggcttcaacaaccagaaaagaactgaaagtgatgatcaataatttgtatgcaacaatattgggcttatttttagtcatcacaagacagcaaatggttaatacaatgcatgtgctcctagtgttcaatggatttaaagcttaatagaagaaaacttcccaaggtgcatagtagtgttgaaggatcagcttgatattattttagcaggtttgtgggttattgcatgtttggcgttattgcacataaactgtcaggtatgattagaggatcataagttcataaaccagcttgcatgcaacggaacatagttacagttttttaagggatttgaatttccaatgttaagcaaacattgtaatcctagtaatacagatcagtaagaatagatataaaattgattactacctgagaacaatagcatccgttgagccagaaggaattattccaagcctaaaccaattatttgggaaggagactaaaggcacctgatctgcagtagcataaagtggaaatgaaacaggaactctatgtaagtcagtaaatcttaaaagtgtaacaattttaagataaagcaatagttaggatttcgcactgacctccattgcatggttcatcactagaatctacaaataagagacaagaaaattacttacaagagaaatttctctgtataatatgaggtagatgtaaattgtaaaatcaaagacatacctgatgacgagatgtccaatcctgtagatcgtgtggttgaaagaaggggctcatgatcatcaggtgtgttagaacttccagagatggcatttgcatcatctcctgtgagctcactattgcttagatcattatttctatgttcttgacacttcatgttgtttctgaaatatccaaacccttctggagttggaggataagaatttgtgtgccttgtacttagtagcccattcaaaatttcattaaataaaccatcaccaccctaaaatgtacagtttggagatcagggtagtaaaacgaggaggaacttcagtatgcttatgatttatgaacaagttgaaaagtggattgagaatgtgagtttttttttctctcaaagtgaaaagtgaaagttaggtttgtttctctagtggcaatcaatgcaaggttttatatagccatacaaaatttttggacatgtactaagtaatctccaattctccatgaaatttaaccaagaggtatattttgacaagcttgaagtgtttttcaaaatacataataaagcagtagaatatgagcatgctcttgtggccagatgcagctgattgtggatcataactaagcgtgttctctggcctagcactcatcttgtaattgtgatgcttaatatcaaacaatgatagacaagcatttattgtgttctaataaaaaaagggtaagcataagcatcatagcacttccctataactataaattattcaggaaaacagagaacattattttgaacgaataagtagaaaaaaaatcactcaagttcacataccactgcaataacaccatcaaatttcttgagatctttatctgataaagatgctaaagtatcatatgcatgtcctgctcgctgtgtgactatcacctgaagcaatgtgcatatgaggcgatcaggagttggagctttgagggttgttcaacaaaaaacttataatggtaatgtcacaagatcagaaaagaaaatcagtcatacacatcatatgctcatctttaactgttatagattttttatacttccactggcagaagtttaccttcgtttttacttttgcccgctcaaataatggagctactgtttcccaattcttacaccctctaccttttccacacaatggatggacaaatacctacaacatgaaaattagttgatgcaagaatataagaccaacgttgagcagcactgacatgtttgtcaaaatgctatgtcaaggagcagaaaagcacatcatatttaccatgaggctcttgggcctatcctgttccttatttatgcacgtctttatatgctccacccaagttttgcaggtttgctggtctttatgaccaaaaatatattcacaaggtacccatggagatggtctttttcttggtcttgtgaccgtgtgtatgacaaatcggttcatctgcatgagcaacagttttttgtcaattatttgtaaaaggtgtcatctggaagagcttatataatgcattatttaatatggcacgaacgctttgacacatattacagaaaattaagtctgcaaagtaactagaagggatgttatacctcagtatttatcttgccttgaacggtagctcttgcattccaaggttcacatacaggacccacctcaagaagctctacagcatagacatctgaaaacttaagcttgctctctaacttaggttgcattatgatagatgaccaacatgaagaactcacttcctgcaatgtacagaagcacaatgagcagaaaacacacaggtgcatgtcaaaagcaaactgatagcttctatgagtacttgtatgatttgcagatggataatgtaagtctgacggaatagtaaaattgcactatccttgctgataggaactaaatgcatgtcaaaaatgtcatattcaccaactatgtctttccacacgagctgggggagtctggagctctttattgaatatttcaaccaaggttcaagctgtgttttgtgaaatgatagcttcacaaacacactactagtgttcctgtttctagtttgagtaagaatattatcccttttaaaaaagcatgcttatgctggtcacagacgcaatcacacatctatacaccgtcatcaacacaagctacttatgttccaaacagaaacttcaatatcgccatgttggccaagatagcgatcctctcctgagcttttcattaaccactgattttcatgaatctcctgaaaattgttggtataaatagtgaaccaactagcctatgttcagaattctaataggtacagtacaaggttgtagattcactatttcagacaccagcgcattattcatcgtctacgcctctctatctaccttccgtttcttcgattcaagaacccgaagaccggaagctacgaatttcctgactccatcctacaattcaaccaagactcctgtcaaaaccccagttaagtctgtaggatctaaagactagattcggggtgagcgcagacgggcagaagggcagcggcgggtgcggctgtgcgtaaacctggtgaaggggctggaaggagaggccgtcgtcgccgacggccaccgtgacctccccgacgccgtccaggaagagcgcctcgccgccgccttccatggcctttcccgcttgctgttgcttggtctcacgactcctccccggtcacccgcggtgggggaagaggaggggcaaatgcgaattcttcctctgtttttttttcctttttcagttgggtctgtgcgcgcttgggtccgtggtggctgctttcgcgtgttcgctggctggacgtttttgaccaacggcgccttttcttgtcagtccttgtgcttgtacagttcaataactttgccaacaaattatccgtagcaaacgactattcttactgtttttacttctcttaaagtttataaaatatggagaggtcaaaaaaaaaatatagtggtttgaaattacaagagagtgccatctcacaatcacttataactttagagcaagaataatagtttcgtcgacaaccgagtacataacatctaactcatctgcacaaggagctttatagcaaagatcatatgcaatagcaggttgttaaattagcaaactgctaaaacttttgcgtagatttagcatggctagtcgcacatgtcccacaaaaccacgtgagtttccgtcagcatgggctgcaagtgggttacgatctcttttttccggtgctaccacctagcgataaatcaactgctcgtatttctctctcttcttctctcaatcttctacctagaattgaggtaatgtggatcaatttatcacccgctgactcatctttattgtatctgctattaaacttctcgaatgaaattggataaaattctggatactcgtggcacgtttttaaaccgctaaacggtgcgtttcgtgaaaaaaaaattcctatataaaagtggttctaaaacgtcaaattaatttgtttttcaagtttgtaataattaaaacttaattaataaattaatttgcttttcaaagtttgtaataattaaaacttaattaatcatacattaataccaccttattttacgtaaaacacttaatctttatcttcaggagaaaataacaccacccgatggcatgcctttacattttcagcagcacttaaaacaaaatataccatcgatgcaaccattatatatttaaaaataaatctatttgattttatatggtttgaggagaaatagttgattcggtaagcctattgcataattgcacaaacgacgacgagcagcagcagcagcagcaccaccaccaccgcttcgtccgccccgtgccccaacggccgacgctgctgcacggcacggcccccggccgaatctgccgtgcgcgggttggcacagtggcacacgcccaaattccatccctcccgtccctagccggttcctctccttcctccccccctcgcaaaaattcaaaaaaaagcttgcgctcctcccgtcctccggcgccgatctgctcgaaggaggccacccccaacctccccgaccaaaccaatggcttcctccaacgaaacctaccgcgtcgagctccgagccgccgcccgccagctcggcgagcgcggcctctactccgccgccaaatggtacgtacgccccccttcccctaaaacccaccagggcccccctcctctaaaccctaaccctaaccctaaccgccgccgcctcttccttcctttgtagggcggccgagctgctcgtcggaatcgagcccgacgcgacgccggccccgtcgtcggtgatggacaccccttcctcgtcgggctccgccgcatccgggggccgcctcctgcacctccaccgcagcggcgggtccagcttccgccgccgcctccgcccgggcgcggccgaggccgggacgccgctcggcggcgtctcgtacgtcagcacgcccatccccgacgacgacgcgttcgacgtggggggtgataggtacctgctcgccaagacctacttcgactgccgcgagtaccgccgcgccgcgcacgtcctgcgcggccagaccggccgcaaggccgtgttccttcggtgctatgccctgtacacggtgagttcggatcctattgtttttttttaattattattttggtgtgcgcgggcgtgttccagtttgcagatgtttggtatagcgagtggtgtttgtctgcttgaggaaatgtctctctggagctgctgcaaatatttacggctgcaattcgcttatagagttattcatatttttcaacctgtagaaacatctgattagttatcttgacgtgtcaatggagtaacagtagtgggatcttactgaaggaaacaccaggaatacattaaaattgttgtaaaaacgtaaaaatatttttatttggtatgttctcctttgttcatggtttgggcgctaaatctttgaagccctaggagcgccgatactaggatttacttgtcttaatttccccccatgtcatggtataatgatgtactgatttatgtcagtttaaaccttagtaatttggtaaatgtctgaacatattgaaaaatgctgaaccctttattttacataactgttgcttatttgcttcgttcctggttgtttggtgtccttaattatgcattacagggatgcttgattatttttattgtaagcaggggatgctggtttgctgcaatgttaacattagacgaatttattgcatgcaggaatgcattttactaatacagtggttctgttgtaatgaagtttggaaacattatattctaatattgagatgtatgggcagtataagatgttaacttatagtagtaacatgattgcctgatgcaacaaggagggctgaggatccaggtccataaatgatttatcttttcctctttgctatttaatttgtgatctgctaaaataggagtataggacacgccatagtaatacagtatataactgtacgcttgaggctatgttgcttttgattgctagtgtgccactagtgaatagtgactagtattgaagtattcaatttagaaccgtgctgatttccattttagcaggtctttctattacctggatttttatttaagttggtaagcttcactgtcaatatatacagttattgtcaatctttgcatcaatgtatgtctatatacactaacttattagatcgtacaaatgtggctagcagtcttcttatccatggaaggattctattaaatgatttatcttttcctctacaggttatctaatcttctaaatactagaaactgtctcccatttgcttcatagtttaattagcattttgaaatttgacatgcttggtgatcatagttcttttctctacaatttaggctggagagaaacggaaagaggaagaaacagtcgagcttgagggatctctgggcaaaagcaatgctgttaatcaggaactagttgcattggagagagagctcgcaacacatcggagaactggtgctattgattcattttgtttgtacttgtatggcattgttctacgtgataaaggcagtgaagctctacctggaacaggtttggtgggaaactgtaaacacctacccttggaactgg

SEQ ID NO: 16962 - DNA, 1707 bp, Oryza sativa
caatatcaatatttttgcacttcacacatggttcattgcttgggacaattttggagcacgatgcctcactagggagagagacactactctttaaggtttcgaacttctcttcaagggagaggtaagctttgtccaagtcatccactgtcacgcccagaaattcccgaatagaattccaagcagaatgtgcattaaaatccccatccaggaccggccgaggtacacaaacgacaatgttgacattcagatccatgtcttacaaacatcataaaagtcttacataaatgcagcggaaaaacgaaagacaacaggagctaagccttgactagaactgcagcgggaacaccactccacaggcatcctcgacggcacggacgaaacctactcctcggagaaacctccatttgacacatactcgtactctggggctggggaaaaaatagagcaagactgagtactacccactgtactcagcaagtcataccggaataggggtatgatgcagggaattatcaaaggagagctagagtggttcatttgcataaagcgagcatttataaacagaagttgaaagaattaaacagttgcaataattaattaatattgatcatccgctgtccaacgctatcccacgttgcaacaggcccaaccatccacctatactatccaatttcattagactaaactagggtaagactaatcacggtgaatctagttgaccgcccataaccgcgggcacggctattcgaatagttttactctgatcagaggtgtacaactgtacccacaagacacagccccacaacacgtttccgtgcgccgacatgccaccacgacataccggaaagaggccgtgacaggacccttcgcataaccccctctaaccaagcacaccacacctcaggtttcacccccactcctcgcaaggcagcgggcagtcccctctcgtgcctaggtgaatccggaagcgacagaggccgtcgcagggcccgccccgctccatcacgcccacccttgcctggatgcgtcagctagaggaaagctacactacaagcccagccgttgcccacgctggcttgtggtaagtacgataagttcttccagggcatcccgcgaaccggtccttaactgccatgggtgcgactagcaaaaccatgcacccacagcccaccatgtgattcattttaattaaccaataccaaaacggtggtactaaaccaaccttaccaattgaacctaaagtctatattttagtgagctttccccattgtgtgctagtggaactaagcatggctaagcaattcctagtccaaaatctattcatgttataacccaagctaacaaaggagcatggtatcaaaaatggcatggctataacaataggtaaacaccccatagtaacattataaacaatgcaatatttgaagaaaaccaatagagcatttgcaatataggatcaacatgttcaagtgacaagcatgacttgccttgctctgctgctggagaaacctcggcgactatctcgaagtacaccggagcggcggaagaaccggaatctagcgacatacaaggaaaacattacaaacaggctataagactactgaaacagagaacaaacatttttaatggattctacacatttttcttgatttattgagacttgaatgggcttaaacggagcacggatgaattagttatgaattttag

SEQ ID NO: 16963 - DNA, 3537 bp, Oryza sativa
gaaaatcgaatcccggccgtctcaggagcgcgggtgagcgggagagagggggaagtgggcgcgggtgcgagggcgacgtggacggcgtggcccgggaggcgcggacgcgaggcgcggcggcggttgcgggcgcggcggcgagcggctggaggttaggggaggacccgataggtgggccccacctgtcggtgaccccgggagagaagagggggcgcgggctaagctggggcgtggcctccggccggcccagcaaggcgcagggagataggagggggaaatgggccggcggcccactaagggaaaaggaaaaagaaaaaagaaaaaggaagaaaggaatttccagggatttaaatattgcctgtgctcaattttaattgattaaaattatttctagggctctgaaaattccactaaaaatcctgttagtgaatttcgacatgtagaactcaagaaaaattccacatgtcagattcgattattatttgtattactttcttagggttttctcttgatttgcaccggcattttcttagggtcatttataaattaaattttaggcttgggaggagaacttcagggtgtgacatccactctctcttaaagttgagcgttcgccacctcaagattagcatgagactctttggtttgcttgtaaagccgtaccaaagcctcatttttctctctctccttagcaagttcactcttgagttcatgagaccgctctttctcacgaatgagcaattcctcttaactctcaaaggttgcatattgatcctcaattctcccaagcaactcactcaagtgtggtatggattccttggttatggatttgaacaactcgtcatccataacctcatcctcaacatcttcctccccatcactactaagatcaacattaaattgttggaattaatgaatgggccttagcccactcgaagattaattctttggaaaaatcacaaaagcccacctcatgggatggcatgcatgtggagtttagtaccaccttgcttattctaggagagggggacctccttaaaagggaggatgccctcctagccacttgaagcatgtgtggtggagagaagaggggaaacacacgcgcgcgctcgctcgcctcgcctggccgggcagggcaggcggcgcgtgtgcacgacgtacgcgtcgaatggtccgaaaaattggctcctcacccttgcgcagatgcagcctccttttgcagttttgttttgctgcaaattcggattcgattttgttttggaaacgttccgaaaaatccggggcgtgcaaatggcgtggagtccggataagttacgcgcgacttatccggttcggttacgcgcagtagagatcgtgcgggcgccctgatcaagcgacccttctctatataaaccgacttgccgtcttcacgcaacacttgcgaaatcaatctagggtttgccttctactctgtactgcgctgtcgctcgtaaactactccatcccgctcgccagcgtgcaccggcgatcgggagagcaggtctccggaacctctgccttcgacgtcctgcaccaggagaaggcggcaataaggtttttgggaagcgcttcgcgcgactactccctgtttgttcgcgacagctcgccttcctcttcgctcgcgtgtttcgtgccttcgtagacacctacgaaaagtttcgaccaagcaaccggtctttccgtcacctcggtacgtgttcaatatgttgcgcatatttgatctgttcatgttatactgtgtagtttacatgtatagatctaatgatgcgttcatgctagttttcatctgtaatgtcatgatttatttatggaatagattaaatcattatatgtctataatctcaacaatccaaaaaccttattataggcactgtgattttactatggctggttttgccgatgcactgaggccggataaattcaccggtgtgcattttaagagatggcagattagggtcactctgtggctgacagctatgaaatgcttctgggtgagtactggcaaacctgaaggagttcttactgctgaacagcagaagcaattcgaggaagccactactctctttgtgggatgcattcttagcgttcttggcgatcgtctggtcgaggtgtatatgcatatgaccgatgctaaggagttgtgggatgcactgaatactaaattcggtgctactgatgctagcaatgatctgtatattatggagcagtttcatgactacaagatggctgacaaccgttctgtagtcgaacaggctcatgagatacaaaccatggctaaggaactcgaactccttaagtgtgtcttacccgacaaatttatggccgggtgcattattgcaaaactacctccatcttggaggagtttcggtactgcactcaaacacaagagacaggaatactccgttgaggggttgattgcgtctcttgatgttgaggagaaagctcgggaaaaagatgccgcgtctaagggcgatggtggacagtccagtgccaatgttgtgcacaaggcccagaacaagagcaaggggaaatacaaagctcagcagaccaccaacttcaagaagcagaagaagaacaacaacaatcctaatcaggatgagaggacttgctttgtgtgtggccaagttggtcatctggctaggaagtgtccacagcgcaaggggatgaaggcacctgcagggcagacttctaagtctgctaatgtgaccattggcaacactggagatggaagcgggtatggtaatttacctactgttttttcagttaatcaatctactaattggtgggttgatactggggccaatgtacatgtttgtgctgacatctcattgttttcttcttatcaggtcgcacggggttccaccgtcctaatggggaatgggtcacatgcttctgttcatgttgttggcacggtagatctgaagtttacttcgggaaagatcgtgcagctgaagaatgtgcagcatgtcccttctatcgacaggaatcttgttagtggctcccgtctgactagagacggatttaagttggtttttgagtctaataaagtagtcgtgtctaaacatggatattttattggtaaaggttatgagtgcggaggcctgttccgcttttccctttctgatttctgcaatatgtctgtgaaccatatttgtggcagtgtggatgatgaggctaatgtttggcattcacgtttatgtcatattaatttcggcttgatgtctcggctttccagcatgtgtttaattcctaagtttttcattgtcaaaggttctaagtgccatagttgtgtgcaatcgaagcaacctcgcaagcctcacaaggctgccgaggagagaaacttggcaccactagaactcctacattcagatctttgtgaaatgaatggggtgttgacgaagggtgaaaaacgatatttcatgacattgattgatgatgctactagattttgctatgtgtacttgttgaaaacgaaagacgaggctctagactattttaaaatttataaggcagaagttg

SEQ ID NO: 16964 - DNA, 1348 bp, Oryza sativa
tcagatttttgtgaaataaatggggtgttgacaaagggtgataacgaattttcatgacattgattgatgatgctactagattttgctatgtgtacttgttgaaaacgaaagacgaggctctagactattttaaaatttataaggcagaagttgaaaatcaacttgacagaaagataaaaaggcttagatctgatcgtgatggagagtttttctcgaacgagtttgacttattctgtgaggaacatggcatcatacatgagaggacgcctccctattctcccgagtctaatgggattgctgaaaggaagaatcgcacactgactgacttggtgaatgccatgttggacaccgcgggactgcctaaagcatggtggggggaggcattgttgacctcaaatcatgtgttaaacagagttcctaacagaaataaggacaaaacaccatatgagatatggattggtagaaaaccatcactttcttatttgcgcacatgggggtgcttggcgaaagtcaatgtaccaataacgaagaagcgcaaacttggacctaagactgtcgactgtgtttttctgggatatgcttatcatagcattgcctatagatttttaatagttaaatccgaggtaccggacatgcatgttggtacaattatggagtctcgtgatgctaccttctttgagagctttttcccaatgaaggatacacatagtggttcgaaccaaccctctgaaataattcccagttcaatcacaccaccagaacaaactgaacatacacatgaacttgtctctgaggaggatgtcagtgaagctcctcgaaggagtaagagacaaatgacggctaagtcttttggtgatgatttcactgtgtacctcgtggatgacactcctaagtcaatttcagaagcatatgcatctcctgatgcagactactagaaggaggctgtccgtagtgaaatggattccattatcgctaacgggacttgggaggtgacagagcgaccctatgggtgtaaacctgtggggtgcaagtgggtgttcaagaagaagcttaggcctgccggtactattgaaaagtacaaggctcggcttgttgctaagggctatactcagaaagaaggcgaagatttctttgacacttactccctgttgctagattgaccacaattcgtgtgctactttccctagcagcctcacatggtcttcttgttcatcaaatggacgttaagacagctttttttaatggagagctggatgaggagatttatatgtatccacctgatgggtttgtagttgaaggtcaagaaggccaagtgtgcaaaatggtgaagcttttggatggtctgaag

SEQ ID NO: 16965 - DNA, 6254 bp, Oryza sativa
gtgctgtttcatggaggtcttgcaaacagaccattttgacgaggtcaaccatggaagcagagctaacggcactggatactgctactgttgaggcagaatggctgcgtgatctattaatggatctgcctgttgttgaaaaaccggtgccggctatccttatgaactgtgacaatcaaacggtaattgtcaaagtgaatagttctaaggataatatgaaatcgtctagacatgtgaaaagacgattgaagtctgtcaggaaattaagaaactccggagttataacgttggattacatccaaacagcgagaaacctggcagatcccttcacgaagggactatcacgaaatgtgatagacaatgcatcgaaggagatgggtttgagacccatgtgagttatactatggtggtaacccagtctatgtgatcggagatcccgtgaattagatcctgggaagaacaaaccattaataaactagaggagagtaccaatatatataccctctccaagtgaagatgcatatactcttgtgagctgcaaggcaggttggctatgccttaatgagttctgttggctttaattagcgaagatgttgtcctgcagagcattcttgaaagaactcacctttgtgagcttgactgttggtcgcagtctatgaagattttgggtgaatcttctaggaagcttactaaagacctaggagtatgacttatacgctccacccgaggggtagtctacagacggtctattaccagataagactttgagtgaaacttgcttgcacaagacttgcaattcaaggcgtagtccattgttcaagttgtgagtaagtgttgcttggagttctaggtggatgttcaaccttaattggtctccatcgaaccgctagtatataaacagtatattggaaaaggcaaatctcagtgggattttgagatttggtgggggattgttggaattaatgaatgggccttagcccactcgaagattaattctttggaaaaatcacaaaagcccacctcatgggatggcatgcatgtggagtttagtaccaccttgcttattctaggagagggggacctccttaaaagggaggatgccctcctagccacttgaagcatgtgtggtggagagaagaggggaaacacacgcgcacgctcgctcgcctcgcctcgcctggctgggccgggccgggcagggcaggccggcgcgcgtgcacgacgtacgcgtcgaatggttcgaaaaattggctcctcacccttgcgcagatgcagcctccttttgcagttttgttttgctgcaaattcggattcgtttttgttttggaaacgttccgaaaaatccggtgcgtgcaaatggcgtggagtccggataagttacgcgcgacttatccggttcggttacgcgcagtagagatcgtgcgggcgccctgatcaagcgacccttctctatataaaccgacttgccgtcttcacgcaacacttgcgaaatcaatctagggtttgccttctactctgtactgcgctgtcgctcgtagactactccatcccgctcgccagcgtgcaccggcgatcgggagagcaggtctccggaacctctgccttcgacgtcctgcaccaggagaaggcggcaataaggtttttgggaagcgcttcgcgcgactactccctgtttgttcgcgacggctcgccttcctcttcgctcgcgtgtttcgtgccttcgtagacacctgcgaaaagtttcgaccaagcaaccggtctttccgtcacctcggtacgtgttcaatatgttgcgcatatttgatctgttcatgttatactgtgtagtttacatgtatagatctaatgatgcgttcatgctagttttcatctgtaatgtcatgatttatttatggaatagattaaatcattatatgtctataatctcaacataaataacttgaggggagaaggtatcttagcctcctttgccatgaggcaaatgggagcaccctcatcacttgagtaatcgaagagtctcggtagcgatgaaagcttgacggcgaacgtggcgactccttcttcatcacttgagcttgactcggagtcggagccgaagatcatcccaaggtgagcttggccataatgttcccgcttgctatgcttgtgcttctacttcttctcatccttcttctcaccctttttcttatcttccttgaggtgggaaccatccttgaggtgggggcactccgcaatgaagtgcccgggctctttgcacacatagcacacccttgcggagtgtcttccacttgacttgttggagtagtgcttggaagagcttcccttgaagaagccgctttgtctcatgaacttgccgaacttcttgacgaaaagagccatctcttcatcatcgatctccaccttgctcttgctcttgcggttctcttcttcttcttcctctgccttcaatgccaagtcttccttcttgatgcttgcggttgagctttggttgatatattggatgacatccttggaatcttgcacgagcatgtcatgggcaaggatacgcccgagcaaatcataaggtgtgagagttttgtagtccggacgctcacgaatgatggtcaccaaggtagagttccttggagtgattgcccgaaccatcttcttgaccacaacctcatcggtcatgtccttggagccaagtcccttgatctcgttgacgatcttgctcaaccggtcgtacatgtcgcttgggatttctccatccaacatcacaaacctctcaaattgccccttgagaatctccaccttggactcacgaacactatccgtgccttcatgcaggttccgaagcgtgtcccaaatcactttggcactttcaatgccatccacacggttgaactcacttctactcaaggcgctaagtattgcattagcggcttgagcgttcttgtgctcgttctcgttgtcctccttggtgggatcttcaggattctgcaaaacatagcctttttcgactattctccaaatagatgggttaatagacttcaaatgcatcttcatcttatgcttccaagcggcatagtccttaccattaaagtacggagctttgccactataggtactcacataagatgtagatgtagagggatagtcaaaaggaatcctagctcccttttcaccatcattaccatcccccgtgtgacccgacatgatctctccaagcggttaagcctaattaggagattaggctctgataccaattgaaaaggtcaattaggcctagagggggggtggataggctaatttaaaaacttaagtaaagcggaagctgtaattttcggaactaggctgggaattttcggaacttccgaaaatgcacagagcagcgcacacaaaatgaagtctctagatctagaagtctaccacatggaatcaaagacacatacaacaactagaccaatagtggcacaagcaagcaaagctagaggagagggatgaagagatattgccaaggtgaagcttgcaaacttgatcccggagttcaaatccttgaggggattccactctccgttgaggagctcactaagagccaggtcttagctaaccctttccttaaaaggttacactaagcactccttcttatatgtctatgcatcatcccccttaatagtacagctttcctacgacacaatgcgaggaaaaagatacaatataccatttgatcattgccgcattgcaacgcgatgtcgcattctcgggatatgcattgtattacaacacgtcgaggaaataacaaccttcacatttgcttgaataaaaatgttagtcatctctaatctcattgtaatcaatcattaaaatcattagggcctagatgcactttcaagcttgcagcggtgctcccggctcctccccatccccactgcatgcgcatagaggcaaggccagatttgatatgatggcagtgttttcccttcaaacttttaaaaattctgtcacatcaaatgttcgaatacatgcatagaatattaaatatggatggaaaaaaaacaattgtataatttgcatgtaaattatgccatgatttgacaatgtgacggtacagtaaacatttgctaatgatggattaattaggcttaataaattcgtcacgcagtttatcggcggaatcggtaatttgtacatttaatactttaaatgtgtgtccgtatattcaatgtgtcatactaaaacttttcatgtctgtaactatacgtaactatacagttcataaagtgaaatgagggtgaacacggctcctgcaaaacaataagcgacatgaatatctatgtcgcccaatgcagcaagataacttgtcagacgaggtcaacgatataatctataccacgcccttgacacgctggccctacagtattccgggcccacacaccagtcagagaccttttctcaaaccgtgagccaagccaccgccgctcccgtttgttggcagcagaaaggaccgcggggcattgacgacaccgattttttttaagcacatgcttaaccaccgttagtcttatttaaaatttttttataaaatatataatactatatgtatatataagtatatttaataatgaattaaatgataagaaaagaattaataattacttaaatttttttaataaaacaaacaattagatatatttaaaaaaatcaacggtgttaaatatttagaaaccgagattccaactccaactcaggtcggtcaggtgtgtgtggtcgttgggactacttgcgttggttgtatgggtccaccagcgaaccggtcgtctccgggtctgtctttcagtttgcgaggggcaaagccaaagccgctacgatgtcctctccgggtctttctttcagtttgacacaaaaagttttcaatgatcatgcaagcgtgttgatatatatatatatatatatatatatatatatatatatatatatatatatatatatgaccgtgaaatctaatactctctggttgttgtttgatgacttgatcctctatgaggtaatgaaagagatttatttaatttatttggccgtcgtgttttcccttatctcctacaatctgcagtagagcaagtacgccactgtcttctataatttagtgtggatgtgtgaatggtcgaaagagatgctactctctttatctaaaaatatatagtaacttttaatagacacatattagttacagagtagtatttgtactaataatctagatatatagattccctgttcaaatttaaagtaaataaaatatatcatatcaatttaaaatcatttatattttaaggtgaaatgagtatgtccagttaattttgacacatcaacgtcgcagagaagatgtgttctactgcgatacactactgctgcctagatgctagtaatgctactacgtacgtcctgtgtgtaggaaatgttccaatggatggaattcttttgaaaagctatatagagtcgagagctagctgctggtataatctatagcatcagcagccgaaagttcgatcctgttgctgtcgacggatcgagcacgtcaattttatgtacttctcctcttgttgtctcctcaagtcctgtttattccctttgacttcagatttttagcatgtgcgatgtctctcatattagtcatatatatataactccctccattatttttatataacgtgcactaaccaacgacaaacaaggagaatcaaagggagtattattttcatggaattttctccgagattcatttccttgtagtgatcgaccacctccctccttatccgcggtaattacccttttatttacctctcaccatcaagttatggcttgggtaattcgaggacatgtacgtcattgctggcgtggaaggactgagggcatgtcactaaatctattatatattattaaagaaatagaaaaaggagcctccacgttcgctctcatggtctagaaattatcacattaatcggagaaaaagaaaaaacagagtttatatagaaatacaatttagaaatagctgaaattcggaattaaaaaaacaaatattagaagaggagactagagtccatatagaaatacaatttagaaatagttgaaattcggaattaaaaaataaggaatattagaaaaggagactagagtccatatagaaatacaattaggaaataactgaaattcgaaattaaaattaaaaataaggaatattagaattagagtatagagtccatataggaatttaaaactaacta

SEQ ID NO: 16966 - DNA, 14758 bp, Oryza sativa
gaatgaaatccatcaaaccatcgtcggacatatcattcaggcgtgggcatcgatcgactgatcatcctcgtcgtctatctcgttggattcatgctactagtattattcagagtttttgctccatcactattctttcagagtttcagacagtacagcaggcgatgcagtacaattaattaacgatgcataatagcttgggtttttggactcttgctgtctctctgtgtgctcgtggtagttaaccattcaatttgatcccacgtgtaatgctgaatgctgaaatgtacttcatcgagcctatttcttagcttgtttgtttgtttatttgttttacttatcagcaggttctgaagaggaaaaaaaagttgttttttaattttctagaggaggaacaagagttgttgaggatgattaagaacgaaaattcaggcaagattagtcaaacaattcttctaattgaccttctattggcttaatttacatgtgtgtttctagctaggcggcgtcaaaccatacacgaaacagtatcctcagatatcaccatcactgactaacggattaggtctcgaggttgtaggtggtatggtttgattcaaactattttattagtgtatatcatgattgtaatgagttcgatcctcttcgtattttgcatcatatgatacgatatttgttttatattccctccgggctgataatacttgtcgttttggacaagggtatggtcaaacactttagaatatttgattatgaatcatttttaaaatatttgtaatagtgactacatgtatagattggtcttaaaaagtactttaataagatcatatatttgttaacacttttttacatattacaatagaaaataatagtcaaagttgttttttttaagaccgtgcccttataaaaaacgataagtattatcaacccggagggagtacatgaaagacatatacatgtacagatcaatccatgcacacctccactccactcgccatgatttgaattctgaaatatattgcgtgtttcgttccttttgattttcaaacatacaatattttttactgctaagaattggtcattgccaaaattttatttggcaacgattagctggtatttcatttggtttgctatggatttgccgtgttggtcacttctctccatcatggcagtaattaaacagagaaaaaaaggatagattttaccaaaatattttagaatttggtcaagttaccatgaccttagtgacggtaagcctggttattgcgatggtaaggaacagaagcgtccaaattactgacattaaatcatttgagaattacaaaggaaataatcttggcctacagtggatctttcaagctcatctttgttttcagttgatctgcaccggacaaatcatttgatttgagtactctttaggtgaaaaatacacaaaaactgaggacctggttggaagacaatttttaattaggcccagacggtgcaaaggacgagcccaaaagtccaaaaacctgcgtggatacatgggccgaaatccatagcaaatttagtccagaggcccatccggcccacattaccaggggccatatccctctagcttttggcttcaattagcgttgctccaccaccattgctcagtttgttactgaaagtctgaaatcaaatctgctcgcaatctgccttgttggtagtcttaacaatgtagaatctttaagaatattgtgcaaacggaaatctgtgagctttgtgatgaataaatggaaacggcctttcacatatgcattgggtgtccttttgctcgttccttctggcaagctatgtaataggaataagtttactttgaatcccttaaaagtgacccgaatctaatccatgaccctcaaccgcaaaaccggacatgacgactccccgaactattaaaaccggtgcaatttgactttctcgacagttttggagggcagtttcgctgacgtggcacatacgtgacggtattgacctggtcttccttccacatggcgctaacgtggcagttatgtggcacttgaattttaaaaatatgtgtgggacccatatatcattcacacaaaagaaaaaatatgggacccacgtgtcatgcatcctgtctcttccctccttcctcctccctctgtcccttctctttctttctctcctcacgccgacgtcatggagcctcgattccccgtcgtcggcgcctccacctcgccactggtgacggcgtccacgtccctgccccccatgtgggggcacctttgcccctcgccgctgcagtagctgcaagccagcgctgatgaagtcacggcggtgtgatgaagtccgcttttgctgctccagatctgctgctatttgcttattgcttgatgaagcctagataacgatgaacgagcttgcggttgttagctcaacccgacaacaagctactgctgcttgtttgcttgagcatgaactaaaccaaaagaaggtttgttgtgctgttgctgctactacttggcgtaggaagaagaatagaaggtccacctcggcaccgccggcgccctcctgtcatcgtcctccccgacccctccttcatggattcacgccggcgacctcctccgcccctagtcccctcggctccgtgtgggtctccagcacccacgagcggatctgagacccacggcgccgtcttcggcttactccgctgtccacgccgccgctggcctctccaccgtagtcacctccaccggcaccgcgtagatcgaccttcttccttcggagcacagtcacggcctgtgtcaccgccatggggagcggcaggaggagcaccgtggagtgatctgacaccaacatgtagcgtcagctctgctaccagacgccacacggtggccgaacgggaggcgccgcacttggccatcttctgcccgagctagagcagctgggcggctagattcttcgccacgagctcgccgaacccctcatccaacgcggcggcagtggtggccgtcggcctccaccaccacatccgttcgcacagcgcgcacgaccaacaccatgcctggccactcccctcgacgctggtcatgagacgcgcgcaccgtcgatcggggaggacgacaccgggagggcgctgacggtggcgacgtggagacaccgacgagaaagggagttagagagaagggagagagagggaggaggaaggagggaagagagaggatgacacgtgggccccacatataccagtgggtcccatatttatttttttgtgtgaatgacaactgggttcgacacatattttttaaattcgggtgccacgtaaccgccacgtcagcaccacatggaagaaagaccagatcaataccaccacgtatgcgccacgtcagcgaaaccgttctccaaaaccgccgagggagtcaaattgcaccagttttaatagttcggggagtcgtcctatctggtttgcgattgagggtcacagattagattcgggtcacttttaagggaatcaaagtgaacttattccatgtaaatactagcagcgatccctgatatggcaaatctagtaagcttgcagtagggcgggcggcggcgacgcttttagcgtcgtttcttccttgaaggcgtcgtttagaagacctattcctcagaggtgttgtgtgctttttctgtatttagtagtagggacagacgtagacgcatggtgtggttgtttattttttcctgagtatagtttcccaagactatagacttgtattttattctttctttatcaatagaaattagaaatgtcacactttcttttacaggttgtttcaaaaaacagtgagcttacagaaaccccatggcgtcccaaataaacattttcaggtcttctaccttctgtgtttctgcggactatgcaatcaccaacactacatggtttttcgaggaatgcaaccatcactcagctgtctggtaaccaaatgcttggacgatgcaacgctttgggctgaaagactcgatactaatgatagaatagtggtttcctcttggaaggaagctctttcctcttctattcggcgttctgtaatttgacgaactacttgtatctttctctctgtagttgaatgaaattcaggtgaggaaactctccccatggcgaccattaaaaaaaaaaactgcccgctaatcaattttatcaagatttagataatatcaataaaaaaacaaatagttgaggatgtccccaaccctaatatatatatacaacaaattgataaacatgttggatgatgtactactaggtgaataacgcactatcacagttcttttcaggctacaatggatcaaactattattgactcttctgaccactatatattgcattcgcagactgtaaggctatattcactggtggagaaaccctttttagtcccaattcacaaccccctgtagtcccggttatgtaaccgggactacgaatctgggactaaaaatatctatttttagttccggttgtataacccggactaaagatatctttagtcccggttgatgttaccaaccgggactaaagatttagtatcttcattgtttagttcttcccaagctctgaaaatcatctagcacagcatatatatctttctttgcatcctgactcctgagagcagcatgaacgattttcatttatataaggaaaaaaaagtacaaattacccctgaactatcgtggtcgaccgaattaccccctaaactcaaaaatcagacattgctcaccctaaactttcaataccgaacaaattacccccctcgacctaatctaaagtggttttgtcctatgtggtgtacacgtggcaatccagtcagcattttattttttaaaaaatagtgggacccacttgtcataccatatcttcccctcttccttttcctctctctcaggctcaaagcgtgcacggcgagcggcggcgcgcgggggaggacaggcagtcggtgcgcgggggccggcgatgggcggtgacgtgctggggcggacgggcggtcggcgcgtgtgggccggcggcggaacacggggagggcgcggcgggcaacaggtggcgccgagcaggccaggagggtgttggtggcgacgggctacggcgacaagtccaccaccctctcgagctccacggctatggcgacgaggcgacgagtcctcggctcaggcgggcgccgtcgaggtcatcgttccagtcggaggcggcggagagaggtgcgaagaatcttctccggttccaacggggagtcggcgggatccatggcctccctctctctctctttctccgctcagtcaggcggcctgcgatgaatcctcctcggggagggcgtggcgagcggcgcgcatggcgcggaggacacggtgggcggcgccgaggaggcattggaggcggtgcgctacggcgacgagttcgtcgagttcgccgcctgtccacgtcgtccccatcgaccgtcgtcgcttgtcgaaacatgcattcggcaataataaaagggggtagcgcacgagacctaaaagtggatggatatggagacaaaggatctagacaggttcaggccctctcgatgagaggtaataccctactcctgtttggggatttgaatccgccgggtgtagtatagatctgacgatctagttgtctcatgccccctagagggcctcctgcccaccttatataggatggggaggggggcaggattataagatagaaaccttaactaatacggtatcggtttcctaaatctactttacaatcttatcaaaccaggactttaggccgttccataatatacaagaaaacgtaatacccaagtaatgatccattacatatttcatagatataagttatcccctatatcagtcagataaccacgccgtgtgggtatggggtacccataatctccacactagcccctgagaccttcacagtcgaaaagataatcttctctcgaaccagattactccaaagccgagtgcttcaatcatctttgccatggtctcccgagtacttttaccaaatctgaagactgtggagggctgaaaaataactgaatgtaaacttaggtgcatcgactagatgcacctaataggtgtagctcccgactatggggttaattgaataaaccaagcatatagtcagggaataaataatccaaccaactgagtggtttttgataaatatagtcaaccaagtgacttgataccaatatatagcatatgcggtgtgaaatgctgaataatatgatccaagtgatataccgactgctttgtagaatatgatgcgtgcaacctaaagttgacaacatctttgaaaattcacatagcaaaatgctataaagaagcttgtatgttgtgaataaagaaatttccaaagtattgggcatacgccatgcgcacactgctttaacagatgtgcttaagtccctaaaagacacatggcttcaccacaccaagaaatatacggcatatgtggtgtaaaatccaagtaaataaactcataaaggatttaccatccgcctggaaaatgaccaagatatataatcagcctaagccttaatattggtcaataaaaatgcacacttacatggcaaaaagcaacgatattatatccaatcaattgcttaaaaacccaaacagtaccttaacctatataaaaaagtcagcggggcagctatataaagctttactgtttgacaccttttaagatgcattgtaccaactactaaaaagttgagtaactacggtacaaaaggattttaaggtattgggcacttgatcacgcacactttgccctaagcaaaaagtgcctaagtccctaaaagaacgtgataggccacacctaaaaatatgggttgcagaacatattagccctaggccaaaaaatatgccttcgacaccctttaaaggatgacgcatgtaacatgctcccgagtaatatatcttccgggtgatatagaccaagtgtagctcatatgaatagcttatgatctgagtgattatcccttatgggatactccaaaatagatataataattgaatcccgactagcgcaagtattcggttgataacccttacgagaaataataaatagtccagtctttgagcatagaaaatagacccatgatcatgaattcatgttgcatgtatccggaacaagtccaaattgaaggtatgatacttgtgtttgagctagtaagcccctgagcatatagcttgtctttctgtcgtagtcataattgtccattgatggtagccgacgcagttggcatagagacaagatgaccaatatagagataatattgcccaccagaggtggcaaaaatattggtggtagtgaagatagtgataccaatcaaaagtgatgaagttgcacaaccgtggaggcgaagaaaccagtcggcagcagtcaggtcagccagcaatgaagatgaaggcgcccagcgattgagttgtgtagccatggcagcgaaataatcagtcggtgacagacgaggcagctggtgaagaagatgaagatgcccattagtggcgacataataagccatccgtgaaggcgaggataccgatcggtggtgacgaaagtaagtcgatggtgatgatatagacacgcattaaaggcgatgacgaaatccaccaatcatgaagatggagaaaatagttggcaaggacaaacgcaaccgacagtaatgatgataagtaacaatcatagatgatcgactatgataacgaagttgcccattaaacagcagtagaataggctatgttgaagaggcttgacaggatattgatgaagatgacgatgtcggtgatccagtcaatagcagtgtagcaaccgatgataatgacgaagacgatcatcagcgtttgcatagtaggtcaactgtgaaggcgaaataacaagtcggcaatgacggaagcaacctgaggcgaagacgtagtcatccattagcaatggcagagatgtcagggccgatgaagtagaggtgctggtgatgaagtccatgacaataatccatcaaactgttgagaagatatcgaagctcaagtagttttcttgatgtgtgcataacaaagattgatgcaacaccccttgatctgtaaagatggcagtagaacttggaattgtagctgttgcagattcttcacttgaaggaaagtaaatgttgttgtccaacttatcgaaactgagctgattggttgataactctaaactcccggacatgtagatagaatctcaaacttgatacttgaaaaatttggagtagattatggcagcgtccagaaaccaaaattgccggtgaaataattggagttgctgaagtagaatgtctgctccgaagcaaagataaacataatgactcctggagttgactcgttgactgattaattgatttcttcagcttgtcgaattttgagagtcttgtatttgtgtagcccccgactctttggttagttggaaagcaactgaacatagagtcgagaactatagcttcttgtcatcgagtagccatcacttgagtgaagatatgtattgaggatgtccgggtagaaatcttgaatactggaacaccatttgtggtaataacatggcatcatatttagtgatgcatgccgaaatgtcgaagctcttgtagaagtcatggctagtgaagtaacaaaacttgcgaagtagcggcaatagagtttgccggtgctgaagacattgaagatgaagtagctccaccatggtgacaaagttgcacagccgtgataaagtgaacacgagtcggcggtgacagaagcaaaccggtagtgaagacgcgcagttgtgaagataataacaagtcggcagcggaagaagtagaataatgatgaaaaggaagacgtccttgagtggcggcaaaataggccagccgtgaaagtgaagacaccatgagctgcggcgaaggcaaaccagcgattacgatgacgccagtcaatgatgacgaataagccagtcggcgtcagacaaggcgaccagcaatgaagatgatgacgtccatcaatagtggtagcggtataaaccagccatagaggcgagggctctggtcagccgcagacgagacgaccagcggtgaagacgataagaccaatcaacactggcataatcatgcagccgtggaagtgaagaaaccagtcagcagcagacgtagacaggttgcgttgaagatgatgatgacgcccatcaacggaggcggagtccactgtccttataggcgagaacaccagtcggcgacggcgaaacgggccaacggtgaagtcgtagacccccaacaaaggcggcataataggccagctgtgcaggcggagacaccagtcggcggcggcgaaggtgagccggcagtgaagacgtagaggcccaacaacggcggtgtgaccaaccaaccgtataggcgaagacaccagtcggcggcggacgaggcggctggtcggtgaagacatagacgcccaacaacggcggtataataggccagccgtgcaggcggagacaccagctggtggtggcgaaggcaagccggtcggtgaagacggagacgcctaacaaatggcggcataataggtcagccgtgcatgtagagacaccagctggcggtggcaaaggcaagccggtcggtgaagacggagacgcccaacaaacggcggcataataggtcagccgtgtaggcggagacaccagtcggtggcggcgaaggcaagccggtcggtgaagacgtacacgcccaacaacggtggtgtgaccaaccaaccgtataggcgaagacaccagtcggcggcggacaaggcggccagttggtgaagacaacaacgcccaacaacggtggtgtgaccacccaaccgtataggcaaggacattagtcgatgacgacgacggcaagccggtggtgatgttctgactgatccattcctggagcgtaggagataagcttaaagccatgaatcccttttatgcatatctggatctggatcctgcagaacaaacatataggatgagtagtatctgatgtaaatataatactcgatgaaaattcaagtattttaaaatgtttataaatatgtatttctcctctcgtcaattttgatttccacgagcagatgactcattacgtttaaacactctgcccgactagtcatagccaccaagcaccgggagtcggcctaggcacttcccaaacatgcatatgagtgacatgagttcatcattaatggaacaaagtttcacggatcagaatttactactcgggtacttttgcaattattaagagcagaaaataaatttatcttatctctatgcttatgatttatttcgagtaatacttagcaccttgagttactcggtccatccaacgagcccccgggtgctaggaattggcccatatccattgacaaaccaaacggaaagcataggaagatagaactccataactcgatcgaaactttattgttactcggattattttgccagcaatcaagataaatattatgaaaaattgttaaaaaatatgatatagtatctgtagcccccgactcactagtcaacggcgaaccatttgatgtagtgaggcagaggaaaaggaaaatatcatataaagaaaagtaatgatgacttagcttttttttatctccctcggtgacgatagaggtgaccgatgtgggaaacaaagtcatccatcaatagcaatgaagaaaccggacagcagtggtgaaggcaagccggtgtagatgacaaggcccatcaacggccgcggagtctgtcaaccgtataggcgaaaacaccagtcggcggcggaagcaagccggtcggtgaaagcgaagatgcccatcaacgatggtgtgaccaaccaaccgtataggcgaggacaccagtcggcggcggcggaggcaagccgacggtgaagacatgtacgcccatgaacggtggtgtgaccaaccaaccgtataggcgaggacaccagtcggcggcgatgaaggcaggccggcggtgaagtcgttgacgctcaacaacgatggcataatagaccggctgtgtaggcggagacaccagtcggtggcagcgaaggcaagccggcggtgaagtcatagacgcccaacaacgacggcataataggccggccatgtaggcggagacaccagtcggcggcggcgaaggcagaccggcggtgaagtcgtagacgcccaacaacggcggcataataggccggccgtgtaggcggagacaccagtcggggcggtgaagtcgtagacgcccaacaacagcggcataataggccggccgtgtaggctgagacaccagtcggcggcggcgaaggcaagcctgcggtgaagtcgtagacgcccaataacggcggcataataggccggccgtgtaggcagagacaccagtcggcggcggcaaaggcaggccggcggtgaagtcgtagacacccaacaacagcggcttaataggtcggctgtgtaggtggagacaccagtcggcggtggcgaagacaggccggcggtgaagtcgtagacgcctaacaacagcggcataataggccggccgtgttggcggagacaccagtcggcggcggcgaaggcaagccggtcggtgaagacgtggacgcccatgaacagtggtgtgaccaaccaaccgtataggcgaagacaccagtcggcggcggcaaaggcaagccggtggtgaagacgtagacgcccatcaacggcagcataataggccaaccgtgcagacggagacagctgttggcggcagacgaggcggctgatcggtgaagacgtagacgctcatcaacggtggtgtgaccaaccaatcatgaaggcgagaacaccggtcgataacgacggaggcgatttgataaacaaccgccattcgggagtacatgcaaacgatcaacaaaccattaatagattagtacaatatatatcggtgcatgcatacatgtttgaatgtagatgattcgatataagttaatcgtaggcttttgggctgattctgattggcgtatacatgtactccagatgcagatccatgtgttcgtatgccagcccaagcatatatatatttgtacatatatccatgtacagcttgtaatgacttgatgacgtggccgttgagcctccatagccgaggtggagtacgcacgagtactgcccaaaaataatctatcgcttggcatcgacggtactgtcaaaaaagtattgctagaacaaaaaagtaatgctagaacagatcaatctgcaattagaaataaatataatatatatggataagaaacgaaaaactcggatcgagcaatgaggctgaatcacgagtgacagccgacgacgcgccatgcagcgtatataagcccctgtagccgacgacagcttgatattcagcactgctccgcgtgcagggacagctgctggacaacatgatggtgttcggatcggcggccggacgtgcgaggtcgccgaccgcttcgccttgatctcatagttgcaaatagtaatgaaaaattaatctgataaaagtttgatcggaacggcaaacccgagtggaaaattgaaaccgtcgaacttatcgagatcaatctcatcacatctctagaaaaattggttccatcgcacttctcgacggaaaactcgacgcaacccctacctagtgcgccaactgtcgaaacataaattcggcaataataaaagggggtagcgcacgagacctaaaaatggatggatgcggagacgaaggatttagacaggttcagaccctcttgatgagaggtaataccctactcctgtttggggatttgaatccgccgggtgtagtatagatctgacgatttagttgtctcatgccccctagagggcctcctgcccaacttatataggatggggggcaggattacaagatagaaaccttaaacaatatggtatcggtttcctaaatctactttacaatcttatcaaaccaggactttaggccgtttcataagaaacgtaatacccaagtcatgatccgttacatatttcatagatataagttatcccctatatcagtcggataaccacgccgtgtgggtatgaggtacccataatctccacatcgctgtcaaccggagccacacagccgtgccatcgatttcccctccccggccatcgcgcccgccgctgctcgccgccgcttaagatgccacctgattcttctcctgctcctggtgttccccgcttcgttgctgctcctgtaaaactaccccgtcacaccggcaagcagcacacatctgtacaacctgtacatgcatgtacaccgttcgtcgattcaatttctctcagaattcttccgtgacattgccacgggtagatcgcgtcatcgccgcgagcagcgtgccagcgtccggccatgccgatgccaccctcgtctggtgggtggcgtgtgatggcgacgcccgagcgagctagccgagccaagccgagccgccgcttgccgccgcacttcttgcccccgccgccatggatgaggctactgtggcggtgcatggggcagacggaagggtcgtcgaggaagggttggcgaggatggacggcctcacgctcgagctctgcaatttttccccttcccttctctgcttctctcgttgacgcggtggaggcggcgaacggtccgtcgtcctggtcgtcggcattgtggccgtccaaccatgtccgccggcgaacgcaaagcaagctcgggcgactggtggtggaggcggcgagttcgggcggtcggcggtggaggcggaggcagagcgcgtccttggctcgccacagccatgtgttctctcctctgctcacggagagagaggcaaagaaggagagaaaaaaaaacactgacaagtgggccccactggtttctttatttgtttttgctggctgtatcgccatgtgtgtgccacgtaggtagtaaaccgctgcgatccgtgttaggatggtaatttgtcgggttttaagagtttggggtgtcaaatgtccggttttcgagtttaggggggcaaatcggttgaccccaatagttcagggagtaattcgtaatttttcctttatataataataatccttgtaagaggctggcgtagcaatgcccgctagctgcacatgacgtgatagagttatttggcatttggccacgccaggcggccaaaaggttcagatttacaaatacgttttggaatggtctgttaataaaattaaaaaaaataaaaaagtctaaaaaaaaagttttcagacataggtgggtggcgctcaagtaaatccatctctggttaattactcgtcgccccaacgtaacagaaagaatgcaaggaccaggcacaacatgagccccaggctagtaaagccatttctaaccattcactgttggcacatgattagcaagccatttttttttagaattacacagtacaatgcaaacactcacaacgcacgcgcactcacccctatgagcatcttcgaagactgggccggcaaattctggaatttgctgttaaattctagaaaattcattcccatgagaagtcgaacccagaatctcaggtgctactgagactcttgtaaccagtatgctacatgccttttcgcgaatagcaagccattttgcttctcctagaaatgagcataaaatgtatttttccccacctgcatgttctcaagagactattactagaatacacagagtaagactgatactgatgaaacaaaaataacagccacacaacacaataatttgctgcct

SEQ ID NO: 16967 - DNA, 2711 bp, Oryza sativa
ctagctgcacatgacgtgatagagttatttggcatttggccacgccaggcggccaaaaggttcagatttacaaatacgttttggaatggtctgttaataaaattaaaaaaaataaaaaagtctaaaaaaaaagttttcagacataggtgggtggcgctcaagtaaatccatctctggttaattactcgtcgccccaacgtaacagaaagaatgcaaggaccaggcacaacatgagccccaggctagtaaagccatttctaaccattcactgttggcacatgattagcaagccatttttttttagaattacacagtacaatgcaaacactcacaacgcacgcgcactcacccctatgagcatcttcgaagactgggccggcaaattctggaatttgctgttaaattctagaaaattcattcccatgagaagtcgaacccagaatctcaggtgctactgagactcttgtaaccactatgctacatgccttttcgcgaatagcaagccattttgcttctcctagaaatgagcataaaatgtatttttccccactgcatgttctcaagagactattactagaatacacagagtaagactgatactgatgaaacaaaaataacagccacacaacacaataatttgctgccttgcacatcgatcacatagtacatagttttttttagacaaaaggcccagggcccggctttttaaagaaagccaaatacggcatcttcctgctggggttgccagcaaacatttttgtatcctccacgcagggaggcagaaacagggaaacaaagttcacaattaaaacatccaagagactgggcagataaacaacaagaaactctaagtaagctacaggagacaagcaaccccaaaaaccaactcttcggaaaccaaacagaaaacagcagcttcccagggacttctagtatcagcccacacccgtcctggaaggtctaagagtcgccaccatccgcttcatctcctccgctagtgtttccagtttagttgcctccccaggacgacaaagcttcttccactgcacaagattagaagttatttgaaaaaggatagcaaggggggaatacaccaacttgtccctgaaaatcatattattcctagtaatccaaagattccaacaaacagcagctaaaagactcagggtgattctaacagagcaaagatcaggagccccatcacacatcaagaaaaactcatcagagtttcttggtataaaattccagcgcaaagtgtctctacacacgcaccagacaaatctagccatgggacagttaaagaggatgtgattagttgtttctaactccccacacaactgacaaaattcagacccctcccaattcttcttttttagctgttcagcagattggatcctatctctaagagctaacgaaaggaaatgtttatgtttcatagggcaagggcaaccccacatcttagcattcacatccccaatgcctctgaaagttagtgctctgtagagtgatctggtagtgtatttcttgtttgcattcagaccccaattgagcttgtcatgtgtatcagagagaacaatttgatcaattatctctttaagatcattccattcctctaattcctcaggaccaaaagacctcctaaaggataggcagcctgggcccccctgacccacctgactaactaaaatctcttgttgattacaaactctatagatcgcagggaaaagggtcatcagtgggcagttaccaaaccaggtatctttccagaatttgacactcagcccattcccaatactccattctgcccccagcatcatccatcctctgatgttcagaaggcctctccagaactgggaaacatttccaattttacaggaaaagaaactctcattggtcaagtattttttcctcaacaactctatgcacagactcttgtcctctgaatccaccttcattatccattttgctaggagagcaatattcatcttcctagtttctgtaaaaccaagccctccaaaatcctttgggaaagccatatcttccaatttgaccatatggtatttccctctaagtttgttactagcccaatagtatctacctctaattttatcaaaactctgatggatcccctcaggaagatgataaaaacccatggcataaaaggggatggaggagaggcatgcattaatctggactgctctaccagcatgagataaattgcttccccatttggtcaacctcttctcaagtttctggcctaggaagtcgaaacccacatttaggatcttatcaggactaataggaagccccaagtatttcataggaaaatgacccacaggacagttcagcatctgggcaactctttcagtgtcaagctcactcatcccaatagagaaaacctcacttttatgaaagttaatctttaaaccagccatctcctcaaagcagtataagatgaattttgtggttacaatctgatgcatatcattggcaatgaaaaggactgtgtcatcagcatactggagatgagtgatccccagggaagatattagggactaaaccactaaggacacctctcttcttagcactatcaaacatggcagccagagcatcactcactagattgaaaaggaggggagagagagggtcaccctgtctaagtcctctaaaagttctaaaaaagtcagtcctctccccattgatgttaacac

SEQ ID NO: 16968 - DNA, 933 bp, Oryza sativa
aatgtggtttttcagattttcctttgatgttagttcagtgtcaccatccatcaaagaagtgatactacatctcttcttcctctcattagctatcctatgataatagtcagtgtttctgtctccctctagaatccattgtcctccacttctattatgccagtaaagctcttccatctcataaagttgttctaggttattttccaaagcatatctctcctgccattcatcaggtgataactcattttccaaagctttagcctctatcatttctaatttcttctgcagaacctgtttccctctgactctctcacagtgtgcattaatcccccaacccttcagaaatctccttaactcagcttgtttcttgttccaaaactccaaaatgtaggaatcatctcttgttggcattttttgggtaaccatctctttaaaattttctgcagctagccaagcagactcaaatttaaaatatctagatctctcaatgttaccctcacaggtatctagcaaaatgggaatatggtcagaacccactctcagaatagaggaaagaacagagttgggatacttattgtcctagtcatcagttactaaaattctatctaacacttcctgggtggggttatcttgtttgttagtccaagtaaatctaggaccaattctgtgtaattctctcaaatccaaaccagtaataaaattaatgaacatattcatgcatctgagatctaaattgccattggatttctcactagcaaattaatacatgttgaaatctccacccagcaggacaggatgtagtctgaactggatatgccaggacaactcatcaaggaaaccatttttcaaggtgttatcaacaggaccatagacacaaactatctcccaaacgaagttgtcctttttaatcttcaggacacaactaagaaaaaaagc

SEQ ID NO: 16969 - DNA, 2856 bp, Oryza sativa
ccacgtggcgcctggggtagcctcctccctctagttcggctagggagtggccaccgccctacctcgggcccgacccctctcgggggagggccacgtggcattggggggcagcctcctccctctaaacatgatacccccgggcccatatcaccgacagtagcccccggcgttagtcctaaccaaaacctttcccaggtagtcagggttgacgccaatctgctagtcagttgacatgtgggcccgatctcctttcctatcattctgggagttgggcggtgggagtttaatcacgttcatacgtcgccttaacttcccactttcctcccggtttccgaggcgctgtgggatcgggaatttagcccgcaccttaggccgtgaacttattacctatatatactcagcaaacgttcttatattctctcgggcccatgaccttacgccgcgtacctcgtttgcccttgccttttgttaacctctattcatgttctactttcgcgtgagtgtgaggactgaactttccatagccagcaatcttcacccgcgatcaagccaagctgggcgccgtagccagccggcggggccagagccaattgctacggaagagccagcacaggggccccgggcgtcgaggcgtccagagctcaacgcaaggctaggatagagctaggaatcgtagccccctcgcttttagcaaagaatcgtttgaatggatgaaccgaatacaaactttttgttaccaaggggggcaaacgagcgcgcgacacgtgggtacgcgggaccgcgaggaagagatgggagagagataaatataagcaataataattctatgcaaacgattatcttcgcgcgagtgcgaggactaaatttccatagccaacaatctttacccacgatcaagccaagctgggcgatgtagccagccggcggggccaaagccagccgctacggaagagccagcacagggggccccgggcgtcgacggcgcccagagctcgacgcagggctaggatagagcaaggaatcgtagcccccacacttatagcaaagaatcgcttgtatgaatgaagcaaacacaaaccttgcttgcatgtcacgacctttcaaacctttagctcgaagagggcctcccaccatgggttcctaacaattttgggaagcctgcgaccacttagcaaatgaggtgaggttcccacgaggctgtgtccccacactacacattctgtttgctctttcctttcagtggcctccttccaatatctctcccttttacacggacgactactttcgcacgagtgtgagagccgaaaaactctagagccagcgatccccgtccacagttgagacaggctgggcaccatagccagctggcgggaccaaatctagccactacggaagagccaacacagggggtcccgggcttcgacggcacccggcgctcaacttaaggcaccgagggagcaaacaaatgcgtaacacgcaagcgtcgcagggccatgagaaaagaacgtggggggggggaaataaatataagacttcaagctatattaagttgaagaattgaaaaattgaaaatacttgaagcttgaaaggacgattagttgagccgggccaggcaccgcagccagccggcgggaccaaagctagccgctacggaagagccagcacaggaggtcccgggcttcgacggcacccggagctctactgcaagagccctcctaggagtagaccgaggcgggtggcaggttcatgagcgatacccgcgcttggccctggagggccatggggaagaaattcgccttggcccgatcgtcacaccacaccgcctctatgatcatcgtgtggatttggagggactcgaaggggttgacgctaccgtggtacctttcggtgaggctaggccgaaactttgggagtcatcggacattccgaagaatcgccacaaagacctggccgccagccatacccggtgaagatgtggggggcctagccccctgcttagggtggcgcggaactcctgaggaggcgggcgccttcccccgcatttgcggcgcgacgcttatctcatcggcgctcgaaagaacctcaaaaatcacgaacgcgccccctacctggcgcgccagatgtccgagggtgatctcctccatcagggaaccgtgaggcccccctttttttgttcgaccgggggggcagcgggtgagatccgaggttttcgagacaaaagagacacaaggaatttatacaggttcgggccgctatgaagcgtaataccctactcctgtgtgtatgatgattcttttgtgcttgcaaagcctctgaatctccgatgtacaagctagggttagagaagctttggctcggggatccagagttcgatcccccttcccgctaggtatggtcctccttttatactctaaggggataccacatgtgctgcgagtgctacctaggaagaagggaaaatattctctatattaatgacatgtcttgtgccttagcttggaagccgcatacacgtcgtctcggtcgtggggcctaccacatcatgccgcctaacacggggggcgcccatgtcattcactatttaatgggtgaagacttccgggttctcgttcgcaccaggaaacgggaacccgggtcagttctgaccagggtaagaggctgtgaagcccctcattattatgatgggatgggacggagaacgccgcacgccgcctgacaaactgacagggcgagggtacacagccgccgtcccatcggtcattcgaccggtcacggacctgtcacagatcggtcacagatctgttgagtgcactgcacgccacattaaatgcggcgtggcgcaaccgctcaggtcgc

SEQ ID NO: 16970 - DNA, 11943 bp, Oryza sativa
ttgtttaaactggtgctaaaatttgatcagtctatgctaggttttaggcttgtgaaaagaattgtaaaattagctttatgcaaaagaacctgaagccattccttgaaataccctctatcatatgcattgttgttgtggtggcttgctgagtacggttggtactcacccttgataattatatatcttttaggagagtgttgaagagaagcccttgtcggtacgcttgcgtatccaacaagatgatcggagtgcggtcttgttctaggtctcgttccccagtcgactgcttgtggcatgttaaccgggcccttatattatttggtcttctggtgttgttctctgatagttattggcctacctggccctaatgtaagtatttaactcttttagcctgaattcattcgtgatatgttgtgattcaactatgtatgtgtgtatcaactactgatccagggattggtacggataaacacagatgatttccgatttccaaaatcgggggtccacagcagcgggtgagatccgaggttttcgagacaaaagagacacaaggaatttatacaggttcgggccgctatgaagcgtaataccctactcctgtgtgtatgatgattcttctgtgcttgcaaaagcctctgaatctccgatgtacaagctagggttagagaagctttggctcggggatccagagttcgatcccccttcccgctaggtatggtcctccttttatactctaaggggataccacatgtgctgcgagtgctacctaggaagaagggaaaatattctctatattaatgacatgtcttgtgccttagcttggaagccgcatacacgtcgtctcggtcgtggggcctaccacatcatgccgcctaacacggggggcgcccatgtcattcactatttaatgggtgaagacttccgggttctcgttcgcaccaggaaacgggaacccgggtcagttctgaccaagataagaggctgtgaagcccctcattattatgatgggatgggacggagcacgccgcacgccgcctgacaaactgacagggcgagggtacacagccgccgtcccatcggtcattcgaccggtcacggacctgtcacagatcggttgagtgcactgcacgccacattaaatacggcgtggtgcaaccgctcaggtcgccataaaagcgggtaggtgagcgcctggaggcggccagctaacccatcgcacgtggcgacctagagaggtggtcgagggagcccgacccctaatcacaggagagggtggccgccgccctacctcgggctcgatcccccctcgggggaggttcacgtggcgcctggggcagcctgctccctctagtctcggccagggagtggccgccgccctacctagggctcgacccctctcgggggagggccacgtggcattggggggcagcctcctccaactagtctttgggaaggagtggccaccaccccacctcgggcatcactcctctcgggggagggccatgtggcattggggggcagcttcctccgactagtctttgggaaggagtagccgccaccccacctcgggcctcactctcctcaggggagggccacgtggcattggggcgcagcctcctcgctctaaacataatatccccgggcccatatcaccgacaacacgagttctgttttatagttttcttgagggaaaccacacctattttatgttattttgttccacttttctctatttctcgatataattaatgaatcatgtatatttcatttttgtgttaactatgcactaataattatattactactactcgatataatgaaacatgacgtttcacttaccaaacgcatgagcagttaaagtaagtttgtttgagacttgacacttatatttcttttcatcttcatcatcaggtttgaggttaacttttaatttcgttaaaagttttcggtttttgaagttcctaccattcatgcctttttttgcaaggcttagttttggtttagtttacattctcaaatatcataaaagcaaaactcgcactagtatttagttgagaacgtacgtccatactccatattcaatttcccatgtatcatgtcgtaccaaggtggctgaatgatttactagcttgtggctaatcaatgcatttaggttgtgttctatattatatttcccaacttttacccatttgttttccgcgcgcacgctttctagatggctaaatggtgattttctttagaaaaatagttctataataattcatattaatctatttttcaagtttttcttacctaatactcccgcagttccatattataatatgccttttgttttctaaatcacaattatttaagttttatcaagtttatagaaaaacatataacaatatttttggcaccatgcaaatatactattaaaatatgtccagtattagatttaatggatctaattttgtatcataagaattgctatattttttataaacttgatgaagaagtttgacttagaaaaatatgaatgtcttgtaatataaaacggaggaaatgagtagctccattttaactgtggggatattatgcattaacttgtcttgcaagcatgtcttagttttacagctagaagaaacaaaggttacacaggtgtggcccgaactgctagtgatggcccgacagtgatggcttgttttgtggtagtgcatcatccctaggttccaaaaacatatttgtcaaaaaatagttactcgttcatccgcagttttggagtcagactgaaatccgtagccgatcgtgtgagcagcctgaaaataatttatgcttggaatgtcccaggtttgccaaatggatgtcgtcttcatgaaaaaggcaaaagcttgtatgccatatagcacaagggtgagtatcctatcttactataaagttatcccccactaactccttaagattaacatgcaaagatgccatatcatcatccactaacaagatgccacattatcatccactaatccactaattaacaagatgccacatcattatccactaataatcatcatatttaaacatcatgcaaacatgctatgtctttatagtttttataatttaagagcttttcaaatacaaacatgttaaattatcatccaacataattcacataatgtttcaatatacatctttattatgttttatgatatcctatatacttatatagttcatcctcacttagttagtgcttaaatgattaatctatggtccatattatctttctccttttttcctctaattaagtcatatcccatcaattgttttcagcctttagataattaatctacggtccacacacccaaactatctccctatttttattcttctataaagtcatactaccttactttttatgtttgaatcaccattctacatactatttaaatttaaattatcataaaccatattaatttacttaatctggtgttatctagctatcatagctatcttacacgttatttttttttattgttatcatattaaattctcgcagcaatgcgcggggtttcatctagttatctaaaaataaaagcacacgggtgggtgttgccacactaatggacatgatcactacatgtcaatgccacttctagttacgaactgttactaatgaaaatttttgtcatgaaatttttcaatttcggttggggggggggggggatgcgggggcttactagtttcagttccttgctcgaagccgtactaatgagttatccatggttatagcatgaaccaaccataatgactctgattgtacaaattgccagtttcggatatgaaaacatatagctttttttttacacgagagtatgaaaatttagctgtcgatgtgatttatggttggcagccttttatttgatgtcatttaaatgcctgaatcagtggttcaaatctcgaatagggagggttaaaagtaaacaatgtacatatcatgatagaattggtggtaatcacacatcagggagacttttcgggttcaaatcttattgcaacaaggtatgtgtttcacttgaatgaaaaaataggtaccaaaacttagagcctatctagctcatatagatggagcagtaatcgtggttttgcttgcataagcagtggtttagacaattggaggctcgaagctgactcctgaagctctatcttgtctgcaccagggggtatgctccaagtgaacccttgtagaagccttgcgaatagcatcattgtaattgaagtgccaagtgacacggcagagggcagccacgcctaccagcaccgaatgatacaaaccgcaactctggctcagctagcaccatagtactagtagcattgttcagatgtcgctctggtcgaaattcaagtgggttaacccatactctagggttccggccaagcccaattcggcttagcattacatggctatcctttggtatcaagtatccggcgatgatcgtgtcagatatggcaacatggggtggattgaacgggtggtaggggtgaatgcggaacgcctcccggatacatgccttgaggtatgtgaggttctgaatgtcggattcctcgacaagtctttccttaccgacaacgacatcaagctcgtccactgccttcttcataacatttggattgtttaccatctcggccagtgcccactctacagcattcgatggattgtctaccgttgcaataattatttcctgcagccataagattaaatcacaggtgtccttactttgcatcgtggggacatcattacttatcgaatacaatccaaacttttggaaaattggaaaacaatattgattatactgtggcgtctaacgagcccacaacaattacgtctatacctaccaaacaaattaaatataagtgtaatccagtgatgaacaatgcgatattgttcatagttttgatttatctcttcgtttctcgatgcacgcgcatgggttaagttcagaatgagacagtaaacatgcattatactagagttatctgttttctttccaacattgtcataagtatttaaagtgttatctagatgaaatcattgattcttaacttcaaaatgaatgaaaccacaccataggatcatgattaggtataacaagccagcacctcactgagttatattccatctatgtcaaaatataagcatttctcgactatgacatttataaaaatatacaagcatttcatgaatactatttgttgttttaaccaagcagcattcaatttttttcccatcttattccccaaccatcccatattcataagagaaatcaaagtttttttctactcaaggtttcctcaaacctataagtgcttatattttactacctctgtttcatactataagttgttttgattttttggaaaaaatccaaataccaccctaaactttggataaatccatctagcactctaaactttaataccagacatctaactccccgaactttgtaaaatcgctcatattaccccctaatatggttttggatggtgattttgcatattttggtagcttaaacaaagaactttaaataaccaatataacatatttggatatcatcagttgtaagtcatcaatttatacttatacggtgataatatattattattatgtaggtacttgtttataagagctaacaaaagctaacaattgaaaaaaagaaagatttaagctgagattttaatatatatgtctaatgtgtatatcacgtgatcaaacttatccaatttatatacaaaaccatcttaggaagtaatatgaacagttttgcaaagttcaggggggttggatgtccggttttaaagttcagggtgctagatgaatttgtatctaaagtttaggggggttatttagactttttccttgattttttaactaagtcaagttctttagctttcacaaaacttataaaaaaataatagcaatattattaacataaaacaaataaactatcaaaatatatttaatgttagatttaataaaattaatttggtgatacttttttttatattttctataaactttgtcaagttttcaagaagtttgacttaaaaaatcaaaacgacttataatataaaatggagggagtataacacagtaagcaatacacaataatactaacaaataagaaacatgatacgccaatcatttagcgtgcgcagtactacactttgaacaaagctaaccgtaagcccgcaccatttgttttttaataaatgacgctgttaacttttgaatacattttgaccatttaatatataagatataaatcatgcttaaagtactttaagtaataaaacaacttacattatagttatgtaattttttaataagacagatagtcaaacgtgtgataaaaagggtagtactacataaattggtgacagtgtaatagtatcctttgttataacgaatcaacacctcactaagtaactaatatgccctccaatccaaaatagtagcacttctagggtttaatgtttataaataaatgtaagcatttctagaataagtctatgtctatgaataaatgtatgcatagtagcactcatatcgggtctattgaagaaagcaatgaggttgaaccatagtcactaaataagtctatgtgaacatggaagttcagaattaataggaaatgaagtggtgaaaagcgacggtttatttggtcatgggaaagactgatattcttctactatgaatgtattaaatttggctatatatattgctggcaaaaggcatgaatgaataaatgatatgcagtttatgggttatgaaaatccatatgaagttttcgctagaaagaaaacaatttcgcaacatatatgtaaatctcataataatcagtgtcatgaagcacactatattatcatgaagagaattgcaagactcgtagaagagtttatgatgactcacaaagagtttttctcctagaagtgagaatatttctcatagcagagaaattgacttccggaagaacaagttgatccttgtaggactacgctaatgtatgaatcaccggttaatctccatataacatcgataactcttactcccataaagtggacagacccgttcaaacgaatgaattggaaaatcacatccactagcatgcaagtggattggtagttttctacatactatgaaggtgtaagaatttatatatcatgaagatatactaatcaatggtatttggcaatcttattaattcccctaatgccaaaatatagaccggtttatgtcactctaagtggtttaagctaattgttgaagattagtgaaacaatcaaattggtaatgattgataaatccactaagagaaagttgcataatatttaatttcttgtattgagctaattattttatacataccgcatatgtgtatcgttgcaacttattttcccatagtcctccgtaaggataaaactttgtttgtactgcacatttgaataagtggttatacatattgctcctatacgttgatttatttctcatgttcatagtagaacttatgaaataagtaaacgaaagattaaacattgtggtaattttattttcattattttacacattaataaaaatgtggttatgacattggaacatggaagtttcaacggatctcttcttgagggggagcatatatgctaaacattgattatcatacttaagacttggaagtcttatttttgatttaccaagaattaatcaaattaatcattgttttgataatttaccttgaaggttactaccgctatattgttgtgttaatccaagttgattaatataataaagcatatagatcattagctatttatgaagaatagtcgatcttaaagattatgcgatcaagaatatttctcacgcaaggtttttaatgaggcaacaagtgcaatatattctcctatccttttctcccactaggtttttggatggagtttttaatgagacatgtgtatagcgcggtattcgtccaagggggagtgttatgaaactattatctcctgccagagataaatatgggctcataccaaatatatggatacgtatcctaataggtgtcacgcccggaatttctatccaaaattccaaacgcttacatgtgtgtgaaccctcgtccaggaatcagccgaggcacacaataacaaattgataatagagtacaattattactctaattaataagcgaataaaatgtcattacagaggtagatagttcctctcaatcaataaagatctaagcagcggaaaaaaataagataaacggcgcagacggctccactccacaggcagcttgaccagggctacacctaatccttcacaccatcagcatcactgtagaactcttcctctgatgaatgattgcaaggtgagtatatgacatactcagcaagccacgcagcaaatatgcaagtgcacaggataacaaaggatggcatagtagggtttcatttgcataaacagcatttaataaacatttcagaatttaataaatgtcacgcccggaaattcactagtaatttccgaactaatttgtgcataaaatcctcgtccaggaatcagccgaggtacacaaactgacaatttaatatacaaatccatcttaataataacgttacatacttacaaagaaaagaaaacagcagcggaattaacggtctagcgatggcttcagctccactcccacaggcagctcaactggggtataagccaaacgtcttcccttctggatcctttatcttcaactgaggtttgatgattattgcaagaatgagcatatgacatactcaacaagccacacagcaaatatgcaagtgcacaaggattccaaaggatggcataatataggctcatttgcaaaagcagcatttagcaaagatttaagataagtaaaacagtagagtaattaatcatcaattttaatcaacactgaacagcacacccatgctgctcaggcccaaccaaacctgaacaaccaaccccggtcgtacagatcaaacctccaaactaggaattatccattccatactaggagtcaaattaattatcacattattaacattgatgagtagtgtgaaactaatcacgaaaaacattgctcaacccgcccataaccacgggcacggctattcgaatagttttactctggccagaggtgtaccactgtacctacaagacacgatttcgcacatgttgccatgccccgaaataccaccacggcattgcaaagggggaaatcgtgacaataccctttgcacaacacaactcaaaacagtgcaccgttcctggatcataatcacccccttataaacaaggcatggactccccagcgacccccgtggacttcttgccacttctcagtctggcgcactataatgaatcacgctatacaaaagataaagccgttgcccatcctggcttgtggttggcacggtaaatgtttcacaacagtagctcgcgagccggtccttaattgccatgagcacaactatcaaaaccatatgctcacaacccaccttaaccagattttaattatcaattaattaacatcacacgattaatcatcatgagctaccattaaatataaccataattaataagaataatataatataatttatatttaatcccctttaattagctaatgtttctaagcatagctaagcaaacttacatatagcatttagctgaaccaatccaatatataaggttcatgctaatcaaattataacccataggaaaataagatcatcttcggccattaattaacggggaaaggttcaccacccgatgacattcaaaaataatgcatagttgaaataaaataatagctttaaatgggttcaacatgctcaaagggttgtttgggatctgtgtgacttgccttgggcttccgcaaacacttccgaaccttgctcaacgaaaacgctctcctccagaacgtcggaaactaaagcgaaagaataaaaatcaacaaaacagtacaaaaacaagcataaacagtacatgtgaatatttttaacatatagatcttgattttagaaaaatttagcaacttgaaccactcgaatcggatctacagttatttagttatgattttccgaagatttaatctattagaaaaaactggaaaaggagaagatgatgatgtcatgctgacatcatccatggcgaccggctcggatggcgacctcgccggagctagggtggtcggccgggaaaaaggagggcatgtacacgtagaggacgacgagacgaacccaacggtactcaccacaacgacaaacgacgttggacgacgaccggcgacgagaggggcgacggcggcggctcggttgaccggcggcggaggagctccggtggccggcgacgacggggaaggggcggccgggctagccctcggtcacgcgcacccgccggcggcgagaggaggcagcggcgacggctagggcgacggcgcagcgcggctgcacgttgaccggcgacgacggcggcttgcgcgacgcggcgacgaggctacggagcacgagagagcacgggaaagagggcaaacgaaagaggaggactagggggtcctatttatagccttggattgaagagatcggactcctcccgcaagaaatcgatccgggaaatcaaaaactcggttttggagataaactcaaaaacgagttcgattcggataaaatactcaacggtttgctccaattcttaggggtaaagatagaggaggataagaggaatatttcccctcaactaattttgcaaacggagctccggatgaggcggatttaacggaggaagcggcggctgcgcagggcacagcacgggcggctcggctctgtccagagctgtaagatgaacagtgccagggaggtaaattagacttttggttggctgagaacagaacagggcacttgacttgggccggcttgggctgcacagcacgcgcgcgacggagagagaagaggaaggaatgggccgaaaagggcccaagctgaggaggaggatttttattacttttccaattaaaataatcacttaaatgatctttcaattgttaaaaatacttcctatgctcaaataattccaagaaaaatcttgaaaatacttggacactcaaagtacttaacaaaattataactagaccatttaattattaatttaatatgtgggtaattactgaaatgctctttgtatgattaaaattaggaattgagctccgaaaaatccgagaatattccagagagtataattaaccatggagaatttaataaaaattaaatccatccatgctttatatttaggaaattttatttcccacatttaacttcacttgtaaattaatgaacatttaatataaattctgataataatttattaaataatttataaatcctgaaacgaaaatcagggtgtgacaataaaacagttaggtaataattaattaatattaatccaacgctatacaacataccctgttgcataggcccaatcattctgaacaaccatcccggctgtacagttctatctccaaaccaggagctaatcaaattattaccagttatatcatcttttattatgatgagaggtgtgagactaaacacgaaagacattgttagacccgcccataaccgcgggcacggtattgaatagttttactctggccagaggtgtaccactgtacccacaagacacagccccacaacatgtcaccatgtgccttaataccaccacggtacctcggaaaggagctgtgacagtacccctcgcacaacacaatcaccacagcgcacctttctggatcataatcaccccctttataacaaggcatggactccccaccaaccccggtggcttatcttcgccacttctcagtctggtgcttcccaatgaaaccatgctatacaaaaagtaaa

SEQ ID NO: 16971 - DNA, 14097 bp, Oryza sativa
cctcaattgatttcaccggagaaggaaagttgcggccgaatttggaaaccgccggcggcggcgcggtgctagggtttcggccggaggaagacgacgactccgacaggcgggacccacctgtcagcggcggcgagctcgcgcgggcggctgctgctgcggactttgccgacttgggcctgggagagagagagaaggttttgggccgactttcggcccaaagccaaaagagacttttaaaaatctttttcaattaaattattcatgaaatgcatttccatttattaaaaatacttccttagctcaaataaatcccagaaaaatctaggaattatagaattaagcaaagtatttaatgaaattttatctggccccattttatattggaatttattaattaaaattagatcttctcttctaggcttttaaaataaattctaataattccatttaaacaacaatttatatatttaggatttttagggtgtgacaaacctaccccccttaaacagaatctcgtcctcgagattcggaagaactggcgaacaaatgcggatgagctgacttcaattcatcttctcgttcccaagttgattcttctttcgagtgattactccattggactttgcaaaaacggataactcgatttctggttcttctctcatctatttccaagatacggattggtttctccacataggtcagatcctcttagacttctatctgttcaagattagtttcttcggtaggtactcttaaacacatcttcaattgcgacacatggaacacattatggactcctgccaaagattgaggtaacttcaactgataagcaacctctcctcttctactgacaatcttataaggtcccacaaaacgcggtgccaattttcctttggtgtgaaaacgatgaactccttgaagaggcgtgacacgaagatacacataatctccttcgtcaaaactcaaatctctgcggcgattgtcggcataactcttatgacgagactgggccacacgcaatctttcttgaatggttttcaccttttcttctgcttccctcaggatatccgtcccgaaaacctgacgttctcccgtttgatcccacaaaagcggagtgcggcacttccaaccatacagtgcttcgtaaggagccatctgaagactagcttgataactgttgttgtacgagaattccgcataagtctaaagcacaagctctcaacatgtcttccaaaatctgatttaccctttcggtttgtccgtctgtctgcggatgataagcagtactaaagttcagcttagaacccatctcttcctgaagcttcttccaaaactttgaagtaaactgactgcctcgatcagacactatcttcttagggacgccatgcaaacacacaatcctggccatatacaattccgccaaccgacttccagaataagttgtctttactgggatgaaatgagccactttggtaagtctgtcgactatcacccaaatagagtcatggcctgatgacgttctgggtagaccagtgatgaaatccataccgatttcctcccacttccattcaggaatcttcaaaggctgcagcaaaccggcgggtttctgatgttctgccttgactcgctgacaaacatcacatactgctacgtattctgcgatttcacgcttcatacttgcccaccaaaatctttccttgagatcctggtacattttggtactaccagggtgaatggagtataaagtatcatgagcttctttcagaattgcatcttttaaatctttgttgtcggggacgcagattctctcacccaaccatacagttccttgctcatcctacaagaaaccgatagcttttcctcttctcatattctttttgatttcttgaatatcagaatcattaatttgggcttctctaacttgatcaattagagtgggcttcgcttctaaggctgcaacgaaacctctactgacaattcccaaatttaacctttcaaattccttgcataactccaatggcaactgtcatccttccgtagcattgcaatagcctttcctgctaagagcgtctgctacaacattagcctttcccgggtgataatgaattcccatgtcataatccttaattaattccaaccatctccgttgtctcatgttcagatccggctgagtaaagatatattttaaactcttgtgatcggtatacacctctgtacgagtaccgaaaagataatgacgccaaatcttcaacgcatgaactactgcagctaactcaagatcatgagtagggtagttcttctcatgcggacgtaactgacgagatgcataggcaaccaccttcccatcttgcatcagaacacagcctaatccaagtttggatgcatcgcaatacacttgaaaacccttctttggatcaggtaaaatcaaaataggagctgatattaagcgattcttcaactcttgaaaactctgctcacattcttctgaccacttgtacttcacatccttttgaagtaatcgtgtcattggcttagcaatcttggaaaaattctctatgaacctctgataatatcctgcaaggcctaggaaactgcgaatctctgaaactgtctttggttgtttccagttggttacggattccacattactaggatcgacggcaactcctcctgctgagatgacgtgaccaaggaacttcacttcagacaaccaaaattcacacttgctaaacttggcatacaactgatgttctcgtagcttctctagtgcaaggcgaagatgttcttcatgctcttctttggttcgggagtagataagaatgtcatcaataaagaccaccacaaacttgtctaggtattccataaacaccttattcatcaagttcatgaagaaagcaggggcattggtaagtccaaaagacataccagtacattcgaacaattcatacctagtggtaaaagctgtcttaggtatatcttcctcgttgattctcaactggtgataccctgatcgaagatctatcttggagaaaacggtggcaccttaagctgatcgaacaaatcatcaattttgggcagcggatacttattcttgatagtcacatcatttagtgcacgatagtccacacacatcctctaggtatgatctttcttttccacaaaaataaccggagctccccatggagacgaactcggtctgatgtatcctttctgaagcaaatcgtctacttgcctcttgacttctgccaactcattggctgccattctataaggtctcttatggatcggagttgttcctggtaccaaatctattctgaactctatatcccttttgggcggcataccaggtaaattgtctgggaacacatcaggatactcccggactacaggaatctcatccaaagttatttggttcagtcttgaccttaaagactcagaagacaatgcatgaacagttacaactcgaccatcattactggtgagagttacttttctgttagcacagtctatcacacctttatatctggctaaccagtccatccctaggatgacatcaaggtctttggattctaacaagataagattggccagaaatggtactccttgaatttctattctgacagaggggctacgttgcaaagagagtgcttgattacttggggtactaaccatcaaaggacgtctaagatcttctacttccatcccatgatttcccgcaaaactcatagataagaatgaatgtgaagcaccagaatcgaaaagcactgttgcaggaactaagttaacaagaaacgtacccaaaatcacatctggagcaccttgagcttctgcagcagcaacatgattgacacgggcctttgatgctggtgcggtagagttgctctgggtagggacaaccttcacgcgtcggggcttcggacacttgtcagcataatgtcctaggtctccacagttgaagcacaccccgggcttgctgccttgctccttcttggcaggttgttgctgtgtcgaagctgcaacagggcgtggagcttgattgcggatgttgttgccagcattgtggttgaagaactgacgatgcggacgaacaacagacgaagaacctccctgtggcatagactggggtcctaaagtaagacgcggcctttgactattcccctgttgtgccttgaattgagcaatccggcgtttcttttgctccatgcgattgtacttgtcctcctggcgaatagccttatccactaacttctggaaatcatgataatccccagtcatgagtgggtaagaaagctcatcattaagtccttccaagaacttctcctgacgctcttcatcagtgcgcacatcttccggagcataacgagccagacgattgaactcgtgcagatactccgtaacagagcgagatccctgggtgagcgacctgaactccttcttgagagacaccactcccgatggtatatgcgtcttccggaaagcagcggtgaattcaagccaagtgataggttcagcagtagtcctgttcaagcggaagtgatcccaccattcagaggcagggccatgcagctggtgtgatgcaaatgagaccttctcctgatcggtgcactgaagcaaatccaacttcttctctatgtcatgcagccaatcaccagcttcaacaggattggtggtgctagagaaagtaggcggcctcacacgaagaaattctgctaacttgttctggggaggtgcatggttatttccctggttctgctggttctggagttgctgcatcatcatgttcataagctgtgcctgttgagccaggacctgggcaagtgtgggattctctccattgttgttgttgttattgttgttgttagggccattcccgttgctgcgagtgagcaccatctggcatgggcaggagcacaagaagagaaaccggggaaaactacttaggacagagaattaatttaagttttattgatcttaagtgagtttcattattacaaaactgaagactctcacaccactaaactcaccaactaccaaacactcgaaagcaaacaaacgcatgcacttacatcccaccactggtgtaaatcacatgcgagacacacacaaccaaacttaaaacaagcaaactaacacaacgatctaagacaacggtttgacaaggcattctagttcttccgggcatcggagttggttgaaggctcgttcggctcgtcttcatcatcttgagttgctccccactcgatcttggaatgggtgtgcttggattcttcttcttcatcatcacttacgttgacgaccggaggatccgctagggctggggtaacttctttttccaccacacggacctttggcgccaattggtagcgagggacaaatagagctctcttccttgcggtaagacgaatcctggccttctgcggtggtgcttctccctttaacgcggctagttccttctccaaacgatccaccttgtcttctagcttgcaaatcttaccacgattccgatcttcacgatcttgagctgctagcacaacctccgcacgggtttcatccatagcccgcagcatctcaaccaaatgccttgtggtagcatcattctcaattccctcagtctcaaggtagctgccacgatcacttccctgtggttggcgaggatggtagcgatactcagtgtcggccaactgatcactgtagcgatcgcggagctctcctatggcgatccttgccacctcctgacatgcatggatgtagtttcttcctctagcttcgaacatcactgaggggatatcttcactattactgttcaaggtgactttgactcggcacttttcttcgtgacgatcatgaggaatctgggcgtaaaaaggggcagtcccaaatcctatgacaaaggacatcgtacgcaactcctggacaaatccctcaacaccaaacaagtactcaggcttgtagcgcggcatctaaagacaagtgaaaggagggagttaagacatttatccaattaatagcacaagtttttggattaatttgaataaagttagaaaatcaaagtaaaaggtaagtaaataaaataaaccaagcttgcaagataagttgaaatagttggaaacaaggtcacaaattttgtacttttgaacaacaggttccaaaagaaataaaagaaagttataaaatcaatatgctaaatttatttccttgcagcaagattaaattaaacaatattgtaaaacttttgctggaaaaaggagccattagtacagtaatagatgtacagtactaataatgctgaataaattttgaacgaaaaccactaaaagagattatgaagtgcatgtgctattagttgggtttaattaaaagataagggggaaagaacagttctactttttcaatatttttagagggcttctatgggtaaccatctggcataacctagggtcaagtcggctctgataccaacttgtcacgcccggaatttctatccaaaattccaaacgcttacatgtgtgtgaaccctcgtccaggaatcagccgaggcacacaataacaaattgataatagagtacaattattactctaattaataagcgaataaaatgtcattacagaggtagatagttcctctcaatcaataaagatctaagcagcggaaaaaaataagataaacggcgcagacggctccactccacaggcagcttgaccagggctacacctaatccttcacaccatcagcatcactgtagaactcttcctctgatgaatgattgcaaggtgagtatatgacatactcagcaagccacgcagcaaatatgcaagtgcacaggataacaaaggatggcatagtagggtttcatttgcataaacagcatttaataaacatttcagaatttaataaaacagttaggtaataattaatcaatattaatccaacgctatacaacataccctgttgcataggcccaatcattctgaacaaccatcccggctgtacagttctatctccaaaccaggagctaatcaaattattaccagttatatcatcttttattatgatgagaggtgtgagactaaacacgaaagacattgttagacccgcccataaccgcgggcacggctattcgaatagttttactctggccagaggtgtaccactgtacccacaagacacagccccacaacatgtcaccatgtgccttaataccaccacggtacctcggaaaggagctgtgacagtacccctcgcacaacacaatccaccacagcgcacctttcctggatcataatcacccccttataaacaaggcatggactccccagcgacccccgtgggcttatctccgccacttctcagtctggtgctccgcaatgaaccatgctatacaaaaggtaaagccgttgcccacgctggcttgtggttggcacggttaatgtttcacaaccgaaactcatgaaccggtccttaattgtcatgagcacgactctcaaaaccatgtgctcacaacccaccattatcaggttttagttggcaagtaattaattaaccaatcacgattgaccatcgtgaactatcattaagcaatcattaaataatagtgaatcataagttatcccaatagtgtgctaatgtttctaagtatggctaagcaattatatctaatacatctagttgaaccaatatatatatagcccaactagtcaagttataacaacccaaggtatcaaggaataaagtaatcaagaacaaaagggctataacaaacaataggttaattccacccaatgacattcgaaaataaatgcaatagttgaatagaaacaatagctttaaacgggatcaacatgcttaaaggattgtttgcgatctgtgtgacttgccttgctggccttggaactcttcaaattcttttcctgcgaaaacggactctccggaaacgtcggaatctaaacagaaaagagcaaaaacaccaaaacagcacataaacaagcatgaacagtacatgtggatatttttaacatgtagatctcaattttagaaaaatttagagacttgaaccaactaaatccgagctaagatgaattagttatgaatttttaaagattaaatcggattaaaacacttatatggattttaattgaattatgacgcaataatgaattatttttgaaaaggaaaagggaattattgcgtcagcggctagggttagcggtggaccgggcgcacggcagcggttcacgggaacgaacggccgagatcgatccatccaaaacggacggccgagatcgaacaggtctacggcggctcacggcaaacggaccctgatgacatcagcggtgacgtcatctccggcggcggctcggcggctcaggcgcgcaagctcgccggcgaacgacggcgcttcggcacgaacggagggcaccaggacgtagagcacgacgcggcgaacttaccgatgaccaaagcaacggcggaggagcaacggacggcgtcggcgacgaggtcgaagcggcggagaccttcggcttgacgacgacggcggtgctccggcggtctacagcgacggcgaaggggcggacgaggaacgatggcgacctccccgagcgacgacgacgaccgggacggcggcggcgcacggctggagcggcggcgacgactgcggcacgagatccacggcgctagggctcttccgatggcgagagacgaaggcgagggtggcggcgggtagaggagacaccggggatccttttataggggttgaaaggcggcggcgaaggcccacggcgaccggcgacgcgaaggaaaggtttgggttcggagagagggagaccgatccgaatcgacctcgaatccacggatttccaaacgaaattagccgatgattccaaaagagaaatggtagaggagatcccgaagatcgtttcccctcaattgatttcaccggagaaggaaaggtgcggccgaatttgggaagcggcggcggcggcgcggcgctagggtttcggccggaggaagacgacgactccgacaggcgggacccacctgtcagcggcagcgagctcgcgcgggcggctgcggctgcggactgggccgacttgggccggggagagagagagaaggttttgggccgactttcggcccaaagccaaaagagacttttaaaaacttttttcaattaaattattcatgaaatgcaattccatttattaaaaatacttccttagctcaaataaatcccagaaaaatctaggaattatagaattaagcaaagtatttaatgaaattttatctggccccattttatattggaatttattaattaaaattagatcttctcttctaggcttttaaaataaattctaataattccatttaaacaacaatttatatatttaggatttttagggtgtgacaataggactcttcctattatgggtatatataccgatagagaggtagggagatctgaatatatccacatatgagaaagtaataaagctgtgatgcctctccctatatccgtgttcattgtttatctattatgtgcttgtatgagagatcgttgtcgtctactccggatcagcaaataggccactagttattcaatagaaacaatgaaaacaggttgacagtgatttctctctagaatcttgtcgcccatctcggctaatcttctggttgtaatattctcactacacccttcacagatctactgccatctggcacatgatcatctcttcccttatcttgttgattaccctgcttttgaaaaccaatcaatctgtttccctctttccaaatatcccacaacacaaagatgaattagatcggataccttttctttgtgttgctcatccggcccattcgactgtccgcactagtttcaattagtgatctgttccctgatacagcggctgaaagaaaattctgcccaattcttttgccaaatccctgctccaactgctagtgagtatgagaaatctttcaaaaggtgttgcatcgtccccatgttccaaaacataaatatcaaacacaatagttcttgttcggtcatcctcgactttgtagtcactctgaaatccatagccgattgtagtacagcagccaagcaaagaatctttggttagattgtcctaggtttcccaaacggtttatcattttccttggactaaatgccatattacacaagggtggggtttgtagtatctaactctaaggtgcttagccagcttctatcactatgaactggccttgatacatgttgcggcctacaatacatgttgcggcttaaaaaccagtgctaattataaatattagtgccaatacgttcttagttataactggcactaatggacaagactacatcatgccagataaaaaactacaaaatggtcttagctacctattttattgtatctacctcatatagaaggagtaataatcgtggttttgctttcatacaaaacggtcttagctacctaatttaatacatccgcctcatatagatgaagtagtaatcgtggttttgcttgcataagtaatggtttagacaattgcaggcttgtagctgactcttgaagctcaatcctgtcaccacctggtggtatgctccaactgaacccctgcagaagccttgcaaatagcatcattgtaattgatgttccgagtgacacggcaggacagccacgcctaccagcactgaacgatacaaaacgtaactctggctcagctagcaccacagtaccagtatttttcagatgtcgctctggttggaattcgagtggtttatcccatgctctagggtttcgaccgagcccaattcggcttaacatgacatggctaccctttgggatcatgtatcccgcgacggtggtgtctgcgatcgcgacatggggtgggttgaatgggtggtaggggtggaggcggaacgcctcccggatacatgccttgaggtatgtgaggttgtgaatgtcggattcctcaacaagcctttctctaccaacaaccatatcgagttcatccactgctttcttcatgacctttggattgttcaccatctctgccagtgcccactctacagcatttgatgggttgtccacggtagcaaggattatttcctgcggccataagatcaaattaaaacagtgttggattttcatccttcaaggggcaacctctaatatgtctttaactctttatacaatcaaaattttcatgagaacttttggaaaattgacaacaatattaagtatgtactgacatctactgaggtcacaacagtcaaatctagactggacaaatatatagaaaacagaagaaatccagagatgaacactacaatgttaatgttcatatatagttttgatctgtcccttttgtttcttgatgcgtgggttgagtttagaatgagataatagatatgcattatactagacttacaattcttttcaaacattttcatagctatttttcaaaaagaaaccatagatattttgcacgttcactatcaaatcatcgtaacggttaattttaacttcaaaatgaatgaaacccaccatagtatatctttacctataacgaaccaaaggcctcactaattatttctaaaatataatcacttctagcattagaaatttggaccaaaacataagtacttcaagcatactatttttcttccgaggacatatctatatagtccaagtttgaaaaaaaaattatgtgacggtgtaataaagcttattaccagcgtttctgccttgatctcatctactgacaaaaacggtttcccttgtgcatcctccaaggagatcaacacgtccagaaaatcggcaacttctctcctcttatcaccttttgtcctgagagatttccattcttctatcctctccattatgataggatcgtgcagcctattgaatgtgttcatcaggccattgacaacctcctcatggccatccaagtcaagcccaaccagtgtcgggaagtagtcggagacggagaaggcgccgtggtagtccagcgccgtgaagagcgcgtcgatgtgagcctcctcatcacggccagggccgatattgccatcgccggagttgaagtgtctccggccaaacaccagcttcctgatgatgttgccacagaagtgtctcgttacgtgccggacgtctacagtgccatcattacagtggctgtagacgtaattgacaaggtggtcagcctcctcgacgcgccggccgagcatccgccgctccatggccggcgagaggatctccgacgtgagcacctgcctcatcttcctccactggtcaccggccggcgacatgatggtgttcttgtacccaaagctgaacgtccgcgacacgaacgacgatggccgggaggcgagcatggcgtccttcttgcgcaggacctcccgggccatctccggcgaggcgacggcgatcacgtggacgcgaccgaaacggaggcacaggatctcggtgtccatctcgtcgagcaggcggtggatccacctgaacaccggcttgttcatcagcatttggtgcatgttgctaaccaccggcatggtagctagcccgggtggtagcttgggttgttgcttcctcttggccgccatggcagctgcctgcttcttgatccgatagaacaacgcaacgagcaagaggatggccatggctattgacatcagaaaggtgaggacatatgcatggtcattttgggcgatgagttgtgatggcatgatggtatcgttgttcttgtgcatgattactgatttttttttgggagtgcagatagcctagctagatatatcactgattctgtggccaattaatttatagatggaattctaaacacgtgtggaatgaaacttcatcacgttttccttttcaataaagaaagaactattgcttttagtacgaaagagtcttgtacttgggtcgatgaacctcctggttatattctaagcgctttggcaaacgatgtaacaatgtttaatgtttaatgatcaataaagctagccgaatggcatttcctaaaaaaaaagaagaaagaactattgctagtgttcgcgtggtgctcggcttttgttgttccattcaaatattgacaaatgtcctggaaaaaggtgtgctctgtttgtcgccaactaattgacactagtcgatcgctattcatttttagaacttcaatcatctattctttaaattaatgtaaatgttccaaaatattgtatattatataaacatttttttgataaatgttatattttttaataatgtttttgtaatttagaagctatatactcccttcgtcaaaaaaagacaaaccctaggttttcgtgtttaacgtttgaccatccgtcttatttaaaaaaacttacaaaaaaaattaaaaagacaagtcacatataaagtattaattatattttatcatctaccaacaattaaacgttggatacggaaacccagggtttatctttttttttttgacggggggagtagtcgttacatttggaatagtaccattcaatactctcaaaatgataggaaagaatactaattactctagttcggtaatactagcaaagtgcccgtcgtctcgccggccgccaacctggcgagcacgctggcatgaaccagctcgtcgttggtgccactgatctgctcccactccccctgacatccgcgcttctccccaatggcagcccgatgaggagcggaaggaggaagatggggcggtaccgatctgatggacgggaaagggaaggaagacaagaaatataagggtctctgaccggatctcgatgtccatctcgtcgagaaggcggtggatccacctgaacaccggcttgttcatcagcatctggtgcatgttacccaacaccggcatggtagctggccccggtggcagcttgggttgcttcttcctcttgttcttggctgccatggcagcctgcttcttgatccgacagaagaacgcaaccagcaggaggatggtcatggctattgatactattatggtattattttgctcgcgcatatttgcagtactgggaaagaacatgtttatgtgtgactgaagagaggatagctagataactgattatg

SEQ ID NO: 16972 - DNA, 7934 bp, Oryza sativa
aggatacctagataactgattatgtggccaatttatagatggaattttataagtgatttgttcccgtccagcagaggtaggcgtaccaaatcctagccgtcaattgggacatatcagacggtgattgagatttctcggtaccgtgcagtaccattttagcccatatggtggtaccatcttttgaagagaggtgaaagggtagtatagacttttcatatgtaagggcgagatgttggcctctagggtgggcggtggggccagtgttgacggcggcatcagcggaaggcgaggtccggggccggcgttgatggcggcagcggcgagctgcggggttcgatggttcggggatgtgtgcggccggcggagtccagccccggcttcgatggtggcggtgagcactgagcagcagggtgcattgcattgccagcgacatgctgcaagattcgatcccggcgtcgacggtgacggcaggcaataggtgcgtcgacggcacgggctgcagggtccacagcggcgtgcggcatgctcggcgtcgacgaccatggcgagcggcggggtgtgacaccagacgaggtggtcgtggagagatcggacaccaagcaatgcggccgcggtggagttaggggcgttgccggccacgacgtcgaggtggccgtggagaggtcgagccagatgccacagcagcggcagcagcggcgagtcgttggactaggcgccggcgccggtggcaaggaagaatgcagtagcatcgatgaaggatattgggttgtgcatgatctggtttctgctaagatatgcatcgtcggtggcgtacggcgaagaagtacagatgaggaaggaaacaacgggcgcaagaatgagattttttcttttttgacgagaacccagaaacaagattgatttagtgttggaagaggtttcttactcattcccaatcctacccctaaatattggatagtcagatttgttttagtacgttgtggtactgggaccttgggttgggccgggtacaagtgctggatggtagcaaatcttatttcttaaagaaccttgctaatgttacatgtagtgctcgtgtttttgttcttccatttaaatatgcagaaatgtcctgtaaataaaaggagtgctctatatttgtttccagttgattgatcacaccagtcactatttatcttttaacatgaaaacaatacatagattgattgacggccgcctagacggcgactcatcgctagtccgtagcaagacgtccagattacatcctagtcagaggattttagtcgttttgctgcctaaatggtcccaatcaatcctaggcggcttggatggaaggatactgggcgtatttagatggcggagggtagcgattaggcaacaacgacttggcaatgagcagtggccaaaagttttggtgcaaatgtgcaatgcacggcgatgaaatatggaagcgtggggccagctgcattatagaatagaatggcattacgttatcttactacattcttacctgcttgtgaaccattctttagtgctgccacactcttcccctctacgcttaaagcgagagaaagctccccttcgtagataatccctcagtttcaggttacaagacgttttgactttagtcaaagtcaaattgctttaagtttgatcaagtttataaacaaaaatagtaacttttttaacctaagacaaatttattattaaaatatattcaattattgatttgataacactaatttaatattataaatattactatattcgtctttaaacttagtcaaacttaaaatagtttgacttgaaccaaagtcaaaatgtcttataacaggaaacggaggaagtactatataacatgtgttattttcaatcaatattttgtatttctatggaaaaattagaaaacacgcctagaccgtctaatctgcctagtcgtcgcctaaacagcctattctctaatcagtggctacccctgaattttcaccttttggtccttttaaaaaacttattttacaaatatacactccaaaatttattctataaatggccctttccgtaacgccaacgtcattggcgccgtgatctaacggaacaacaccaatgaagttgacaccatcccctccacccctggatggaatctaagtcactaatgtgatgtgggacgacgcaaatatcgttggcactgaggacctatttgtaaatttatttaacaagacctatttgtaataaaaatggttttatttgtaaaatatttacaaatagttcctcagtgccagcgttattggcgccaaggacctatttgtaaatattttttaattacaaatatgtttttttattacatcagtattgagtttttcggcccaaagcatcattgtaattgaagttccgagtgatacggcggggcagccacgcctaccagcactgaatgataaaaaccgtaactctggctcagctagcaccacattatcagtattcttcaaatgtcgctctggtcggaattcgagtgggttatcccgtgctctagggtttcgaccaagcccaattcggcttaaaatgatatggctaccctttgggatcatgaatccagcgatggtgatgttagcgatcgcgacatgggaagggttgaatgggtggtaggggtggatgcggaacgcctcccggatacacgccttgaggtatgtgaggctgtgaatgtcggattcctcgacaagcctttctttaccgacaaccatatcgagttcatctactgctttcttcatgacctttggattgttcaccatctctgccagtgcccactctacagcatttgatgggttgtctaccgaattaaggattatttcctgcagccataagattaaattaaaacagtgatggattttcatccttccaggggcaacctctgatatgtctttacttcccaaatacaatcaaaatttccatgaaaacttttggaaaattggcaacaatattaagtatgcactgacatctactgaggtcacaacaatcaaatctagattggagaaataaatagaaaacaagagaaatccatagatgaacactacaatactgttcatatattattttgatttgtctctttgtttctcgatgcgtgggtggagtttagaatgagataatagatatgcatatactagacttacaatttttttttcaaacatttccatagctatttttcaaaaaataaatcttagatattttgcgcgctcactattgagtcatagtaaccaacggttaattttaacatcaaaatgaacggaaccacaccatagtatattgtttcctataacgaaaccaagacctcactaattaattgtaaaatataagcatttctagtattagaaatttggaccaaaatgtaagcacttcaagcgtactatttttcttccgaggacatatctatagtcctagtttgaaatatatatatatgacggtgtaatagagcttattaccagcgtttctgccttgacctcatcaagtgacaacaacggttttccctgtgcatcgtccaaggagatcaacacatccagaaaatcggcaacttctctcctctcatcaccatttctcctgggagccctccattcttccatcctctccattatgattggatcatgcagccgtctgaatgtactcatcaggccattgagaaccaacgacgggaagtagtcggagatggagaatgcgccgaggtagtctagcgccgtgaagagcgcgtcaatgtgggcctcctcatcacggccagggccgatattgccagcgccgaaggcgaagtgtctccggccaaacaccagcttcctgatgatgttgccacagaagtgtctcgttacgtgccggatgtctacagtgccattattacagttcctgtagatgtaattgacaaggtggtcagcctcctcgacgcgctggccaagcattcgccgctccatggccgatgagaggatctccgacgcgagcatccgcctcattttcttccactgatcgcccgtcgacccaacggtgttcttgtacccaaagctgaacgcccgccacgcgaacgataccggccgggaagtcagcacggcatcgttcctgcgcagggcctcccgggccatctccggtgaggcgatggcgatcacatggacgctgccgagacggaggcacaggatctcggtgtccatctcgtcgagaaggcggtggatccacctgaacaccggcttgttcatcagaatctggtgaatgttacccaacaccggcatagtagctggcccgggtggtagcttaggttgcttcttcctcttgttcttgcccgccatgttacccaacatccgacagaagaacacaacgagtaggaggatggtcatggctattgatattattatgatattattttgctcccgcatatttacactactgggaaacatctttgtgcagtgtgagtgcagagacgatagctagataactgatcaggtggccaaatttatagctggaattcttaaagaacgttgctaatgtgacaagatatgtcatatgtcactctaccaacatgcgagtttaaattaaatttctacaggttgtaatttgttatttttgttacaatttatagaagttggatttgaacttgtatgtttgtggagtgatatatttcatattaatctactttgtcgattttttgaattgttttcataatcatttagttgatatgtaaaaaatgggtgtacatccatccaagtaattaaaatccatatccacatgtggggctcattttttttcttccatttgaatattctaacatggaaactagacataggttgatagtaatacatcacaaccttcacaacatccaatctgcacaatcagcatgaggaagacgtcgtgcccaagactatcttcattaaagcaaaaaaaaaaccctctctaaggtgaggacacatgttctttttccagttttaaataaattctttttcaaatctataaattattgtttaacttcaaaaattcataatttcctatccgtgactctgatctactccgttcaagtctttatttctaaattgagatccaccaaatggcactagtagttataataataataataatattttctttttaggagtttatttggttttctctgttttgcgcatagttgacaccgacggaatttattttggatgaggatttttgaagattttaagatgaggacagaggtaattaagttaacatttcatcatattgcttctactttccaaaatggtttgtttgcgaaattgcattgctagcgcgtatgttaatttgactggcctttgttcgtgtgacaaatcgacagatgtacccaataattgcattactactgtaggatattgatgaccccaaccctttgtcgctttcgggcgtagtaccaatggtcccactcacaccaaatttgtttgtcgatgtgggaaaatgggttgtgaaaccattttaaaatccaacacgtagtgtttgcatacatggaccgattccaaggattggtataagaaagagagtctcaccctaaatctcagtgtctccactttactattagattatacaacgtcgtcagactactctgtagcgaggctgtaggggttgtataatactccatcgggttttatatttcttgacgttttggataagattgaggtcaaacaattgtaactttgattattaataactttaaaagtattttctttaaaggaactagaatagcatatatagatttgtccttcaaagtaatataagaaaagtaaacatgcattatatattataataaaaacaaagtaaaagatatattttgttgaccgtatcattatcgaaaacgtcaagaattatggaaccagagtgagtacattattaaggacgaagctttactagagatcaaggtagaagaagggtaagaaacgtcaaaatatatttacgcttgaatactgaagtgtaaagaaaataatttcttgcatcttggaacaatgttgtgtcagctgctaagttagacaggggggcgtaccaatacttatgacttcactgatactgataagtctactgagaaccatgtgtgccagatttgcactatagtgggtcatacagctgatcggtgtcgccaccgtttttactaaaattataagccccaccgcctaagcatcttgctgactatgttgaggcagcttttttggaacttacaggggcgctgcgaaagctaaataaagcgagcactcggcaacttcaatctcacctctaccccgcactgaggtcaaaaccatctctcattcggggctatactactgagttgaccgattcctcgccgcccttctctgtctttacctgccgggagaagagtttgaggagcatccttctcgttccatttttgtgactctagacgaagagcaccactgccaacttggagtcggtggtggctagccgatttggggtttctggcattctccatggcagagaaggttgcaagcatggatcggacacgaccagaaccacgacgccggtggccacactcgcaccgacgacgttggaacaaatttaacaagagagttgtccccacttgctagaagtttatattttggggtcgagaggctttgtcatagaaaaaagtataacttccgacatgtacaccaactattagatttaagtatttggattgtttaaaccgatgaacccatcaaatctatatatataagaaaaacactttcctaactttgaatataaatcatttttctttgcttgacaaccaaaaaagaacaaacattaaaaatgacaatatatattacagagtaaatttcacaagcctagagagataaatctatctatctattattatatactaaaagtccatcaaatatactaaaactctcctaagatgacacgtggtgctctagttaattcctagaaaatctaaggaaaaaagagaacattggttttatttaatttgatggacccaatatcttttaccatcatataccgttacatttatctttaaaaaaaagaacttaagaacaattagaccgtacgagtctgcccaacgcacgtacgttcttccatccacctgcatgagaagtgcatgcgtgctttttccttgctcgtggctatctaatatcttctatattactaacttaatttcatcgcactccaaagactgcatgcacttgcaaatatggacaagacaatatccctcatgcatgttgatcttggtatgttttataaataaataaagaatcttcaatagttgtaaatattaaattatatattcaatttatgatctgtttgaaccattgtatacttaaagaaatcctaaaaaaatctcattaaaagtcaaaatatccaacttattttttgtaataaaatcaatggacccatacctataaaccgcattaaccataattatagcatcaatggacctattgactctcaaccaacttaattatatctctcaacatgtatgtggaggctatttacttaatcctgatgctttatgcttgcataaagatatgatttttttatgggtaaatgaacaatcttaggctgtgttcagcgctgagggttgggaaaccttaataccttggaagttgaacattaaattatagcccaaaatacctatatcacagaattaccgggaatgctacctaactttgctcaaatccaaataattcaccaagaaaagaagaagggaagaggggggtctacagggggtgtccttatggatattctactaataaaaatttattgcagatacttatttgtatgttatttattaaattatctaatcattagaaaaatgaacatactatctatggagtaaacaaattggggggctagccaggtgcatcccagtgtgcatgcatgctgggtatataaattttttcttagatgaaaagatcgggcatgagatagttacatgtattatgcctatatatgca

SEQ ID NO: 16973 - DNA, 1525 bp, Oryza sativa
cgtcgctctctgcccctcccctgtgcctgacgccgtcggcaagctcgagctcgtccgtcatcccctccaccgccaagttcctccccgtggtcgtcggcgagctcgagctcgtcccctcaaccgccaagctcctccccgtggtcgtcggcgagctcgagctcatttcctccgccgtcaagctcctccccgtggtcgctggtgccggcgaggttgagctgcttccgtgcctccgtggtcgccggctgcccccaaagctcacgagcctaacgagctggctcgagctttcaaacgagccgagccgagctgggtttctagctcgttaggataacgagccgagccaagccagctcgacatccacacctaggtgtgtgtggcaagagtacatttcctagctgtcactttattcgttagctccaggctcaagcgaagaacaaaagagcaaagaccaatgcatatctttaacacaagttcagtagctactagctacatcaaattccttcttgcagatcagcaaattaaatagttccccttaaaataccctcttttcaaaaatttcaaaaaaaattacaagatagattgatatgtaatatgtcactccccaaacaagcgatattaaattcaacttctacaagttataacaaaaataacaaatttttaactctaattagtatacatatactcacagttgaatttattatttttgttacaagttgtagaagtcggatttcaatttgcatgcttgtggagtgatatatttcatataaatctaccttgtcaatatttttaatttttttcaatcatttagttgacatgcaataaacgggtggacatccacctgagtgattagaatccatctacacatgtggggctcatttttgttcttccatttaaatgttcattcagaaatgtcttgtaaaaaaaggagcgctccataatcgtttccaaatgattgacgccaatcactattcatttttgaacatggaaacttgacatagattaatagtaactataccacaaccttcgcaagatccaatctgcacaatcagcatgagcaagacgttgcgcccaaaacctatcttcattgaagccaaaaaccctctctaaggtgaggacacatgttcctttccagttttaaataaatccctttttaaatctaaaaattatgtttaacttaaaaaattcataatttcctatgcgtaactctgatctactccgttcatgtctttatttttttttctatattgagatctaccaaatggcactagtagttaataataataatattttctttttaggagtttgcttggttttttctcttttgcgaatagttgacgctgacggaatttattttggatgaggatttttaaagattttgaagatgaggacagatgtaagttaccatttgatcatatggcttctacttttcaaaatgttttgttgggaaattgcattgctagtgtgcatgttaacttttgactggcctcggttcgtgtgacaaatcgacagatctacccaataattgcat

SEQ ID NO: 16974 - DNA, 24337 bp, Oryza sativa
aattagtatacatatactcacagttgaattttattatttttgttacaagttgtagaagtcggatttcaatttgcatgcttgtggagtgatatatttcatataaatctaccttgtcaatatttttaatttttttcaatcatttagttgacatgcaataaacgggtggacatccacctgagtgattagaatccatctacacatgtggggctcatttttgttcttccatttaaatgttcattcagaaatgtcttgtaaaaaaaggagcgctccataatcgtttccaaatgattgacgccaatcactattcatttttgaacatggaaacttgacatagattaatagtaactataccacaaccttcgcaagatccaatctgcacaatcagcatgagcaagacgttgcgcccaaaacctatcttcattgaagccaaaaaccctctctaaggtgaggacacatgttcctttccagttttaaataaatccctttttaaatctaaaaattatgtttaacttaaaaaattcataatttcctatgcgtaactctgatctactccgttcatgtctttatttttttttctatattgagatctaccaaatggcactagtagttaataataataatattttctttttaggagtttgcttggttttttctcttttgcgaatagttgacgctgacggaatttattttggatgaggatttttaaagattttgaagatgaggacagatgtaagttaccatttgatcatattgcttctacttttcaaaatgttttgtttgtgaaattgcattgctagtgtgcatgttaacttttgactggcctcggttcgtgtgacgaatcgacagatctacccaataattgcattactcctgtaggatgttgatgaccccaatcctttatctcgctgcaccccgtggttccacggtaaccattctctcgggcatagtaccaatggtcccactcacaccaaacttgtttgtcgatgtaggaaaatgggttgcgaaaccattttaaaatccaacacatagtgttggcatgtttgcaaaataaaagttgtttgcgaaaacttgtgatgcaaagggagaccatctgtattcgcttacaaggaccgattccaccctaaatctcagtgtctccactttactattagattatacaaccctattggagtactctatagcaggggttgtataatactcgctccggtttcatatttcttaacgttttggataagattgaggtcaaacttttgtaactttgattatcaataacttcaaaattattttgtctaaaggaactagaaaaacatatatagatttgtccttcaaagtgctgtaagaaaagtaaacatgcattatatattagaatagaaaaataaagttaatgatatattttagagaccctattattgttcaaaacatcaggaattatagaaccagagggagtatgttattaagcacaaagctatactggagaccaaggtagacgaagggtaagaaacgtcaaaatttgtttgcacttgtacatctactaaagtgcaaaaaagaatgtcttgcatactagcttgtatactgaaatgcaaaaaagctgcggagtatacaactgcactgatgcctaagctattacatcgttaattaactgtactgcatcacctgctgttgtctgaaactctgaaagaatagtgatggagcaaagctctgaataatattagtagcacgaatccaacgagatagacgacgaggatgatcagtcgatcgatcgatgcccaggcctgaatgatatgtccgatggattgatagatttcattcctgtcctggatcgagacgtttgtttttgttcttgtttctactgctgcaagctgctagctttgtttaaatatcatgatccccttttcttttctgatcggtgtttgtttaattgatagaggctatagctagtaacatgcatgattagagcgcgcaaggacgattgtgctttgcatggggaccaagcgtggctaatctctcatgtctcatctctcattgcgtttggagtttttctctacttatcttatccttgcaataatgatgatagatggtgcgacatgaaagattccttctctctgctgcttatctgcaggccaaaaatgttgctaggtataaggtctcttttactgataagaggggcccatctgtcattcactgtgagttgaaaatataaagaggatttcagctatatttcaatcgattgcttgattgagattcacttgtcgcttgtcagctacacatattcaaaactcagtgaattatcttctagctacactaattagtgtatctacaagtctcttatagatttgataaatggaactagtttgccattaacaccgagcctgtctggggcatggctagctggctgacgctcgtttttttggcctaagtagttatactaatctactagtatattagataataacaatttaggataatgatggtagtagataagatttttttaactaacaaattaaaaagaaatctacatatgaagtcacagtttcaaaattttaaacctagatttgaaaactttcaactcgaaatttaaatttttttaagtcaaatttgaaaaactttcaactcaactttgaaaactttcaacccagatttgaaaactatcaacccagatttgaaaattttcaactcggatttgaaaacattcaactcggatttgaagactttcaactcacacttcatttttaccattagctaccatagggtagatgctaatcacgttggagtgactagatgggaactaatattttattgcttaattgtactataattatactataatatatgagatcaatattaattagaaaattcctatggtttatatattcctgtattccactacaagaatcctgttaatccatgatggaaaatttccatcacggatcactgaaaaaccgtcaccaaacaacatctatgatggtttcagaaatcatcacggattgagcgtcatggattgacttgcgtgacggtttgtcgaaaaccatcacagattaacagaatcggtgacggttttaaaccgtcacgatagagcccgaggcctagttagtccagccaagcgcatttcctgtgacgaaaaataaccgtcacggatagctgccacataggatgtttttccgtcacagattatctgccatgtaggatcacggattcgaatcaccacgtatgtgccacatgtttgccaaggtggacaatgatgtgtcatcgatgccacctaggatttagcccatgtgtttttggtccaattcgggttcctagagctttcggcccatttatgaccaactggattttttttgttttgggccaatttgtttttttgtggtgtttttatggccttttagttatcattcatcccagttcaaattgggctactgcaatatttcagcccaactaaaattcggctgatgctaaatttagcaaaatacaaatatttcatccataattttagcaaaatcaattacctatcatcaatttacattctctcatcatcagcagcacataaatattctaaaaacacattacaaccttcacatctcatacaacattttttttagcatatctcatacaacataattaaaacctgttcaaaagcacatgacaattcccagcagccaccaaagcattttggccactcctccatcaaagtttcagcccagcaacctgatagtacaataccaaatgttagatttttttttatgagctagagaaacaacaagaaacaatctacagatacgatattagtttttgaatgatagggctactttgcaacaccaatctgtgtccccataatatattgcgctaacagaactcaatgtccctatccccaacccacctcatttcattggccaagcaaacaagcaactgacgctagactaaaccaaaaaaaatatgagagcaagtaaagtggtacaggaaagtgaactagaatgcataggagtatagcactaaatttagacactaaagttatgatacgagtaacttcctatgcatgcttcatttctacggactataggcatatagtatttaaacatatagatttgtatgcatgaccataaagatgagaatattggtcatggatgatagcatggtatactaattaatagtccgttccactgagtatatagacagttcctaacttcctatacggcagaaatcatgtgatgcttctacacatgtacaagcagatttacctaaaaaaacacatgtacaagcagaaggcaacaaatgataagcaatatgtttaatttattacttcatatggtgtcttattagatgcagtatatttggtaataaactgataatcctagctgcctctcccagcagaagtgcacaaatgaagtgttcctagcatgcatgtttgttacaatgttttgatctgaatgtcaatttgtagagaaaagaactacatatacaaattacaagtacagaatgtagatcagtaggggaaagcatgctaggatccacgggtggaaatcgacctcgaggttccacgggtggatcttcgagttgatctcgtggtcgacggggaaccgcgacacgccacggcccccgaccacatcggccatgccgtcgtcagcgaacgagaggaaggacgaggcggggctctcgtcgaatccggcggcggtgcgggaagaggaggaggagaggcgctggtcggggtcgctccaccgcggcacctggtcgagcgtcacggccggctccaccccacccacgcccgtcgccgccgccgccgaggaggccgaggccgacgcagctgttggcgagcgctggatcagagccgcgagcgtgagggtttggggaaagagatctggacttagatttggaatcggctagggttgaggggagtagcaattttgatgcgattttactagaataaccctggtatctgaaaacctattatacaagttacttggacaaaatggtcatttaacctggaaattttaaaatattaaaactttgaatcgaattttatcatattaaatgaatttatgtgaaaaaattattaaaaacaaagttgtataacttatcaagatctataacttttgttttggtcattttgctatatgactttgtttcaataatttgaatttcaatttcaaattatgacaacttcaaataatattttcaaaactaaatgattttaactaaaaaagtcatcaacaacaaagttgtatagctcatcaatatctacaaattttgttttggtcattttgctatatgactttgtttcaataatttgaattccaatttcaaattatgacaacttcaaataacattttcaaatactaaatgatttcaactgaaaatatcatcaacaacaaagttgtataacttatcaatatctataacttttgttttagccatttcttcatccaataaagtgatagtaacattgttcacaaaatttacacatctcccatatggtttcataaactataagagacatatgtaaaatttgtgaacaatattaatatcactttgtcggataaagaaatgaccaaaataaaagttatagatattaatgagctatacaattttattgttgataactttttcagttgaaatcatttagtatttgaaaatgttgtttgaagttgtcataatttgaaattcaaattcaaattattgaaacaaagtcatataacaaaatgaccaaaacaaaagttgttttctattttaatacttgatccgaaaaaggcccaagtgcagagagagaaattttaatttgttttctatttattttaatagagtaaatgaactttgtggtattaaaattagttattgagcttcgaaaattcacggtaaatttcaaagaataatttagatcacgtagaatatttaaaaaatatttcctttttgaacttctattttaccaattcgagttcttttttcctttttgaaacgccaactctgagttgctgggccacgctatgggcaacatcctgggcctactcgagtgacatttggacaaataaaaggcaaataaaaatattttaagtacacattgggaccaatagaacaagtggttcaaatggtaagacgcattcctaccgtcagctaagtgtgggttcaaatcccacatgttgcagatttttacccatgcgcaccatatttttttagtttgccatattatgcatcatatacatataacatattaacaaaactattttgttcaaatttaacaaatcgtattttgggtttgattcttcttgcaatcacatttttttatttttctttgcgctaaatatgttttatttttttattgttttgggctacctagagtatgacgaatttaaaatcatacattgtgacagtcctgataaaactgtcacgagttagtgtgccatgaatatccactgggctcatccgtgacaaaaaacaaaatatcgtcacggattacgtttgtcagtgacgatctgtaaatccgtcaccgagaatccgtcatggattaacaagtttcttgtagtgttccgaatgcttattaccatcaaattcctttgtttttcaatcctacgttttgtatatgcaatcctatattattcatgtgtttttcctattcctatgtttttcctatcctgtgatccgaacaagccctcggtgtctaacgatgaagaagttactgatctgaaccatttgatcatcgataagttaatggattcaccttttctttgggtgtgtgtggcaagagtacatttcctagctttcatctttattcgttagctccaggctcaagcgaagaacaaaagagcaaagaccaatgcatatcttcaacacaagttcagtagctactagctacatcaaattccttcttgcagatcagcaaattaaatagttccccttaaaataccctcttttcaaaaatttcaaaaaaaatgacaagatagattgatatgtaatatgtcacgccacaaacaagcgacattaaattcaacttctacaagttgtaacaaaaataacaaatttttaactctaattagtataaatctattcatttaactcacagttgaattcaactctattcatataaatctaccttgtaaattttttttgaatttttttcaatcatttagttgacatgcaataaacgggtggacatccacctgagtgattagaatccatctacacatgtggggctcgtttttgttcttccatttaaatgttcattcagaaatgtcttgtaaaaaaaggagcgctccataatcgtttccaaatgattgacgccaatcactattcattttcgaacatggaaacttagacatagattgatagtaactataccataaccttcgcaagatccaatctgcacaatcaggatgagcaagacgttgcgcccaaaactatcttcattaaagccaaaaaaccctctctaaggtgaggacacatgttcctttccagttttaaataaatccctttttaaatctagaaattatttttaaattaaaaaattcataatttcctattcgtaactctgatctactccgttcaagtctttattttttttctaaattgagatctacctaatggactagtagttattaataatactattttcattttagtagtttgcttggtttttctcttttgcgaatagttgactacaacagaatttattttggatgaggatttttaaagattttaaagatgaggacagatgtaagttaccatttgatcatattgcttctactttccaaaatgtcttactgcaagattgcattgctagtgtgcatgttaacttgactggcctcggttcgtgtgacgaaccgacagatctacccaataattgcattactcatgtaggatgttgatgacgcttcaccccgtggttccacggaagccatgctctcgggcttagtaccaatgatcccactcacaccaaacttgtttgtcaatgtggaaaaattggttgcgaaaccattttaaaatccaacacgtagtgttggcatgtttgcaaaatataagtggtttgcgaaaacttgtgatgcaaaataaaaggctttgtttgttgccctggttcccaactccccttctcgttttccgcatgcgcgtttttcaaactaataaatggtgcgtttctttgcaaaaagtttctatacgaaaattgcttaaaaaatcatattgatccattttttaaaaaaaatagctaatacttaattaattacgcgctaatggacctctccgtttttcgtgcgggggacatgggttcccaacccaacttgccgaacagagcctaaatctcagtatctccactttacttttagattatacaaccctgttggagtactctgtagtaggggttgtataatacttgctccggtttcatatttcttaacgtttcggacaatattgagatcaaacttttgtaactttgattatcaataactttaaaattattttgtttaaaggaactataacaacatatatagatttgtcattcaaagtgttgtaagaaaagtaaacatgcattatatattataataaaaaccctgtttctactgctgctagctgctagctttttttaaatatcatgatccccttttcttttctgatcggtgtttgtttaattgatagaggctatagctagtaacatgcatgattagagcgcgcaaggacgattgtgctttgcatggggaccaagcgtggctaatctctcatgtctcatctctcattgcgtttggagtttttctctacttaattatcttatccttgcaatgatgatgtagatggtgcaacatgaaatattccttctctctgctgcttatctgcaggccaaaaatgctgctagattgagaggggtccatctgtcatatatataaagaggttttgagctatatatttcaattgattgctagattgagattcacctgtcgcttgccagctacacatattcaaaactcactgaattatcttctagccacactaattagtgtatctaagtcatagatatgataaatggaatcagtttgccagtggcaccgagcctgtttgagctcaccagcacccggttgccaaagcagagggagagaaaccccaaacataatattggtacgatggtactaccaccatcccattttaagcacagccatgagttttcatattcaactttaattgttcgtcttcagttaactgcccagcatgtaccgagctcatcgctcgattcacacagtacagccaccacggagctcgtggtcgcgggaggggagatgcaagaggatatcgtcgccggggcggggaatatggcagaggtcaagcggcgttcagtagtcaagaggcggcgatggggagaggggagaggccgcatctttccttccccaaagatacaatgcaaaacaaggggataacgggcccttctagcactcaacatattgtcggatcagctccacaaagctcatcaatcatcaataattgcatgaataatcgacaaatctacctaataatggcattactccagtaggatgttgatgaccccaaccctttgtcgcttcaccccgtggttccatggtaaccatgctttcaggcgtagtaccaatggtcccactcacacaaaacttgtttgtccatgtaggaaaatgggttgtgaaaccattttaaaatccaacacgcagcgctggcatgcttgcgaaaacttgctatgcaaagggacaccctttgaattcgcatacaaggcgtgattccaaggattggaagaagaaagaaagtactaccctaaatctcagtgtctccactttactataagattatacaaccccgttggactactctctaatagggctgcgggggttgtatgatactcactccggtttcatatttcttgacattttggacaaacttttgtatctttgattgataataactttaaacgtattttgttttaaggaactagaacaacatatatagatttgtccttcaaagcactataagaaaagtaaacatgcattatatattataatatttttttgaaaagattatttattatagagtaaattgcacctacagtacaacaacttgacgggtgtgtgcgatatagtgaaagaacttgagaattgaacgttcgagtgcaacaacttgacaagtgggtgcgttctagtacaagaacttgacaattttacatccaattatccttaagaatttttgttttcttcaccttcctaaatctcaaccgaaatataataatttctacatccagtttaattaactttcagttattagttattagaataaaaatataaatatgcttatatataaatccacgctagtatattgtcaaaataagtacttaaaaattgaatatgtataaaaaaagtgctccaaataattaagttgtcgtataacttcttaacttattgtatcaaaatcgtacgtatcatgcaagttgttgtatgtatgcaatcacttataaagtttttgtactaaattacactttcctgtcaagttgttgcactagaacacgtatttttcaagttcctgcaccaaattgcacccacctgccaagttaatgcaccgtgggtgcaatttactctatattataatatctaccaaacatctaagagatgtactgctggaattcccgaagttgaagcacatccacctaaagcatctccccaagctacaacagttatgcgagatcagcacaagatgtttgctcgtgaacttgagacaatcaagttgagggtatgctggagcctcaggagtatcccagctattgccgacagtcgtcatcaagacagtcgccctgtcgtggactaagaaaaggactggtgggaaaagttggagtgggatgggctagagggtggccaccacccttccctgcgtgggccatgccattcgatgtacaacaagaagaccctacccagagtttcaattctctggtgaggcgacatatatatcaactgctaacttatcaaggtacatatgaatatatagcttcctctaccttggtattattctttaattaacttaattccatgtttgtatcacactactacaaaaatcgtttttctgtacgagggggtcggtaggttccatgcggcccgcttgtggcagcgcctgcaaaaaccgcccccctggggcgggttgattagccgcatgcgatgatcggccatatatgctcctccaggcccgagcttgaccatttgaaaacgaagctttctctctcctaaagcaagcaccaattagggggggaggttttcaacccgaaatttttacttgaactctatacgaaaggtgaagaactctctatcctgcttcatttggctccatttttgttatatttcgttggtggaaagtggagtttttttaatattttgacaaggtttggtctaactattttttgcaaaatctagcttcaaaatatatgttttgatgggcaaattttgcatgtaatcaattgtacatactagttacatgtattgttgtatttttttttgggagacaaatgcatttaaacttttgtatgaaatacctgcggtctatttttttatctgtaacttttttgcctttatataattagatggatcggtcgtcatggatgtatgagatgcggagaacgcagccgatatttattaaggaagtatctaaatttattgatcaggctaaggtgcatgctttgagggagaatatgacaaagatcttttgtccgtgccgtcattgcaagaatcagaaattgttggtagatcctggtgaaatattgggtcacataatggagtacggattcaccgccaactacaaggtttggacctatcacggggaattcgccaatccggaagatgacgatgaagagttaagtttcgagatgaatgaggcggagaattttataatcgaagacatgtcgcgtgaaagaatggttgtcgatgtttccaccgatagtgatgatttcgatggtggttttgatattgaggatatgctacgccatgttgaaccagaggtgctagcgggcaggtcacgaggattggagaattggcaggcattagagaaggcatcgaaggatcttctttacgatgaaacgaagggatgtgataaggatttcacagtcttgcgttcagtgcttgaacttctgagattgaaggctaaacatggatggtcggacacaagttttaatgatctgatgagtttgttgcgtgtgttgcttcctaagcctaactttgtaccatcgaacacgtatcaagcgaagaaactcatatgtcctttatctcttggtgtagaaaagattcatgcttataagaatcactgcatattataccgtaaagaatatgcggaattggaatgttgcccaacgtgtggcacaagtcggtataaaacggggaatgggcccatagattcagagtgtacagatccagattctgataagggtaagcgcgggaagattccttcaatggtgatgtggtacctaccaattaaggaccgcctgaagcgtctgtactcaaacccgactgatgctgagttgatgagatggcatcaagagagccggaaaatagatggtatgattcgacatcccgccgacgctcgccagtggaagacatttgatgcaaaacacccagaatttgctaaggatcctaggaatgtaaggtttgcgttgagcactgatggaatgaacccgtttggtgacttaagcagctcgcacagcacatggccagtccttctcacaatgtataatcttccaacatggatatgtcagaaacgaaagtacattctactcactatcctcatacaaggtccaaaccaacctggaatcgacatagatgttttccttgagcctttgatggaggacatggaggagctttggaaagaggggttacaactatgggatgagtttaagcgggagcacttcaatctacgtgcgatcatattcgttaccatcaatgacctacctgcaaacttttcattatctgggcagattaaagggaagactggatgtctgatatgtctggagaaaacttcatacaaatacctgacgtcgtctttgaagacagtgtacatgcgacatcgacggttcctaccacaaagacataggtaccgtaagatggctagattgttcgataatacagtggagaatgacactgccccagttgcaagaggtggtacatacgtgtatgagataacaaagaagattaaggttgtatatggaaagggaaagaagaagacagtaaagaggaagaaagctgatggtgacaacggtactgcgtcgcctttcaagaagcactcaattttcttcaaatacttagattactggaaggacctagagattcgacatgcaattgatgttatgcacctcgagaagaacgtgtttgatagcaccgttggcacattgctggacatcccgagtaaaacgaaggatggattgaagtcacgtaacgaccttgtagatttgtccatacggcatgaccttcacccagtagtgctgccaaatgggaagaccgagattcctcctgcttgttactcgttgacatttgaagagaaaaaagccttctgtaaatgtttacaaggggttagagtgcctactgatttcgcatcgaacatcaggaagctagtatcaatgaaggatttgtccatttcgggatacaatgcgcatgactgtcataggttgctaacggtgttcctaccaattgctataagggcagtcaaaccagtccatacaaaggtggttataacaaagttgtgctactttttcaatcgaatttcgcagaaggtatttgatcctttggaattaggtccgcttcagacatttgccgtcgagactgtatgccagcttgagatgtatttcccaccatcatttttagatatgatggagcatttgatcgttcacatcgtccctcaaattattgaacttggtccattatacttacatcagatgtgggcctatgagcgttacatgtcgatcctcaaaggctatgtacgcaatcgcgctcacccggaaggatcaatgatagagggatacacaactgaagaggcagtcgagtgttgtatggactacataaaggatgctaatgccattggcattcctgttcatcgacatgaaggtagattgtctggaaggggtactgttggtaggaagcagttctttgataatgattacaaaaaggtgtccgcggcacacaatagcgttcttcaacagctcgctatcgttgagccattcattgagcgacacctagaagaaatcaaagcctgcttcccagggcggtccaatgattggatatcaagagagcacaagcgtcgctttcctctgtggttgaaagatctaaacctgccagttggtgattctgtggaggaacttactttacaaagactggcatgtgggccttcaagtattgtcaattcatggcaaggttacgacatcaatggatttaccttgagtacgactacgaaggacatgaaaagcaccgcacaaaacagtgggatccgtgtcgaagcgattgacacgagtggagaaaagaggtcgtattatgggaccattcaagaaatatgggaactggactatggcctaaacatcctgatccccgtgctccgttgtgaatgggttaaagacacaataggggtttctgttgatgactacgggctaacgatagtcgatcacagtaaaacaggccacaaggatgatccatgggttttagcagagcgtgtggctcaagtgttttatgtgaaggacccttcagatgaaagaaaaactattgtcatatccggaaagcaacagatcgtcggcatcgacaacatcgaagaccccaatgattacaaccagttcgacgatgtaccattgtttactgatcttcctatgcgaattaagaaggttgagagaacaatcaatgaagcaaatatgtcgtacgttcaagcagatggtgttgccaaggttattaagtcatagttatttcgtaacctttagttctcattatatttcaaatgtatgtgcatgaatttaggtcccccttatgttgtaatcattagcatgtaacatttgattacgagttttgagcaattttcatgagttttcttagtgccaaaaacatttggaatgtataattgtggcgaaatattgggaaaaaaatatatatggacagtttacttagaggaaaaaaaatatgagtttttttggtaaaaagatctttctatgcggctggcttaacagcccgcatggaaagatctttttcgcatgcggccggcttaacagcccgcatggaaagatctttttcgcatgcggccggcttaacagcccgcatggaaagatattttttccatgcggtcccttaagccgcccgtatgcgatgatctgcgcctatatatagggagcgcggggagccaaaattttctaagtcccggctcccgcgaaaccctagccgccaggctgccaaaatttcccaagtcgccgtcgccgtcgtccccgccaccgccggctcctccccaaagtcgccccgccccacgccgtcgccgccgccgccgtcaggacctctcccccctcgcctttgccgtcgccgccgccaggacctctcccccctcgccgttgccgtcgccaccgccaggacctctcccccctcgccgtcgccgtcgccgccgccaagtcgccgtcgccaccgcacggaactctcccccctcgccgttgccatcgccgccgccaggtcgtccccgccgccaagtcgtccccgctaccgccggctcctccccgaagtcgccccgcccctcgccgtcgccgacgccactgccaggacctctcccaccccgccgtcgccgtcgccgccgcacggacctctcccccctcgccgttgccatcgcctccgccagttcgtccccgccgtcgctcggtaacatttccttttaaaaaaagaaatgtgaaatgtgcaattgtggattgtggattgtttaattgtgcatcgtggattgtgatatgtgcaattgtggattgtttaattttgagaaggtttaattgtggattgttaaatggagatttatgtttaaattgggacttatgtttaaattgggacttatgttaaattgggatttatgtataattgggacttttgttaaattgagatttatgtataattgggacttttgttaaattggcacctatgttaaattgtgacttatgtttaaattgagacttatgttatattgggatttatgtataattgggacttttgttaaattgagatttatgtataattgggacttttgttaaattggcacctatgttaaattgtgacttatgtttaaattgagacttatgttatattgggatttatgtataattgggacttttgttaaattgagatttatgtataattgggacttttgttaaattggcacctatgttaaattgtgacttatgtttaaattgagacttatgttatattaggatttatgtataattgtgattttcgttaaactgagatttatgtataattgggacttttgttaaattggcacctatgtcaaatggagatttatgtttaattgtgactgatgctaaattgggacctatgttaaattgggacttatgtgaaattaagttattgggacttatgtgaaaataagttaaattgtgacctatgttaaattgagatttatgtataattgggacttatgttaaattgagatttatgtataattgggacttatgttaaattgggacttatgtcaaattgagacttatgtgaaattgcgttaaattgggacttacgtaaaattgggacttatgtcaaatttttttacgtcaagttggaagatgtcgaacgaaaaggttccatcgaacgcaccaatagcgcctcaagaaggtaacgctccttaaaattccggtagcaataagcagccagacgcttctagtgaagaaacgtggcgcacaccaagtgacccgtttccaatggaaataacacaagtcgccccccgcgatgatgatccggactacatacctatcgaacaggccgtaagtgctgaaaatcgttagccatgtattattccctaactatgatgtgacatgaacctaatggtgtatagagttacctattgtgtgcagatggtagtccgacgccgctcgaaacgtaaagccgggaggaacaggacagagcaagaagttgagatggacaccgctacgtctgcacctgaacgtacggagacatctacaagtgcagacgggagtgggaaaaaaagacgtggtgagagaagcaagaataaattacccaaggaatcttacaacgtgattgctctcgatcaggatgggaagcccgtcgaaccaccgatagtgcggtccaagttcagcaacgcctgtggcactctagtcaggacgcgttgtcccattaatgtcaagttctgggaaacagtggacgacaacatcaagacacttctctggaatgagttgcagaagtattttgtgttccctcctggatcagaggtcagggggagagattacgcacttaaaaagatgggagatcgatggcgacattggaagtccgatctaaatcgggattatgttcagaagaatctcccaccgtttacggattatggacatatatcgcaggctgactgggacacgtttgttgcggatcatacaacagctgaagcattggctttgaggaaaaaaatgtccgagctcgcgaagaagagcagatatccccatagattggggtcgagcggatacgctggtcacgtcgatcaatggcgggagatcgagcaaagatttgccgtggccggtaagcccctgctggtagaccccatggttgaacgtagcaagaactgggtttgggcgcgcagcacaggtcaagtctcggataagggagacatactattcgagactccagacatagaagaagtgactactaatttgcagcagatagtcgagaaagaaagatcaggacagttcgtcccacggagggagcgagatcagcttactgcggcgttggggacggttgaacactctggacgtgtaaggggtttgtcctcaaagacaagttggaaggtcgggtttccacaagacgcaccaagttataagaagagagacaaatacaaagaacaactatcggacaagatctatacacaagtgaaggaacacttctactcgttggcagctgaaaacccgacagcctttccaaggttattccctgatagccagcaacccacacaatccgcacagcaaacaactaatgtacccagcagtgtaggctcagtgcagacaactatcttccatgtggatagtataactggaccaactccgtgtagtctcgtcgtaccaatcggccgcgctggaaagactaaggaggttgcaacgggtttagcgatacccggacgtcaattccacaacacggcaatccctgaggattacgcaagggtacaggtcgccaaggtccatagcgaccacgtttccttggaactagacatacctgcacctgaggggattcaacttctcggtgatgcagtgaatcagtttatcttgtggcaccgcagagacataatcctgagcgcggccgttcttgcagtaggatcttcaaccccatcctcatcgcaggcaatgactgctgccgctcctgcaccaccgtcgcctcctgaaccaccgtcacctcgacatccgccgtcaccaccaccgcttaggtcaccgcctcgccaacctacaccaccaccctccccttctcaacaaccgcctctcccggtcccgcaaccagttcaagcctctcccacctccccagctaaacagcatgctcccccggctccgccctcagttcaaacctctccacctacaccccaatctgctctggtagaacaagtgcacataccagatggtacaacatccgaaccgaagtctaatactttggaactgagtcgtataattccaaagttgatatcgacatacgacccaaaggagattgacaaggataaggagaagttcatgttttcagctttcaggaattctgagaagagaaaagaacttgctcacgtcttgtcagactcccagaagtcagtactagcggcccaagatgaagtgcaatcctggttatctgccgatgtgcctaaaacttatgagtatggcaagccattcttgccaacttatcttatgaacaagctaccatgggaaatgagggtaatgcacgaatggtatatgaaggcatctaggaaaggtctcggtttcataagcgtcgccgtcccggaaggcgctttcatgagtggtcctaatgggatattttttatctctttccaagacctttacgccctctacaagctagataaaatggacgttaatctcgttgcggctttctgtctgtaagtctgaactctttattacatgttgcacgtttcattcgaaacaaataaaccaaatctcatttcttctttattcattgtacagtatgcaattccacgaagctgatagaactggagcaaaggttggatacgtcgatccaacaagaatatgcaaaacacaacacaccgtagagctgagagaggactgcgagcaattggttggcaagaccccggaagaaaaggaagaatatgtgaagacattgcacaagaggaagaagctagaagtagcaacatacttggcaatagcaatgttggcgcacgccgataaagatgtcttaatggtcccctaccagttcacgtaagctctctcttctttttgtttaattaatttatcttcttcggaattttctatctccaataagcctatcttatatgtagagaccactacatattattccttgtatatccgaaagaccaattgatcatatcattggaccccgcacactatgacaaggagacatttatggaattcctcactattttgaatttgtaagtgataaacatttcattactataaattgtttaggtcgatcaccagtcttctaactactaataaaacaattgtttccttcaaacagagcacacaagtactaccgcaaaagaggtggaccagtacatattccatcccagaagaagttatccgtcaggactggctggccggtactatcaaatttataccaatacaactaattattgaacagtacatatatactaaatatatctactaagatcggtccccataattatatcgcagtgctacaaacaaccaccaggaaccaacttgtgtggttattacgtgtgcgagatgctcagagtaaatgggaggtacaaaacaaccagtaaccgagtaggtcatcgaactcttctctacaaagaaacccatctcgcacacacttctcactgagtaccattttattttcctttctgtgtgcagatccccgaaatcccatatattgcacaacgattcaacgacactactatcttgaacgtggccgctgacctctgccgattcatccgtcgcgatgtctgcaacgcaagaggtctcttctacgacaaccagagtgaactcgcaatggacgacaaatttaaacctctcagagagtgggagaaagaacatatgcaataacatgtacactacttatacatatgcaataacatgatgaaaaaactgtgccacttgctattatatatttgtatgtaaattacgattgaattaatggttatgtattacatgtttgttactgcggcacttgtcttatcttatatgctactactccgaaatacgataataaatccctcaataatttaatattaattacgaatcaccaaaatgctagaataaatattattttagctattcggaaattgaatttcgcatgcggtctacttaagacgcccgcatgcgaaaatagatcttcgcatgcggtcttcttaggtcaaccacatgggaaaatatatcttcgcatgcggcttcttatatggaccgcatgtgaagatctattttcgcatgcggccgtcttaagtgaccgcatgcgaagatcgatcttcgcatgcggctgcgacggccgcatgcgcaaatggtgatctttgcagaccatttcgcgcatgcgggccggccaaccgcatgtgaagatcgattccgcccgtatgcaaaaacgctttctgtagtagtgtcatgtgcaatatcatctacaaataagtcatatatatagtatgttcatctctgctaattgatatttaaaatgtaactaataactaaaaacgatgaaaattgaagtttaatcactagtatagaaccggccatcccaatcaggctatccatgacggaggcaagaggcctgtcacaaagaaagtcatgtttgtcgggccgcaaaaagcctcgtcaatgatggcccgagagaggcagaatcttagtcccctagggtagggcccgtcacggatggccatcaaccgtgacggggtgcggttgaagcctgttaaggtcatccatgacgggccgcaataaaggaccgttaccgatgaaggtcatccgtgacggggcctagtgttgaggcccaacaaagatgaagatgaagcccgtcacggatgaactatcgggctttacttgagacccatcacgaatgacccatactataaatacccccctagacttcggagtaacagtagttgcgacccgacacagatgagggaaaattttccgaacaacctcatacgaagacttaccctatatgaaagttgtagatctcgatgagacctataactttaaaattgacaatatttgaattagatcgtttatatgcctaaatatgcattataagtaatgagatatattctgagaaacataattttgaatttttcaaatgatctccgatggaaacatgccctatagcaaagtcaaagggtttgatgagatctacaactttgtaattgacaatattttcaactttgtaatatgttttataagtgatgtgatctatttctaaaatattttttgaatttttcaaacaaacttggatatgagacatgccatacacaaaagttgtgaaactcgatgagatctacaaagtactttgtagtagaaagcattcttatttgaaatcatctaaagtttcaaatttgtgtttcatattaggacgacaatagtcaaaagaataaaatctgaagacctatcaacatgtagttatagttgaaatggtgagattagtttgcttgtgttgagaggtcctaagtttgaatcctactattggcatgaatataaaagtcccttgaaaaatcataaacttctagttggtgacgtgtgagttgtgccatggttggaatgtcctagtaatacaaaaaaaaatatttttaggtctttgtttgcatttaaaattaaaaagttgttcattctcatccatgaaggttcgtaattacaagccattatggatgagtcatctgagacgggtggtaacttaccacccgacaaagatgagtcatccatgtctggctggagaacctatctgtgaagggtttgatttggggcccgacagaggtatatatgtcatccgtgttggaccatggcccgacacagatgatagcttcacatcacttaccaataatcactgaccatgcacattttcgacatagatgagggtattgccccgttatggatgaccggtttcgtagcagtgaatatatctctttgggcactgttagctgtgttccttcatttgatgcaccaatcagttgtatacctccgtggatttagtgacggatcgatgacgtactgtgtctggctgctttctccagcatgtttcagttattgcatttgttttctaaagaatgaattggtgtttcatgcgcttgcatgcatgcacctttaagttgcattgtacgtgcttgatactatgttaatttgtctgtgtcctaatgacgcaccatacatctgtgtgtgagatttagtttgtcaattgatgtatacatatgtgctttgtgttcctacccaccagggcctagaactccacagtgtgagagactgagagcattttgttgcaaaagaatattggagataaactatgtactatgtgctggggggggggaattgacggatggcgactgagtgcttagggtttcaagagagggcgactccagtgggagagtcctcgtcggtcctcccccgccggcgatcgccggagaagggtctgcctagaggatacacccacgcggatatcctcacggtagctgcccgtggtccagttagttctggcgcaaaaatttcgggtgaatttgcacacgaattccggcccgagagacctagcaatggcggtgggagcccgatggctacagtgcagcccagagtcgcgagaggcccagcgagttccacgatgatgaattgcggaaaaaaagtgggtgagattaatttggaggatattttccccaaatttcgccccactgagccgcaaaagtggatctggatcaagcgaggtgaggttcgccctcttctagggttcccggcgagagacgacgagatccggcgttttggcgacggagctcgtcggatttggaaggtgcccgagaagaggtgtgatcaccgcaccttcgcccaggttgtgatggagcgtcgtcctcccaatcgcctggattggcaagccaacaagcgacgagcgacagagcaaggcggcggcgattggggtgcacgaggcggaggtgactggggggcgtgcggagctcgcgaggaggaggaactgcatcggcaactccttgctcaaaaccctagggcgaatcaaggtgctcaatggaaacctcaagggctccctggtaccgatggagagaggggggcaagagctcctaagatcaagtgcttcaagtgtggtcgtgagggccatcaccaggcggcgcgccctaacccttccctctgctactcgtgccatagctcaggtcatatttcttcccaatgccccttgatgatgagaaagggtgttaaactttgtggttttggcattccgggacaggggttctatagtttgaatgttgagttgtctgatatgagattgctaaagcccctgtgagaggtattttgactgtgcttttgggatctggatctgttgcaaaagtcattgctgaattgaaacacctgtttgtgggtcttaattgggattggcgtgtgaaacaacttaatgagaaagagtttttaatcaacttcccatctgatgaagtgagaagtaaaatttcaacatgtaagagttttgatttcgaaacatctgtgatcaaagcaagtgtagttgagactggtatgactgaggaggctgtagatgagctggtagcagtttgggtcaaggtgtttggaataccaaaaagtttgctaggactgaagaatctgtgaaagctattgtggagctagttggggagtttgaagctattgatggggctagcttaagaagggatggtcctataagagagttgcttgcagggatcctagagaacttcacttctccatccacctgtatatcagcaaagttggttatatggtgagatgggaacctgaaggata

SEQ ID NO: 16975 - DNA, 1091 bp, Oryza sativa
gtttggaataccaaaaagtttgctaggactgaagaatctgtgaaagctattgtggggctagttggggagtttgaagctattgatggggctagcttaagaagggatggtcctataagagagttgcttgcagggatcctagagaacttcacttctccatccacctgtatatcagcaaagttggttatatggtgagatgggaacctgaaggatatcttccttatgaaaacagacagaatcctccagatgaggggatgacagagatgataaagatgatgaggggttaggagaggacatgaaccttgatgaggaatttaaacaaaataccccaagaggtagacaagctgcagatggacgagcccaacaggggagtaggttaggtgctcattctgctccacctgcttttaaggggaagtcacaagtaagtcagggaggaaaaactatgaagaaactagcttccaaaaaagactccttgctgactgtgatggaaggtacagagatatctattatcacttcagagaggaaggctccagaggtatgtgccaatatacctatggtgaaggaatgtaccaccatggtcctttggcaggaagagaacttgcaggaatcccaagaaatccaagatccagtggtgcaatctcaggaggatgttggggggtttgctgctgatatccttgtcttagagagctttcttttggatgatgataatgagaggtgccagataccaacagactctgacattgagagaatcagagaggaagaagaaaaagaagaagaggatagttttcaggaggtttcacacaagaagaagcacagggagaagagatctgaaccggcagtgacctccaggatgagtctttagcaaaacagagatggttgatgtccctataacaaaaagagctgatttttggattttaaaaaaaaatttgaagcttccagatactttttctaacccttttgctatattttaaattttagataattattgagttaaataaacattgcccatagtttctaatatagtgcttggtagctctccttaagagatagataacaccatagaaactttgaaagctaaagaggtggtgcaagct

SEQ ID NO: 16976 - DNA, 1387 bp, Oryza sativa
tttttgaaaaatagctatggaaatgtttgaaaaaaaaattgtaagtctagtatatgcatatctattatctcattctaaactccacccacgcatcgagaaacaaagagacaaatcaaaataatatatgaacagtattgtagtgttcatctatggatttctcttgttttctatttatttctccaatctagatttgattgttgtgacctcagtagatgtcagtgcatacttaatattgttgccaattttccaaaagttttcatggaaattttgattgtatttgggaagtaaagacatatcagaggttgcccctggaaggatgaaaatccatcactgttttaatttaatcttatggctgcaggaaataatccttaattcggtagacaacccatcaaatgctgtagagtgggcactggcagagatggtgaacaatccaaaggtcatgaagaaagcagtagatgaactcgatatggttgtcggtaaagaaaggcttgtcgaggaatccgacattcacagcctcacatacctcaaggcgtgtatccgggaggcgttccgcatccacccctaccacccattcaacccttcccatgtcgcgatcgctaacatcaccatcgctggattcatgatcccaaagggtagccatatcattttaagccgaattgggcttggtcgaaaccctagagcacgggataacccactcgaattccgaccagagcgacatttgaagaatactgataatgtggtgctagctgagccagagttcggtttttatcattcagtgctggtaggcgtggctgccccgccgtatcactcggaacttcaattacaatgatgctttgggccgaaaaactcaatactgatgtaataaaaaaacatatttgtaattaaaaaatatttacaaataggtccttggcgccaataacgctggcactgaggaactatttgtaaatattttacaaataaaaccatttttattacaaataggtcttgttaaataaatttacaaataggtcctcagtgccaacgatatttgcgtcgtcccacatcacattagtgacttagattccatccaggggtggaggggatggtgtcaacttcattggtgttgttccgttagatcacggcgccaatgacgttggcgttacggaaagggccatttatagaataaattttggagtgtatatttgtaaaataagttttttaaaaggaccaaaaggtgaaaattcaggggtagccactgattagagaataggctgtttaggcgacgactaggcagattagacggtctaggcgtgttttctaatttttccatagaaatacaaaatattgattgaaaataacacatgttatatagtacttcctccgtttcctgttataagacattttgact

SEQ ID NO: 16977 - DNA, 684 bp, Oryza sativa
cctattatgccgctgtgttaggcgtctacgacttcaccgtcggcctgtcttcgccaccgccgactggtgtctccgcctacacagccgacctattaagccgctgttgttgggcgtctacgacttcaccgccggcctgcctttgccgctgccgactggtgtctgcgcctatacggttggttggtcacaccactgttcatgggcgtccacgtcttcaccgaccggcttcccttcgccgccgccgactggtgtctctaccaacacggccggcctattatgccgctgttgttgggcgtctacgacttcaccgccggcctgccttcgccgccgccgactggtgtctccacctacacagccggcctattaagccgctgttgttgggtgtctacgacttcaccgccggcctgccttcgccgccgccgactggtgtctctgcctacacggccggcctattatgccgccgttattgggcgtctacgacttcaccgcaggcttgccttcgccgccgccgactggtgtctcagcctacacggccggcctattatgccgctgttgttgggcgtctacgacttcaccgccgccgactggtgtctccgcctacacggccggcctattatgccgccgttgttgggcgtctacgacttcaccgccggtctgccttcgccgccgccgactggtgtctccgcc

SEQ ID NO: 16978 - DNA, 2143 bp, Oryza sativa
tccacggccatccccgcgagccccactgcgtgcgacgagcgaggcgggggcgctgcgggcgggcggatctgagggacacccaccgctgctcgccacccagtcgccgctcgctcccgccccctgcgccgcccttcctcgctgccgcctcgctgtagccgccgccgccgccagatgcagacggcgacacgctggcgcacggggatggaggcgcggagcatgggtgtcctccttggccacgacggcgacgccgacgcggaggccgtctcggcggcaccttcctcgatagccacgaccgccgccgtggcggccgacacggcgaagctcccctccatcgtggcggccgactacatctgtatgacaacaattaaacagacacaccataaaataagtatgccaagaagattgttttagagagaaacatcaaaaatgcattcgtagtgattacatgaaggctataccttcagcattggcaacaatgtttcccaggtcacccgcatgacggacttcatcttctggtgcaccgtgcgtcaaattgtttgggttaaaatgtggtcctgcaggacaaagttttgccatgtaatgtgagggtgtgtttggataatgggaaatgtgaggtgggattgagatttggaaatgaatgagggttaggattaaatgaaagagtgagaatgaatggttaggatttaaagatgtcttttagtggttgggaaatgatttccctgtcccattagctaaacagggcctaagtagacaggccttagggcacccgcaacgcgcttgcctcgcagcagccgcagccaccgccgccgatatatgcagacggcgacgcgctggcgcacagggatggcggccgacacggcgaagctcccctacttcctcgctgccgcctagcctgatcccctgccgcggccgccgttccgtgtcctcacctgcgccgcccttcctcgcagctgcatcggctcctccgccgcctgccgctgtggcgccgtgcgcgtttagagagtgagaggagagagatgaacacagagagagagaagagagggggggaataatgttataggggtatgacaggtgggtcccccatttttttaataactaaaatgctgactggattcccacgggtaccccaggtagcccaaaactcccgtggattggattgaggggggtaattcgtccggtttgcatagtttggggtaaaaaatatccggttttatggttcaggggtgtaattcggacaatacgatagttcggcaggtaattcgtacttttttccaaaatgaatcggaatggacaaacggaacgatatgcattcccctcccaagaaaaagcacacgcgcgcacacaatgaccgaagttgctaattagcattcgaatgatgcatcattgggtgcgttcgaatgggtgaattcatttggctaagttgtttcacgcaaaactagataagttattaactattataaactaaaaaaaattgttttggagttttttcataaaacgtatcatttaacagcttataaaatgtgtccatagaatacgataaagtagcttgccccgttatccgtaatgggaattgtttacaggactgcagctgctgtagcagccgctgacatgtgggaccaggtccacctatcagcctggcttctgcaaatacagtactgcaaaggatcatgtctcgttgcccgatgctgaatcaaacagactgcagtatacgcttccaccgtcccacgaaccaatgaagcatacgctcagtttcaagcttggacacgaaaaatgaagggcctcaaatcactcaaatcacccaattctcaacacttatatgcacactggtcagatgtattctgcatttctgccagcatcaaagccgagttgtattttccccggagaatgtaacgcggaaaaaaaaaagcccaacaattttgcacaaggtaaaaaagaaggagcaaaatattcgcccatgcacgcgcactagcccttggcgtgcgcaacgctcagctcaagccgcaacaccttcgccgcggccgcgccaccgaacagccgcggcgcgcacagcgcgcggagcacgccatccccgcccgcggcgaacgcgaagtcgcccgtgccgcccaccacccgcagcacctccgggtcaccgcactccccgcgc

SEQ ID NO: 16979 - DNA, 2937 bp, Oryza sativa
  unsure (1)..(2937): unsure at all n locations
cgtgcgttaaatacgctcgccgaccgaagcgacgttaccatatctccaggcgaagcaaatcggctcgcccagatttgtgcgctgctcaggtgatgtggcagtcttaaagagaccgcccattattgacagccaagttaccattaccgatgcgcatggtttgagaccgttgggtttctgcccaaccatggagaccggtcccacctgtcaccaggctttaggagtggcgtcacgcccggccacttcccatgagaagggcgatcgccctggcataacgccgggggctactgtcggtgacatgggaccgggagtatcatgactagaggcttgaggcagacacaatcgcccacgtggcctggcaccctcgggggacgtcgggcccgagggtgatgtgtgcgcccacctcttggtctccccgagggggggggtcggaccactcctgctcgcccccgagggccggggcgccccgacccctcgcgtttctactccacgtgtatgagttaggtgagcacagcggggctcaccttaccgcatttattgcgcctcggctaagcgtgtcacgccacacgaagtgcagtgcagtgcactcgattatccggtctgtgaccagtcacagaccggtcaaatcgcgggttaggtggcgacaggcggtctgacgcacacttcgctccatcccgtcaagacgagagcttctaggcactcgtccccggctggagctagcgtgttacatcccagagatgacacgttaaccccgatcgatatatgccaggcttcatcccaaccattacaagcaagatgttatttgaagaagggcaaacatgcacgttgctaaaccgacgcgtggtggacaagaatgaccgatttgtgaccggtctgtcactgctcatgtcgtcagcacacagccaccttcccacgacgtgctcgcctcaggcagaagtggaggtaggtgtgtgctgtcccgtcaggaggatgttcggaggacgaccgtgcaaatcttcgtccatttatggagagaagaaaagtccagtttggaaagggaggggtgcatgtggtatccccttaaaatataaaaggaggaccttggccagaaaaaagggggggatggctgccagattcagaacctagaacaagggagaggttggctcacactttgtagctccttgatacatagatccaccaaaacacaggagtagggtgttacgcttctcagcggcccgaacctgtatacatcgttcgtgtttcgtgctctttcgatagctggcaatctttccacatacagagagagcttgggatcatcaccctgagcccccggccgaaccggcaaaggggggcccgtgcggtctcccggtgaggagccccgcgctccgtcatttggcgcgccaggtagggggctcagcgtgtgttttctgagctctcgtatttttccgtgtgcgtcaagtttttcttgatcagcctcatggctgagcaagcaaaggcgcccgacctctctcccagtgtgagtggcgacgacggggagccgaacccacgccgtcgagctcgtactccaccgccccctccacgccaaagtcctaagcagggggaggtgctcgaaagggtcgaaagatccgcggcttcaccgatcgcgggcgatggaggagaacggcgagatggggaccgtcgcctcctcgtctacggcgacggcagcacgccccagggcgcgctccaagctgcgggcgcgctcttacgccatccgcctgtcgtccctgacccggagtctccagcccaacgatggctggacgatgtggccaaattggtcatgacggcgcggcagcgcctagatgctggtgggcggtcctccgccaccaaggcctctggtgctgctaccaccggctccgcgtcgtcaagacagagggcacgacgagcggcagccgctgttcgccgttcggctgccactccttcgtcgactccttcgacccggaaagatctgcgtggggagcaggacgcccgcgccagcatcaagcgccggcgcaatgaccgaagtgctgcccacgcaacggagggcgcttcctcgtccagagtgtcacctcgacatggacgtgggaatcagccctccgtgcccccggttggtggtgtcggctgtagagcctttgtggcgagtcttcggaatgtccgttggcccccaaggttccggcccaccatcgccgaaaaatatgatggcagcgtcaaccccgccgagtttctccaggtctacacgaccgggattgaggccgccgggggtgacgacagggtcatggcgaatttcttccctatggccctgaaggggcaagcgcggggttggctaatgaacttgccacccgcgtcggtccactcttgggaggatttgtgccagcagttcaccatgaacttccagggcacatatccgcgcaccggtgaagaagcggacttgcatgcggtacagcgaagggacgatgagtcacttcgatcgtacattcagcggttttgtcaagtccgcaataccataccatgcatccccgcacacgcggtgatctacgcattcagggggggcgtgcggcacaaccgcatgctcgaaaagatcgcctccaaagagccccagaccaccgcggagcttttccagctcgcggactgtgtggctcgcaaggaggaggcctggacctggaactcctccggttccgatgtggcagctccggtcgcccccgggtccgccgctcggtcagggcggcgggacatgaggaggaagaagaggtcgggccattccgacgacgagggtcacgtcctcgccgtcgagggcgcttcgcgggccacccgaaaggggaggcctgcgagcgacaaaaagaaggaggtcggcgctcccagcagtgagcgcccgaccggcaagtggtgttccgtgcacaacaactcctccacgacctcgcggactggcgcgcggtcaaaattntgctg

SEQ ID NO: 16980 - DNA, 1808 bp, Oryza sativa
ttcgtataaaatcacttgatctatggtggtcccaccgagttaaatgtgtgtgtgtgtgtaggatatctcaaacctaggacactgatagaacaattaaaacctttatcaaagttttttttacaacagaataactaaaagaaactcccttatgatctcaagtgggctgaatacgacccacccctcctttctctctcctgcgcccatgatctgtctccacttgttgatccaccttcctcacctttcttctaatagaatttcagtatccaaacttatcgcattttggagtgccttttattttataacctaccaatgttgttactgtcaaaacctagacaagttttcatgctaccaaatttagtagagatcactattgggtataactcaaaaatcgatagtattagcaacaattggtaccaaaccattcatctagatagtactattcagttaccaaagggcaaaaaaagtggcataagttagaatttatttggctccatactttcgtttcgctacaacttgcaacaaaaataactgcctccgcagcccattagttgggaagaaacatagcatgcctgatagaggctagctcatctgtctatggtgaatgtgttgtatagttcctagtgtagttttagcaagtcaaggaaatattaaggaagaggttaaagaactactagaccattttgtcgacggtggatacccgtagactggatatagagggtattggggtacgctggtacgaggatctacgtgatacgacatcaagcaaatagaagacaaggattatactggttcaggccccttgataggtaatagctctaatccagttggtatgggattatatggtggaaaccacatattacaaagataatagcagaactcggtgatatcgacaataccgtagtcgagttggtccgactagatcacccggcaacttggctcctataggctccgacttcctaggttgtggtcgttgtgttggcggtgagattcgatgccttaggtcctcccgggggtcccttttataccgtgggtcagttgatctctaattagaactcggagatatcggaccccacacgatatagtaacgacccagttctgtccgagtaggactccttccatccgtggactccatttctgttacgtgacggatttccttaacgtgtacaggaaacatccatatacgcgcaggtataccgtatctagggatgacaatgggtcgggcacgggtagagcaaaaccatgcccgacccgatgcccgacattgcccacccaaaccctacccattagagttagcgggcaaaacttcgtgcccgtacccatgcccggcgggcgcgggtatgtccggcgggtacccaatggatctcacatgaataataacttaaaagatatgtaacttaacaaagagaaataaaatcaataatttaccaaattatcgtttatcaacaataatttgaattacatcacaacttagtatcagttagcatcacaaatgaactgagagaaatggtataagaattaagaaatgagtcaaaattagctaatacatatgtatcgggttgggcatgggttacccacgggtaaaaaatgaaacccacctattgcccataacgtcttcgggtctcgggcgggcgtgcccatgggtaaaaagtcacacccacgcccgtgcccatcgggtcgggtatccacggatacccggacccatgggtaaaattgccatccctaaccgtatcggtatacaacatacatccaagggtaaagggtataccttatccgtaaccctggcagtagcccccgacttctgcttaaat

SEQ ID NO: 16981 - DNA, 685 bp, Oryza sativa
  unsure (1)..(685): unsure at all n locations
cagaaacccagcggtcgcaaatcgcgcgcatcggncagggaaaaccgaccgacaataatgagcggnctcttcaagaccgctacattactcgagcagcgcgcgaatcggggcgagccggttcgtttcgcctggagacgtgatgatggcgtttttctcggttggcgagcgtagttaatgcgcgcacgatctgccccatctaaaccgccacggccgcacatttgccgtgtgcgccgcaaacggacgaatggggttagtggaggcgtgggcgcgagaaacgagagggcgaggtaatgggcgcgggaagcgaggagccgggcatagcgttggcaaggaaataaagacgccgaggaaaggattcgtttccttcctctcgccactctttcccttgccttcgccacttgcgctctaactcttcgtttcctatgccctacccttgccgcactcgctcgctctcaagctcctcctccaccggcgtcatggcacggggctccgcaccgctcgatggtagcgtgctgccgccttcccgcatcgtgagcgagaggtaagccgggctgccgcgccgattcatgccggaatctgccaccggccggaaggtggtcgcgctgggcgagggacgcccgacgccagactacccggggcggnnctttttctaacctctttaatgatgggggtgatgctgccctct

SEQ ID NO: 16982 - DNA, 1219 bp, Oryza sativa
  unsure (1)..(1219): unsure at all n locations
atgttcnnggacgcngtctccaatttagaccgcgtcgggcggcaggcgggcctctaggncggncggtgcgcgaagtacgccgccaacaaggggggtctcgcccagcgcctctcagagatggcggggcccctccgncggctccncgaggagctcgaggagacgatctagtcatcctcgagggacctcgcccggggggcggtggagctcgtactggcaagctacaaggcaagggaccctgacttctccccgtgggcagcgctgtaagagttccctcccggaacccaggatggcgcacgcgcgcaggtccggaacgccgccgaccacatcgtcccaagcttcgaaggtacggcccctcggctcgcgttcgccctcgactccgacgagaaggcggttaacggtggtgcgtacgacagcgacgacgaggctggtgacccgggcgcgtcggagtgagcccccaggcccccgccaatcttaaatagctttttctttcttcttccgaggctttcgggcccccttcttgtatagactaatttaatctgcaatcaaataaagaggaaatttctgtgtcaattctatttgttgtgtgtatgagacgaggatggtctgtgccgcggtccttctgtgtcttggcttgaacaagggctcgtgcccaggtcccagcctcaaacggcgcgggtcggggctagtgcctggggagatccacgtgtcgagactggccaggccgggagcgtggtgaccgagggttatggatgacccgattgtgggcctttgccgattcccccccggagttcaccacgccccggggcatggctcggttctgggccccttttggcgattttagccggccgaaccgggcccccgagggcaggatcgagcacgagcgtgctaatttcaagtcaaaattcttcaaaaaggaaaaaacggcacagacacagcccttaggaatttgaaactgcttttattgaaatactgaaataagagaaaatgagaatgtgcatgtgtggtagcccccggccaaccctgcacacccgaggggggggtgcggggttggcccgagcccgaaacctgacacccgaccccccctcaggggtagaagcgacgaaggtgctcgatgttccatgggttaggcaactctgtgccgtcgcccgtggccagccgtatggagcccggccgggggacgccgatcactcgatacggaccctcccacattggtgagagc

SEQ ID NO: 16983 - DNA, 736 bp, Oryza sativa
cgtttttggtctcactactataggcgaattcgagctcggtaccctttccgtctcttagagcatgggttaggggacgcattcgcgaggatgtgagcgtggtgttgtgtgtatgcacctacttttggaggttaattaaaaaaatgtgccaattaacatctgtatagcttattagcatctgtgtaccggtgtgaatagctaagtgatcgtctcaatagctgacatgatgctctacagttttgtcaaaatcatcggtggggtaccactaacacagaagaataagatgctgaattttattctcttttatgccctaagataaagtacttcctctagtccaaaaggaattaaatccaaatgataaatctagatacagattcatttttaggatttaagtttttttttaaatagagagagtaggaaacatagaagctgacctgtccatcaattgtagtcccagagcagtgaggggtcatagcatgattgggcatgtatcgccatgggtgatcctttggtgctggctgggggaaccagacgtcaccaccatatcctgacaacacaaggatgagggtttgttctttcagagacagctaatttacataggtgcacaacactctttttctttctgacaaaattttcttcaataatttgggaaaaacaaaatatcatgcttgacagatatactgccttacttggttattcgagaaaaaaaaacagaatactgccttacttggttataagt

SEQ ID NO: 16984 - DNA, 695 bp, Oryza sativa
aactgacatcaggccagcatgaaaaacataagataaaattaattccagccggctgccaaccaaaatacacgtctacatgctgatagatgctacggaatgctcaaaaaaagtttatcgaaattgttcgtagaaactacctcttgatcacagctaatactccttcagttcaacaacataagctttgactaagaattactcttaatttcatgacataaatttgatcttatttgatttgtattcaaaagtagtctttaagtattatgtgaaggctttattgtactgaaacaaaatacatacttcttaatttttagacggagggagagtactactaaccgcagtttatcccctccttgtcatcggtgacaatgtagcgatgccccttagattcaagccagccgcgaatgccgagagcggagtcgacgcagccgacgaagttgggattcttgtcggcatactcgccacccttgtagaacacacccacgaccttcttgctgcctgctgatgtctgcggtacaaagagggaaaccaaaaggtgtcattcgtcatatcgagctgcatagaacaaatttgttgatcaagtggatttgttatatttaggggtgtaagtgggtcagttgtgaacaacttataggttaaaataagcgggttgatggcttgttttagcctataagtggatttcgcgggttagccactta

SEQ ID NO: 16985 - DNA, 674 bp, Oryza sativa
ttataatgttcatgcatgtagagggtcatcacacagggaacttgagcaaagaattctatgatagtgtacgggattggaaccttgctaggaaattgcttgcacttactttggacaatgcatcagccaataatgtatgtgctaaggggttagtacaaaagctcaacaagatacaacccttgatctgtgatgaggccattttccatgtgagatgtttgaatcatattttcaatcttgttgctcaagatgatttgaagcaaatttcaattaatatttcaagtaggacgaccaaccgagaggagaatccacatcctgacctgtaagatgtaacttgttagcatttataacttatgaccaaaaaatgaatcacaacattaaatattgtcactgttggtatttcttaacctcacagataaaattcgcaagcgcacggagaataccgatgtagcactttacccggaagtattccaaggtatcgatttccatagggaacgtgtgtgctcaactcctcgtcgtgttcattcaaggacacaaagcacaaggtggcaaagggttgaagagatttactagtgagaaacagtgtacgaaaaagctaagttaatcctaacgcgatacttaagcacttggcaaactgctgcttccagatgttgctctacttggtaaccgaacaaggaggt

SEQ ID NO: 16986 - DNA, 682 bp, Oryza sativa
  unsure (1)..(682): unsure at all n locations
aaggcttcntacatttggtcatcttttcagaacaactattttcggccctcagtgatatggttgagtgctggatatcaggatatgttattcctgcaaatggcatcgttcaaataacttatcttaaaaaagtttgacgtgtgatctttaagtgaactaacttttgtaacaatctaaacttccttacttggaacatggcttttcgtgttaagataaaaaaaattgtcctttgaaatatagatggaaatgttataagctactgagaaagtaacatttctttttgtgccacaagtgcatagtatcacctccttcagttcattgcttttcctgtcactaaacatactagcttcaaatcagctgcttacattttggtgagcttgtgtttctatccttacggaattgccattctttaggatgggataagacgagaagtacaagccatgagcttgattgatcatccaaatcttcttcgagcatattgctcgtttacaaatggtcatcagctttgggttattatgccttacatggccgctggatctgctctgcacattatgaaaacttcttttccagatgggtttgaggagccagtcattgcaactcttttgcgggaggttcttaaagctcttgtccacctacactcccaagggcatattcacagagatgtaaaggtaatattgaatctcca

SEQ ID NO: 16987 - DNA, 937 bp, Oryza sativa
  unsure (1)..(937): unsure at all n locations
aatgatcgaatcatgtcaattatgtcataatgattctgcaagagcaatttgagcttcttgtgagatagacatccttggaattgagctacatctatttattttatgttggcatcaatgtttctcttcgtgtttcatgcataatagaatgtcatgcatgtcaagaatataaagcagtaataggtcagtacagtagaaagcgattagcaagaaaaaagtgaacccatgtccacaaagagcatctgagactcgccgaaacgaataaacattcgaaatctgtattgcgtangactaggacagtttataaggcaagtaaaaccttgcttttgtaaaaaaagaaattgttttgttgggggaaatagatcatcatgccgttgctatacaaaatgaaatttggcgcaaaaaatgatcaaagtacaaaactctcgccaggtcattactgcacttctcaaggtcaagaactttaatggcaactccaatattaagtgggatacaaaaagctttgtacgccgtagcactaacaccatctccaacttcctcacataatttatattctttgggatctgttgcaaatctccttgcatgctccatggctcaaattcaaagagcatcatgcgcaataaccacagagttacaattaccatagcacacagaagcagaaggcaatagcacgaacaccttgtagcagcgacagagaacaaccagcagcatgactaagtctataggcgaatgtacagtccaatatagttcttaattatccagtctatctttcaagcatcctttggtccaaggtgttgtattgccaaacacgatagttaagtagaaaccacaaaagctaccgaaatggctagcagcaagcgtactttggcatccagtcttaattatccagtctatctttcaagcatcctttggtccaaggtgttgtattgccaaacacgat

SEQ ID NO: 16988 - DNA, 1142 bp, Oryza sativa
  unsure (1)..(1142): unsure at all n locations
cgcgcgaggtgngtgcacactactactatagggcgaattcgagctcggtacccaacgatcacagcctacgaagtcggagcctacaggagccaagttccgggtgatctagtcggaccaactcgactatggtattgtcgatatcatcgagttctgctattccctttgtaatatgtggtttccatcatataatcccataccaactggattagagctattacctatcaaggggcctgaaccagtataatccttgtcttctatttgcttgatgtcgtattacatagatcctcgtaccagcgtaccccaataccctctatatccggtctacgggtatccaccgtcgacaggggcgtgccaggtaggggaacttggtgctcaaggttctactactatgtcatcaagcttcgtcgacaacagcgtcaaccccggcatcaaccaaggagtttctacttcaacaatgctggtgtggactcaagtcggcgaaatcgtcttcctggtttacaccatggtgccgatctcaactggtccatcaatgaccagaagcgagaacgccgtggttacaaccctggacggctccatgtcgaaggatcctcccgcagaagtggagaacggaacatcgacgacatccgagcctgagaaggatcctaatgcggccaaatcttgtccttccgacgagaatcacgagccgacaaggacaacttccgaggcgacaaagtcctggtgtcatatccacaaaaccaggaaacacaccttacaagcttgctgggtatttctcgacgcctgcaaagagcgtggaattcaacgtacttctctaacccgcgatgtctattgtcctattcacaagacaaagaatcacgacctctcaaagctgcaggttcttctcagcgccatgaggacgtcacctcctaaggtccagcaatcacagatctctcttagagatgcggccaaggaacgaggagcgacagttatctcagatcgattcatcggggtaatcgacatcgatccccacgagccgtaagtactacaacttgctcgaagagcaggcccttattattaacgagtacaccacgtggatgtgttcgcttttgatggggaccagcccgtttgcgcgcgcttacgcagaaacataggatcaagtgggtccc

SEQ ID NO: 16989 - DNA, 678 bp, Oryza sativa
aggaagaaaggcgtttccccagttgctcggcttggtgtggttcggttcgcccagagcaccgctggcaactcctcgatccatgaatcgccgtgcttcttgagaatattgaaggtcttggttttgaggcctttgaggatttctgcattggcgcgctccacttgaccattgcttctggggtgggcaggtgaggcgaagcagagcttgatgcccatgtcttcgcagtagtcgccgaagagttcactagtgaattgtgtgccgttatccgtaatgatacggttaggcaccccaaaccgagcagtgatgcccctaatgaatttaagcgcggagtgcttatcgatcttgatgaccggataagcctcgggccacttagtgaacttgtcgatcgcgacatacagatactcgaacccgcccggggcccgcctaaacggacccaggatatcgagcccccagacagcaaatggccacgaaagtggtatgatctgcagggcctgggccggctgatgggtttgcctggcgtggaactgacacgccctgcaccaccggaccaggtcgaccgcatcgttgagagccgtcggccaatagaaaccctggcgaaaagccttgccaaccaacgtgcgtgaggcggagtgggctccgcactcgccttcatggatatcggcgagaagctcgacgccttgt

SEQ ID NO: 16990 - DNA, 1431 bp, Oryza sativa
  unsure (1)..(1431): unsure at all n locations
cagtaaagcagtatgtatgtcaaatatgataacttgttgctcacaattattgaagaatctttttttaaaaaaataaaagaacttctctgcacctatgtaaattagctctcttaccatgattctttaatctgtgacaaactactaaatgtcctttccttccagagaactaatattggggtcctattgaaaaaaaaattattagaatgatgccgtattaatatttctatcttgatcaatatttcctttagcatgaaaacctcattcttccttctcaggatatggtggtgatgtctggttcccccaaccagcaccaaaggatcacccatggcgatacatgcctaatcatgccatgacccctcatatctctgggactacaattgatgcacaggtcagcttttatatatgttttctactttaacttaaggcattggagcataaaattctagaatctgattctgtgggtacccccacaatgctttaacaaaactgtagagcaatatgtcagctagtgagatgagtaacttagttacccagatggcagcgcatgttttgcatgatacatagtacaaaccaagggccactttattgattcatcaataattggttcttaagatcaaaatcatataaagatgtttttactccaagctagattaaatatgcacaactgctttattcagccatagggttgagattcggcgtcaatttctcactacattggcaacgggtcctgcttgtattatgtctagcatagattatatgtgggcatttggattggtcttataatctgtttcctataagtattgctgactgtgtctgtaacgaaatttcacggcaaatgaacaattgctgcagctgagatacgcagcaggagtgaaggacatgctggacaggtacttcaaaggggaagacttcccggtgcagaactacatcgtcaaggaaggtcagctcgcgagccagtaccagtaataacccccccttgtgtgttgggtgtccatcctgtggccaccttcccgcagtgaagggaaacagagattcggataggaaccaaaacaccttgtgttgttgttgttgcttgagtgttccctgagaaactattggacaccggaaataatggatgcctgccatggcaaccatggctccgaagaataaaaagccctcggattaaacagttcagttcagttcgtctatgtatgatcttttatgtgctttctgctctctgtttttgatgtgaattttctggtccagtactccagttgcacataacaattgtacttgtacctgagtacctccatgccaggggccgggggcaccctttgccttactgcctcggcagtcggctggagggctgcagtctgttatctatggaatctttggttagggggatcctctagagtcgncctgcnggcatcaagcataagatctacaatccgt

SEQ ID NO: 16991 - DNA, 763 bp, Oryza sativa
  unsure (1)..(763): unsure at all n locations
acgccatattagtgaagacacgattactatagggcgaattcgagctcggtaccccgctccgcccgcataaaactgaaccccgataagtgtgtgtttggtgtacctgtgggcaagcttctcgggttcttgatctctgcccgaggtatcgaggccaaccccgagaagatacgagctataaagcggatgcgccccccagtaaacttagggatgtgcaatgtgtcaccggttgcatggccgccctaagtcggttcatatcgaggctgggagagaaggcgctacccttatttaagctcctcaagcgctctgggccgtttacctggacggaggaagctgagcgtgccctcactcagctgaaggcatacctcagttctcctccggttttagtcgccccggagccaaatgagcccctgctgctctacttagcggcgaccccccagtagttagtgcaacgatggttgtggagcgcgatgaggacgatcctcattccgcgcaccctcaccctgtgctgacttggcccgggagcgagcatggaggagaggcccccgagccgaacggtggcctaaaggccctgacgaccggagtcagncctcttcccgctcgtcagatggtgctggtgcgcccccgacccttatgaagagccccgagggncactgcgggaagagcttgaactatcggccctcttgaacccgaggctatacttctgtacccgaattcnaaccttgggaagcgaagccaagttagaatgaaagaccccccaagccct

SEQ ID NO: 16992 - DNA, 1259 bp, Oryza sativa
  unsure (1)..(1259): unsure at all n locations
acggcttgcatgncgccnntaagtcggttcatatcgaggctggaaaagagggcgctaccccctattttggctcctcaaacgctcnggnccgttttactggacgnaaggagactgagcgggtcctcactcagtgaaaggcgtacctcagttctccccctgtcctggtcgccccggagccagatgagccgttgttactctacctggcgtcaaaccccgcaggtggtcagcccgtcgttgatcgtggagcacaacgaggacaaccctcactccacgcatccccaccttgtgtcgactcgacccgagaaagagcagggagcagaggcccccgagccgatcggtggcttaaggcccccgacggccggagctggccctccgcctgcttgtccgacggtgccaggcgcccccgacccccaggacggcctcggggccactgcgcgagggccgcgcctgtcgccctttgaccccgaggtcgtcggcacagaagccgagtgctacccgcgtgccctctcggacgaagagcgccctggagatacggcccctagcgaaggggatcggccccgccgaaaggtgcagcggcttgtttactttgttagcgaggccctccgggacgccaagacccgatacccttaggcccaaaagatgctttacgctattctgatggcttcgaggaagttgcgccactatttccaggcgcatcggggcacggtggttacgtcttaccccctcggtcaaatcttgcataaccgagagggtactggacgggtggtaaaatgggcaatcgaactctctgaattcgatctgcgctttgaaccacgccacgcgatcaagagccaggccctcgccgactttgtggcggagtggaccccagctcccgagcccgtctccggccccgaggccacctcgggcccctcgcagctgcctcacaccgtctactgggtgatgcagttcgacggctccttgtctcttcagggcgccggtgcgggggtcacgttgacctcaccgagcggagacgtcctcagatacctggtccgcctcgactttcgggcgaccaacaatatggcggagtacgagggactccttgcgggactcagggtggcagctggactggggatccgccgcctcctggtgttaggcgactcccagctggtcgttaaccagatctgtaaggagtaccggtgctctgacccgcagatggacgcttacgtgcgccaggtgcggcgtatggagcgccatttcgatgggatagagcttcggcacgt

SEQ ID NO: 16993 - DNA, 695 bp, Oryza sativa
  unsure (1)..(695): unsure at all n locations
tttgtcttctgatttttcttctgactcagcgagatcccgtcgcgccccccccgccattccaagtccggccggtctgaggccgaggagacggtgaccgcggaggcccggaggcgggaagctgaccggcgagaagccacggaccgcctacgggaagccgaggaggctgcccaggaggccgtccgggtttgccaggctgaggaggccgctcgggaggaggccagacttcgccgggccggggagtccgtccgggaggcagaggcggcgcgcacgccaggcggtctgtcaagcccccgacccgactccggccgaggtgacgacgacttccgaggccacccacgacgaggccgcgggcgcgccgatcgggcccgacccctcgggcgacgcttgggacaagccagctccgggggacgcccccgagtccggcacgtcgatcagcgggccgagccgcgcggcacccacaccgaggcggctctcccctctggcttccgctgccccaccgagcgcggagcccctcctggcagccttggccgccacgaacaccacggtgttggacgggttaagtgcccaaatggaggtcctacaagcagagcgggcggaacttgacgcggcgtgggcgcgcgtcnaagaggggcggcgctcggtggaggccatggtggaggcggggccgaaggcacaccgtcggcacgccttagact

SEQ ID NO: 16994 - DNA, 695 bp, Oryza sativa
  unsure (1)..(695): unsure at all n locations
aattggaatcaacatgctcaaggggaatgtgtgacttggcttgcttcttcacttggatcttctgaactcttttcctcgcgactgcgaacttccgaaacgacgtattctacacgctggcacgcaaaacgagaaaaaactcaaataaaaaccaaggaaacaatacataaaaagtaaacaaacatgtagagctcaattttagatgaattttgcaagttgaacggctcaatttggagttcgaatgaattagatatgaattttagcagttttgagccatttaaatgaatttctagaattaaatacgatttatgacgcaattattaattatttttccaaaggaaaaaaggttgctgacgtcatcaagggggaagggcggtgccggcaagcgggccccaccggtcagcggcacaagggcgtcggtccatcgtggaccgggaccaccgaggcggtccaccgccggtccacgggaaccgacggcccagattggcccgagccgatcggatggccacgggcggtgctgcttgggcatggcatggctcaaagccggccgatcgagtgatggcaatgggtggcgcgcggtggancaaccaacggcggcgcacggcacggnggaggccagcgaagggggaaggaggaaaaaagggaggggagtgctcaccgagcgacacngcggagcatgcngnccgcgcgaggaacgg

SEQ ID NO: 16995 - DNA, 719 bp, Oryza sativa
  unsure (1)..(719): unsure at all n locations
ctgcggggtgatgaacacgatgactatacgccgaattcgagctcggtacccggcgcacacgaaagaggacgagggcttagaaagacacacgcgccccctacctggcgcgccagatgacggagcgtggggctcctcaccgggagaccgcgcaggcccccctttgccggttcggccgggggcgctaagtgaggttcttcaccctcgatctgtggaatgttcgcgagagagcaaatgcacaagacacgggcgatgtagacaggttcgggccgctgagaagcgtaataccctactcctgtgttctggtggatctgtgtgtgaagaagttacagagagccggagagcaagagagttcaggctctagaacccctcttcccctttctctcctctacgagctcaggtattcccagagtcgtctgagagtccccctctctcagagttcccgtgggcaaggtcctccttttatatctcaaggggataccacatgcaccacttctacctactcttcttttgggtggggacccaccctatcttgaccaaaacttggctcgcgccttctgctggaaagctaatcacagcttgtccttgagtgagggccagngccgtnactcgccttcacttcgncggaagcagatgcaacgtgggagcacggttgtctgtcgatgacgtgaccgtgttagaccagtcacaaaccggcatttttgttcaccacgcgtcagttt

SEQ ID NO: 16996 - DNA, 813 bp, Oryza sativa
  unsure (1)..(813): unsure at all n locations
cgcggnattgtagatccgatttttatanggcgaattcgagctcggtaccccgcaggtctctaacagatagcacgccagctactcggcccgttgagttgccgatgacgccgccaccctggcttcctcaatctcgcggcccacgccgcgagctccagcctggaggatgcgctccatctcagcttggagctccccccaggtgagggcatcaataggcgggccccgagcgggcacaagaccgccagctggtccactcggtgtcgcctcccgatccctagttgtgaccacgacatccgtcgaggtcgccacaggagacgcgctggaggttgcgccggacccgtcttgcgtcgccttcgcccgcgccgccctgtaaaggatttccgcgatttcatgaagacaggcaagcaagacttccaaaacatctacttacttctcgccaagcgtcaccagcctttgccttcgctaggacgggggagacgcatccgaggcctaagcaagatggcacgatatgaggtcaaaatattggaacgttgctgccactcatcgtagtagcagcagcagcagcaatgtcggatgcctccttggcaacgccctgctttaacgacgctgccgcctggtggtccgcgagcggcccgatgacatccgtcagagggagagcctgcatacatgaagtcacaatgcgatcccaggaaagcagaagtaaaggagtcgtcaaatacactcacgttgatcgcagccatgcaattggctttccccttcttgcaaatggggacggggatgttgctcgccgttgtaggaccgctgatcatcacttga

SEQ ID NO: 16997 - DNA, 3519 bp, Oryza sativa
  unsure (1)..(3519): unsure at all n locations
cagatcttacatggtcgcttgtctctacatgatccgcaaggccttattcgctctgggcgtacccagccgaagttcccttaggatcctcagaggccttgtcaagacggcgtaaagggacatgaggataggtttcaacgctaggtgtcgtcgtggtaagggatcgtcgggaaagaacactttgatcgtagtctgtacctgaaatcaactttattgaagtcgtaagatgtcttacaagtatggatactattgatttatacataaaatttacgtaattgatcaatgttccaggaatttgctaactcgcgaccatcgtcgtctgcaatcttgaatgcaactggccgcaagacttgcgtgatcgtgtatggtccctcccacttgngtgagagctagttacgccctgcttggctttgaacccatcggaggacgtaatcgccgatcgaaagcgtgcgtgctctgatgcgcttctcgtggtatcggcgaatggcctgttggtagcttgctgctctgacggtaactctttctcgatgctcctcgagtagattcacaatcgncgctttgctgctccctctggatcctcgcccaaggacttcctgcactcgtggcgctctgatgtcgtagctcagtggggagcatggcttctgagctatacatgaggaagaagggtgtgtccttgttggacgttgtcggtgtggtacgcacaacccatagtacagaggggagttcttcaacccacttcttgtcatgtgacatcaatctgtcgtagacatgggtcttgattccttggagtactatgccgtttgccctctcgacctatccattgctctgagcgtgaggaaccgaggcaaagcagatcttgactcccaatctgatgcagtaatcctggaagtcagcaatgatgaactgggagccgttgtctgttatgatgcggtggggcaatctatatctgcagaatatccctttaataaacttaatggcgttgtcggccttgatttccccagtgggcgtcgcttcaatccacttggtgaaccgccacgaatagaaacatgtaggcgccctgtcctcgtgggaatggtccgagtatgtcgagcccccagcacgagaacgaccaagtaagggggatagtctggagcgcttgcgcttgtagccttgtgtgtttgctgtggaattgacaggcttcacaccggttaaccatgtcgcaaacgtctttgagcgcagttggccagaaaacctttgtcaaaaagcttttctgaccaaagtgcgaccggcggcgagtgacccacagatcccttcgtgtatgtcgaggagtagatgtttgccgtcatcgagcgagatgcatttgagaagtaccccgtttggtgccttcttgtatagatcgttgccgatcatacagtaaatcttggcttgtcgggttattttctcggcttttgcatcatcttcgggcaactcgtcactactcaggaaattgatgagtggggtctgccagtcatatgtggtctcgatgtcggcaacggcgcgttctgcctctgtagcccccgagccgatgtcggggacgactgtgctatcttcgccgtttgtggttttgtcaggatgtccaggaaggtgccaggttcgagtggctctcgtctggatgcacgccgtgctaggtcgtctggttcgatgttgtccttgcgatatacgtgtcggacttcgatcccgtcaaaccttttctcctgcttcctgacttctgtgaggtacttggatagctcggggctagagcacttgtagtctttgtgcacctggtttgcgactagttcggaatctcctttcacgattagtcacttgactcctagtgcggctgctgctcttatctccgcgagtagaccttcgtactcgactgtgttgttggttgccctgaagttgaggtgaattgcatgcttgaactggtctcccgaaggtgatgtcaagatgaaccttgcccctgctccttggctgttgagtgcgccgtcgaacgccattgtccatgtttcgctgtcggtttgactgtccggcctgttttcaggcataatccaatcagctatgaaatcggcgaggacctgggactngatggctgttccgggcacaaagtggacatcaaactggcttagctcgattacccatttcgcgatgcggccgacaacgtctttgtttctcacgacttcaccaagagggaaggaggaaacaactgtgaccctgtgggcttggaagtagtggcgtacctttcttgatttcatgattactgggtaaagcagcttttggatctgggggtatcttgtctttgcgtcatggagagcttcgctgacgtaataaactggtctttgcaccttctctctcgacaacaatgacggtactcacagaatatggtgtggcggcaatatagaggaataattcttcattaggttggggagcaacaagtacaggaggatttgacaggtagcgtttgagtgcgatgaacgcatcttcgacttcctgtgtccatacaaatttgtcttgtttcttcaacagagtgaagaagggttgtccttgttctcccatcctagcaatgaatctgctcagtgccgccatgcatccagttagcttctggatttccttgagtcttgtgggcgacttcatgttctcgattgccttgatcttctcgggatttgcctagatccctcttccagaaacgaggaacccgagcaacttgcccgatggtactccgaacgtgcacttctctggattgagcatgaggcgatatcatcagaggttgtcgaacgtttctcggaaatcgtcaatcaatgagtcgcttgtcttggtcttgacaacaatgtcgtcgacataggcctcgacattgttcccaagttgatcgttaagtgccccttggaccgtgcgttgaaaagtatttcctgcggttatgagtccaaatggcatcttgacatagcagaatacaccgaatggcatgatgaatgttgtcttctcctcgtcctctttcgccatgctaatttggtggtagctagagtaggcgtcaagaaagcttaacaactcacaacccagctgtgagtctaccaattggtctattcgaggaagagggaagtgatccttgggacacgcctttgtgaggtcggtgaagtcgacacacatccttcacttcccgttgccttgcgcaccatgactggatgggctagccactctggatggagaacctctctgatgaagccagctttgagaagcttgtcgagctcttctcgtatggcgtgtttccgatctggtgcaaatctccgcagtttttgttttactggcttggcatcgggtcgcaccatgagtttgtgctcaatcacctccctgggtaccccgggcatgtcgcatggctgccaagcgaacacgtctgcattgtcgcagaggaaggtgatgagcgcgagttcctatttctcgttcggtgatgccctgatcttgacggtcttgtcggggttggcgctggagagtggaacgatcttgattgcgtcgtttggcttcggcgtcttgttt

SEQ ID NO: 16998 - DNA, 1601 bp, Oryza sativa
  unsure (1)..(1601): unsure at all n locations
atcgtcttgaaatgacccagtctgnnnggagtcttcctctgagaatcgaatcttctgtcgnnaccacttcatcttgggcgcagccccctgccatgtcgaacaaacttcgcgctccactttcttgtactctcgcttcgaagagtacgccatagaacctcggaagatgtgcgagacatggagatcggaatctgggtatgctgagtccgagtcctgagtggctgcttccgtggccttctcgactacacgtacttgcttgcccttccccaatgcgagttgctttgtgagtgattttttgaaaacgaaacaagcttctaaggagtgcttgtccgatttgtgtatagggcatcatattttcttcatgtcgtcgccttatgggtctgggtgtttggccaggtccacgtattctgctgcgaggacttccgtttgagctttctttttcccactcttgcgactcttcttcttgcttgattccgatgcgtctttggctggtttcttctcttcggcttgtcgttcttgcgtctcagtgtgtcgtccatgtgagcgcatcgatcgacaatctcgaatagttttcgagcagttgttatccgtcttgtcgccaactcctgggtggtgtagtgatctctgacaccagtcttgaaagcgcggatcacggaggcatcggtgatctcggggatcgtatttctgcactcattaaagcgccaaacgtagtccctcaatgattcgcccggattctgtgtcaacgcgtgtaggtcgtcttcgatcgcgtggcgtttgtatgttccttggaagttagcgacgaactgctgccacagatctgcccatgaagaaatccagtatggtgggaggtggactagccatgaatgtgcagatcctttcaacgtcgccggcaaataatttgccaatgcgttgtcgtctgctccggcagcgtagaatactgcggaatagacctgaagaactcctttagggtcggtgctcccatcgtacttctctattgctcccggtcgaaatctctcaggccatcggacatctcgtagagcacgactgaaagctctacacccgccaccgggggcggcaggttgtcggcgatcgtatgtcctccgtggatgcatgtctaatgacgaggatgatgacgatgatgatgagtcacttggttccggggtacgattacgaggatgacttccgggttctcgagaatcttgtcgtcgcccaccgttgttgtcccggcgccgatctttgtcgtcgtcatcgttatggcgacgtcctcgaccagtatcgcccggcatccgctgttcgcgatcatggcggttatggcggttatcatggtcttggttctcgctcgggtgtcctcctcactcttcgttctctcgacgtcgcgaagagacgcgatgccgggaacggtttttgttctcacgcgcgtcatgcttctcggcggacattcaaatggtcatggagatcactggtgccgcgaggtggaggagtggcttgacgaggtgatgcccgttgcccgggtagttttccattggcaccgccagttggcggttgctctggcagtactccggtggcggcctcttcgaacgcgttactgaggttagccactaatt

SEQ ID NO: 16999 - DNA, 718 bp, Oryza sativa
  unsure (1)..(718): unsure at all n locations
ggtgattgaaatgtatgcagctgccttaggtcgactctagaggatccccgtggcgcacacgtggcaatccagtcagcgttttttaataaaaaattgtggggaggcgggtatatatagctaggatagatcaggccatgcgagcaaaggttagatactcagaagcgttagcttgccaccaatttaggatgtccgtttcaaaaaaaaaaattaggatgtcaaaacatcacttcgagggcttatacatatatccatcatactcagaacatatttcagccgtcatctgaatgtcatggttaagatgttgatcccaatcagccaaccggtcacttgtagatactccaatatcaacatcagcactgcctgttagatccgtagtgaagttgatattagcactcactgaaagcctctcgaaaagcattcttgacattgacaatcatagactcggtatcattaccaaatgcaggcctgaaacggaactcgagaacttaagcttaaatatagggtccacgataacaggtagagatagtgccaaccaagaaatcttcaaatacttctcaaatttcttcttcctggacttgatcatcttagatatttcaattgtcacttgagaagcttngtaacggcntgtaaatataccaaatttacgccggcgtcaatccagcataaatctaaaatataaaacatgccatatagtggctggggttatttctaacaaatt

SEQ ID NO: 17000 - DNA, 745 bp, Oryza sativa
ttattaaacttgtcatttacatccccaaactgtgatgtaagcaatccattgagtgtccaagcaacagggcacatccaatagtaccacctccaccatactggaattctctgtagtaaacggagccatattagaaaaattagtggatgtgagataatttagccacgaacaatgtacaattagatacttgagaaaagctggtatacgtacaatccgtggtattagaaatcctgagaaaaggttccatatgttatagaatgccgtggaaacaacagcagacatggcattgtttggagtcaaacccgccatcatcatgccataaaatgtgaagtatgatagtgtgaagaacatgaagaagaggtaccaaagaaatttggcacatgtccactcataccctaccatggcatacactagcacccaatatattatggtctgaagaaaaatgtatggaaattcaattgcaacctgcaatgaaactagatgtcaagaaggctttttgtttcaccattcctttccacttactgagagccttggttttgtataaaaaaataatagtatgttaaaacattttatcaagactcgcatgcatatatttacaaaatgattatgatgccaacaaactttacctgtcccaaggcgtccgacaaagcagagtacatgtgtgatgctctttccctgtaaaagatcgtgcgcctcaccaaagatagctggctgaacagaactagagttctgcacccccattgccata

SEQ ID NO: 17001 - DNA, 17602 bp, Oryza sativa
  unsure (1)..(17602): unsure at all n locations
tgttctcgtcgcacacggtggtatactggccaatgtatatgctagggcgcttgtggcctgtgttggtatttcttagcgatattactaggaataaaatttcaagcaatgacgtagaaatactcctgatatattatagttacagagttcatccgcaagcacactaatatacctttgtaacattttacccgagagtattccagcggtattgtatttatttaatcccgtcggaagatcatagtagagagaaccagactaataatttatatgttacttataataattatagtctaagtaggggttacgataaattaaatgatagagtgatatacaagtagagaaatactcattctcatactaaaatatctaagctaagtggaaagaaaatagaaggagaatcttttcctatacttctagtatacatagtatacgtacattctagttatctgattaactagtttaataccctctatccgatgccctcctggtacatcgagaagccatccctgactgtcgagttccttacgacagcctatcattaccatacaaccggggctaaatacggaggactaccatcctcagtaaattaacttaggactatatacacgcgcggaggaatatccgtactgaggtgtcactatcagtggcccacctctcatccgcagcatataaccccaaataatgatatcccgtaatctagacaccatgcctaaactaccagatactactctaatatcatcgtcatatcatagagtaattgcataagcaaacattgcccgtaccgatgcatctcccagataagctagcagtataatcagtataacatgaacataatgtaaagctggcattcatatactcggaaagtattcaataccataaatgtataaagaagagtattctaataaatgtacaaagcttacaaaagaggaaaatagagctactagagccatacctgaactcttccgaaggctaccggacttcgatttctactctatttctactccactagcttaagaacactaaactaaacttgacagaatatgagagagctttgcttgaggtgtgtgagtgaagtgagaagaggacctccttaaataggctgccaatgacggttgtggcatttggaatggtcggaattgccctccaaccgtcattggggagtgatccacaccgtccagaagaaatcctgcatccaacggtgctaggggggttcggccgaactaggggccggcccaaccagcccaggttttggctggtggcatcctctgttgcttctcttcgcagacttgttaattttggctcaattcatcttgtcaattatgagttttttgcctattcgtgcataagtctgattctcgacatcatccgattgatttatcgtctgatttgatgtcgattctactccactttatggttattccctgcaaaaggttagtgaaccaactactagtggaatattattattctaacgtgaatatgcattgcaagcataactagttctcctctattttggtaatattgatggtcgaaactgatcgctaatgaccgtcaacaaaaccccctaagcttgaacctttggttgtcccgtgtaaaggacgaaaggaaacaaagacttagttgttgatcaagagttgctactatgctgtatatctcaaaggtacaggtgcaagatatatgtactctatctcaaattaaataatctttggcacggtggcttacccttatccctgattcccacgagatattgcttctccttgccttgaacaattgaaaaacagaacaacaattagagcatgaatcacccaatctttattcaacttttattccagaagttttcaaatgattttgtaaaagaaaagccaagttcctcaaatgattcactcattctctctaagtgtatcaatatgaattcctcaccatttttgcctttttgattcctactctaaggtttgatatgtggagctcggtagggattaaacatacttgcattcatatttattactaagtaaaaaactcagactaaaatagataactaaacatactcaagataaagatcgtgcaaagtgtgtgatatatggtggaaatgtaatatgaagaaaaataaagaaaatgcttctcttttgtgcttacttccttctcccaaaaatccttcttttattaataaggagagggcacagctatattctctctttttttttctttctttcaatatcatgctcatgcttgagagagcataactttatttttctttcataaccatgcctttccctcccttcttctttctttttttttcagaaaggattttctttttaaggagaagaaagcacataaaagcatggagaatttattttggtggtagtatacaaatggaatggaatggataattgctaactctcagtgtaggagtttagcatttgcatatatgtgggtgtatgatcttgatcatagagcatgagaagtatctacacaagtcacaagaatttgataaagttcgatggaatagcaagtaaccaaaatttatatggtttaatcaatgaagcatatttttggctctagtaggaatttatatcaaatgaggaactttcaaatttatcatttcgaaaaacaaagcatccggaattcaagtcaaactaggactaggatcatagcaactcttatttactatcacatatctcacaacaacttagactcagattagcaagtgcagctcatttacctcaggttcctagataattgttggctacttatatttaatttttgagagagcacttacctatgaacccatatatgagagatataaaacaaagcaactattcatcatttcaacaaagagaactagtttgtcttacctagcatgacaaaaccttacctatctttttggtattttctattttgcaagtttttatgttgttttcaggtttataggatgcaattagaaagcaaacatgcaattggaaagggaaatattcaatatgatacaagttacctcagtggggggagagatgtttccccacaagcttggctttcgctcagggtccttggtaaggattgaacccctgaaagcggaagtatgtttgaaggtcatcgggcttttgctgcatcaggttgttgatgttggtgaactgagcatcagtagtttgttgccattcttgcgcttgtgctatgtgttcctcgaggttgtattggacctctcccatatgcatatcaagggtattcattctccgggtgatttcacccaagtcccaacgagaggaacttgagcgccattcacctggagatagaggcataccacttgatctgggggttgattgctcatgtccccccactgtatgtcatgaggcacatgccgtaggtcctcattggcacttgcccattttgagactccgatgctgtggcgtggagcttggctccatccggttacatccccagtcagctcccaacctgcctcatacgtttgcacgggtgttgaggatgatgaaccttctcgttcattccttgccatgttgcatatctccctgtatgttcgacctacacaagattcttctatggtctgcaagggaatggttagttcatggcagttgtagaaatgataccccacattaggcaacgggaattcatttgtacaatcgggaaaaaagtaagtcaaagatccatctactccatgtttaagaatatgcctttgcactagataattctcatcaatacagggacgagcggctgagatataagcaatctggtcattgacgtcccctagtcccttggctatccgagtaatcaaagaactgcactcaacaggagcagaaaatcttatactttctaaccattgccttatcatacatttcacagtagcaactttgatcttcctaaccatggcaaacatgataattaattcatccccctaatgggtctaagatcacttctaggaaacaaagtcatagcaatccatttgtgcataagcctaagtgtaggattatgaatatcattcgtcctaggtttcttgcaaattggagaaccataaatatcttcccaaaacctatttttctcaaacgcagaaattcttttctgaagatcgattttacaggaatcgtgaaaatcaagaagtatacttaatccttccatgaaagtgtgtattccttatggaaaaagcgaaaggaaattctatcttctatttctttcaaagtgcacatgaatcgcaaagtaagcgaacaataaccaggctcatctaccacagcaaatctctgccaaccaacaactttccagatagcacgaaagttagtatccatacctatcttttccaatagctccagagagtattctcgcgtgtgagtatactcccggtctcttggcatgtagtaggcttgtctttcctgatcgtcgacaaggtcgaagtcggcatcgctcaagagacgttgcagaatgtcggcatcctccatcgagacatcggttgatgaacgagcactagactcatcatgatgacttgatgaagggctggatcccttgcacagacgaggcaatcgcttcattctgcataatgaagcaagaacagactaactcggcgggggttagtatagcaagaatttcacccgccggttagttttcaccaaagcaacttttatgtatgcgactaagtatttgaatttgagggaaactatcaaagcttgaatgaatttacgagcaaagtttgaagagggaatgaaaatgaattggaatggggtgcattcccctctcacagctggccggcttatatagggcagccacaacggtcaaaaatgacatgtgggccccttagccgttaccctgtcaaaattggtaggtagccgttgcctggctggttcggccgaacctctggtgggcccaaccggccccacttttggccattggaatccaacggttagtggggtcgtggcatagtgaatttttgttgaaaattttattttggtttgctctgaaaaattcatttgaaagaatttcttcaaaattcaaaatcctaaatgcaagttttgaaattcaaacatgtgttgatgcaaaaattcaaattgttgaaaataaatatgcgaattcataccaatttacctgttggcgaaggtcgcgtcattttgggtccgacgtgcaagaccgtacctcctttcagtttagttcacggattttccacccgtctccggaggggatggagcgggtgtctttggcttttccttccacaccttctttggttttggtgcagaagacggcttcttttgagctggctgctcttgctttttggccggtgtactgggttttaccggcgtcttctaataacggttcctgggaaacgctgtttcattttccagcaaattctgcatgaacttcaccaggctgtccgtctcgggtggctccacttcgacctcttggatgttttgcaggtttggcccatacttgattctgacactcaaacttttcttccttcccgttaatatggaaacggatactccccgttcccacgtcaatgttggctcctacggtgctaaggaacggatgccccaagatgtcgcgtccaggtagtcacgggacatgggagtgagtccattatagatgttttacaagataagccagtcgtccatcccatgatgaggacaggcggccacatacttctgaagtcgttcccacgcctcaggaatggactcatcccccgtctgctggaaacacgatattctcccacgaagggcgctggttttgcccatcgggaataacttcgataggaatgccgtagaacatttatcccaggtgtagatcattgcacggttggcatagaaccacagcttcgctttcccaagaagggaaaacggaaacagccacagcctgacggcgtttggactgacacccttcatggtgtatgtgctgcaaatctccaggaactgttgtaagtgagcattggcatcctcattaggtttgtcgcagaacaggctagcctgcgccatcgtgatgaggctggacttcagatcgaaatccacttctcccaggttgatctgcggcccaatggccacgttgtcagctgagggagcaacaaattcatggagggtcttgtgactcttgtcagccatattctggaaggtcggtggcgctggtatggctggtttctttgtcgggagagttttctgcggagcgacgactcgcggcttgacgctccggaaaaaaagcttctggattttctttaaagttttccggcaagttgaaaccagtcatgcaataccgtgtttccacaacaatagtgaaaacaaccaaggttagcctgcaaaggatagtgattatgtagaggtaaatataaagtattagttctggtaatctctattataaatcttccccagcaacggcgccagaaatgattgttggtatttcttagcgacattactaggaatataattcccagcaatggcgcagaaatactcctggtatattatggttacagagttcatccgcaagcacacggatataccattgtagcatttcaccagatagtattgcaagggtatcgtatttatttaatcccgtgggaagatcatagtgagagaaccggactaataatttagatgttacttgtaataataatagtctaagcaggagttaagataaatcaaagggtagagtgacacacaagcggggaactactcattctcatactaaaatatctaagctaagtggaaagaaaatagaaagagaatcgattcttatacttctagtatgcatagtgtacacacattctagttatataattaagtaactaataccctctatccgatgccctcttgttacttcgagaagccacccctgactgccgagttccttacgacagcccgtcgtgaccatacaaccggggctaaatacggaggagtatcgtccccaagaatttaacttaggactatatacatgcgcggaggaatacccgtactgagctttcaccatcagtggcccacctctcatccgcagcatataaccccaaataatgatatcccgtaatctagacaccacgcctaagctaccagatactactctaatatcatcgtcatgacatagagtaattgcataagcaaactttatacccgtaccaatgcatctcccagataagctagcagtataatcagtataacatgaacaaatgtaaagttggcattcatatactcagaaagtatttcaataccataaatgtataaggacgagtatattctaataaaagtacaaagtttacaaaagaggaaaggagtgttactagagccatacccgaactcttccgaaggcatccggactccgatttctactctattcctactccactagcttaagaacactaagctaaacttgagagaatatgagagagctttgcttgaggtgtgtgaatgaattaagaagaggaggtccttaaataggctgccaatgacggttgtggcagttggaatggtcgatattgccctccaaccatcattggggagtgatccacgccgtctagaagaaaccctgcatccaacgttgccaagggggttcggccgaaccaggggccggcccaaccagcccggtttttggctagcagcctcctctgttgcttctcttcgcagacttgtgaattttgacccaattcatcatgtcaattttgagttcttggcccattcatgcataagtctgattctcgacatcgtccgattgatttatcgactgattggatgttgattctcctccactttatggttattctctgcaaaaggttagtgaaccaaatactagtggaatattattattctaacgtgaatatgcattgcaagcataactagttctcctctattttggtaatattgatggtcgaaactgatcgcaaacgaccgtcaacagcctgtttgcacgacggcagggcaggagcaaagccactgagagcaccaaccacctcacctgtcctcccaaagctgaacatatacatacacatgatttgatatttttttcttccccgttgcaatgcacgggccattttccagtcttttttagaaaataaattctgcttccacccaccgttttcattcgttcgtctccccaattaagtggatcactgtcgtccacgtatcactactaaaaaccgatttttgtggacacactccctattttatacaagcggaccaaaagagcgtccacatgcaaaaagatttgcatgctatttggttatgagttatgacccacatgaaaaaaaaatcaaatttcacatacagacctcttacgaaacccgcatggagaaagaactttctgggcctcctcgttttcccttttctttttaaccgtccccccgactcccttctcctctacttatatctcgctccctcacttagattttcttcccctctactcctcccccctatgcctcctctacttctccctccttcagatccacaaagggagccgatggcggggtagcgatggcggtccggtggatgtggcaacgacagtagtgggcgggagggcgaagctcgaggccagtggatctggcggcaccgccctcgagagggtcggatccgtagcactcggtcccgctatagctcgagggcggtagatctagtggctctgcccttgggaggggcggatctgctgccctacgcccgggggtttatggcgaggacaacagccttgagctcgagtggatgagagtgggagctagggttttgggatttcggtttcttttggaaatttttttgttattttttcttttcgcatgtgggaggtttaactgaccgcccgcgaaaatcatttttttgcatgagggagcgttgcccgcatgtaaaaactctgattttcacaaatagttatgtgcatgcggacgaagtgcctgtctgcgaaaatacattttggtagtatggaaaaagttttctgtagtagtgtatacagccatgtccgatacaattccatcctctttctcatcactcacgacctcattcgtacgtagactaagaacaaaccaaagtcacaatcgatctgcccagattgacacggctgcacatatgagtatgtcgagtaggaggagaagctgctcatggacgggttccctaaccaatctctgctctgcacgcatgtctcgcaagaagccaagcaatggccgcacatcgcggtatcacctcacaccgtcaagcattcaccccgacaaacatcgagaatctccctttgcttcacatcatgtaggtaagttctttttgcacatcgacgtggcacggccgtgagaattaacgcaaagcgtggatgaataagtgcttattttctctgtagagtatgatgggtttcggaagtttgtgtctaggttgaaccgactatttaagatgatttcccgacgaactttaaagtatgattgcctaaaatattttgaagagcagaagctagagctacaagatatgtccagaaactgtacttctaatgtttttgtgcagaaactgtacttctaatgtttctctaacaatggctatgtggacctcaaaccagactagaggatatatatgtataacgtggcactttattgatgctgattggaaggtaaaaaaaagatttttaaggttctcacacttaaaaacattgcacatggatgttgttatattcaatacaatcctagagaccatataagattgtattgtgaagataaattgttttcatcactttggataatgctaacaccaatagtgcaatgtcgaagttattgaaagctaacgttttgcaaaagggtctactgcatgggcaagggaagctattacattaacattgcatgtcacatgttttgaatttaatactctattgtaatcaacatccatgggagcattaagtatattaaaggataacaagcttggattggaaggtaaatttttaggaaattgtggcacaagttattgtaataataaaaaaaaacgttgttattctgatgtgcgtactaggtggaacaccacctgtttgatgattcaaactgcgccatttagacaagctttggagtcctcagacttgcaagataagaccacacatacaaatatactttagtttgctttgttaaaaaacagttgtagagtatggaacattgcaagtgttgtatgtgacaacaaatgttattttaggtcagctatatggtacctcaaatcttaattttcataagatttgggatgtgaagattctagaaaagtaagtttcagctttgttggtatatcttacgttcataaataaaatacgcaagcgcacggagatactgctgtagtacttcacgcaaaagtattccaaggtttcgaattttcacagggaacatgtgtgtttagctattctttaggtttatgtaaggacacaaatcaaatatagacaatagtgtagagatgattttctaatatggtacatagtcatttagaaatcttaactttaatcctatcgctatgcttcaggtactggcttctaccagaacgcgctctactccctacctagacagggaggactacgatgatctcgagggctgtcaacacctctacaccaaactgtaacatactacgagatacgcaacaagtacaggtaattaataacctagacaccacatctatgattgtaattactactttaatatttataactcactaaagtaatcactatctcttaatgagcaatgatcagccaagccaaataggaactaaataaaaagtatacacacaaaataaatctcaattacttaaataaaataaagtaattgcttggctacaaaaggaaagtgggagaagaacaccgacactccgggacttctcgtcttctcttattcctcactctctccttaatctaagtgtacataagaatacaaagagactcttataatttagctaagtcttggtgtgtgttggacgagaggaagaggggtatttataagggaggttgcttggaagggtagtgaagtgccatggaatccaaagggtatcttcattctcctcttgccaagtgtccttcttgatgatggttggagcgcaggaaacaaccacaaccttgtcattggaagttagtaattactgacctagagagtttctggaccagctgggctggtcctgggtcggccgacccctaaccggctcgcttggccctaggccttctcatggatcttgacctatgggtcccgacttgtattttcctgaatttattgttggatttgtaggctcaagactccatgggcttggatatggaattgataattccctccttagtgtatatttttttctcaactctgatagtttgccacctgtatacaaatatacatcagcactcgtggaatttgttagaaataaacccaaccactatattggatgttttatatttttagatttatgctggtattgacggcggcgtaaatttggtatatttaacaaccgttaacaagcttctcaagtgaacactgaaatatctaagatgatcaagtccaggaagaagaaatttgagaagtatttgaagatttcttggttggcactatctctacctgttatcgtggaccctatatttaagcttaagttctcgagttccgtttcaggcctgcatttggtaatgataccgagtctatgattgtcaatgtcaagaatgcttttcgagaggctttcagtgagtgctaatatcaacttcactacggatctaacaggcagtgctgatgttgatattggagtatctacaagtgaccggttggctgattgggatcaacatcttaaccatgacattcagatgacggctgaaatatgttctgagtatgatggatatatgtataagccctcgaagtgatgttttgacatcctaatttttttttttgaaacggacatcctaaattggtggcaagctaacgcttctgagtatctaacctttgctcgcatggcctgatctatcctagctatatatacccgcctccgccgttccgtctctgaatcaaccttcagagtataggaaagagagttatatcgaattatcaaagctggttaactcccaagacagctgaagcgatggtgtgcttgctatattggataagaggatctggcacgtattctttcagccattttttgttaaattggtcctaacaacaacatctatacatcattgttctgcttgtaggttcatcaaacttgagcacatcatcaatttatgattttcccgaggaagatgagttaatagatcaagtaacatgttgcttctcaattattatcattttggtatagttcaaagatagatccataaattaactacatcgagccaaaagccaaaagtgactggcagtaatgctccgtgcaactatgtgcctttgttgcctcttctgtgtgacttcggtagttgaatggaagatgtagctcattaagataaatagattcaagtttgtttttgctgttgtatccaaacaatctgattggtaattgagtttttagggatttgcattcatactcagttgcatggtggatttttctgctacaatcgagcagggagctgtaagtaatctcatacagatgtctcattgaataacaagtcttttgtaccagaaaaaaaaatgttttgtcatgtacattatactcaatctctgtgatatattattcaccatgttccagaaaaaaatgttgtgtatttatggattgaaacttgagatttctttgttgtccatggtctaaattgtaccatgttataattcttgtgcttctgagttattctggtatttttaagtggttggcatagtggaaagcgttgtagttgcacttgtattttcatccttttcaattactttttagcttgatatatataccactaatatgttctattgaattattttatacatgtgcagtgaaaaatcttgatggaagcagtggtgcatgtgtggtgtaatttttaaaagtctagttgatgacccaatgtttctgaaaatcagtgctattaaaaaagtctaatttttgacgctgttgctcttctccttggcactgtcaagactggtgtattttttgaagctatattgtaatttatcatgtgctagcacttatgtatcaggtggcaaagaaaaataattttagtgtgttgctgttaacaccagacaccagtagtaatatattattaatttttgtaaaagaaagatacaatattaaatgtttgtgtatgataaaatattaaatgtttagggtttaaaataatcctagcacttatgattctttcctattagcaacatactatcatataatctgaacaaccatatcgtgtcttaccatttttatacttcaaaacccactactacaaaaataattattatggatgagacattatttaggttgcaagcggatcataactggtcacgtctacaaaaatcgacctccatttttgcatacggctgcttaagaggactgcacgtaaaaatcaattttcgcacgtagacttcttaagagtacatatgcaaaagtaattaagtccgcagaactcttaagaggccatacgcgaaaatatattttcgcaggcgtgcctcttaaggatccgcctaagtctgacttacctcctcatttccctcccgacactttaaatttttttaatccttatccactcatctctctctcaccttttctcctcattatttcctctccacttcgtcacctcctttcctctcctctctcaccttctgtggacgagacaggcaatgagcggcagggctcaggccaccaccaccgggcccgtgacggcctgatccgccaacgttgggcctgtgatgactagatccgcaggcggcgggcggcgcaaccgatggcaggctcccccgcattgaaggaagcgacggcggttccattttctttagataatggaatataattccggcctttgctcaagagttacagccaattattacataaattcacatacaagctttcacacactaaaaggtccacaaaaagcttacataattgaaatgaacacaaactgagaagcaccaacacaagacaaaagatccacgattattaattgaatcatattagtgaacctccatccgaaattggcgaagatttgcatgaccgtcgactcaagtttacgacatacatcatttagtagtttgatgtcttcatcacacctttttagctgggcctaacattggagccaatatgctaccctgaaaattacctgcatataatattttgatggtgatttatcaagaactatatcattcctacaaagccatagagctcaacataatgcagatgcttctacaaggataagtttcttgttttttttttatcaaaacctacaatccaattcctaaagatataagatgtactgtgtggagggtataactcaaaagtaatttgtaatgctctccaaagaaatatggaataatggttatccaagaaaagatgatgaattgtctcatttttcatgcaaaaacaacacctcttgctatcatttcagttcctcctagtcaagttgtccttcgttaacactacatctttaagtaggtaccactcgaaaacttacaaagcacaattcacaggcccgatccacggctactaacttcaaccctatcgtttggaatcccatggacacaaagaaagtacaagctatagtatggacggcaaatcgactagcaataacagtacctattggcctaacggtcatgcaacttataaattgagagagccgattgcacgtgttaattcaggtaccagtcatgacttacaagaggcggacgacttttgagagaaggtggacggggcagacgagatggaaggacagcagggcattatattcggaaaataagtcaaaacacctacattatacttacctataacaaaagaaaaaactaacatatccatataaatttatcaaaccgtccgacttaattatgttacagtactaccgtactaacattagtagtgaaaatgtgccgttaaagcactcttcgatcacgaaagctagaggtgtcagaacgtccctgatacgtacaaacgcacggtcactttggttatttcagaagaaaaaagaaaattaagggaggaaaatttcgatcagtgacgttggggattagtgtgtgtacgctgctgctgcgcaaatacatatttacggcttaacgatgacactcgtacgcgcgtacgctacgtgcttaatttatactccttcattccctaaatatttgacgccgttgatttttttaaacatgtttgaccgttcgtcttattcaaaattttttgtgaaatatgtaaaactatatgtatatataaaagtatatttaacaataaatcaaatgataggaaaagaattaataattacttaaatatttttaataaaacgaacggtcaaacatatttaaaaaagtcaacggcgttaaatattttagggtcaaatattttaggatgaagggactagttcctcgcgtccggtccatcgggacgagtttgtctaggcacatatatattcacctgacaataatgacagtataataagtattttcaaaggctagccggcctacttcctagcctttgaaaacatgaaatgcaatgatactgcaactagcggaaagctgtttttatccgtagagatggtattcctctcgtttgtttaaaaaaatataattataaaaaattttaaaaaaccgacaacatgtatgcaacgtatatatatcacttcatcctatggcgaaactcaacataggaaataagataaaagaaagacaaattaacgtatgaatattgaaaagtacttgtactattcaaacctcaatgagtcattttcttttctctcggtgtcatttttttttgttaaaattctttctacagcgttttgcattgaattggaaagaatatgaggggatagcctatcgggcgattagaatccgtttctccgcaggtttggttcaattcgttgtctgaaatgcacttttcaaacatcgggcatagccattttgcccatttccatgctttagcatccagcttattctttactgctcacaccattgggcctaaaactgatccatcgttcagcaaataaaaataacacaggtggagaaactctctttactcccggtttgcaatggcctttaatcccggattgcaaactaggaagctcagtaaatctttagtcctggttgatataattggaacttaagattgatctttagaccggttgataatagcaaccgagacgaaagatggtaatgctatgtggatggcgctaccatctttagctctggttggtgttaacaagccggactaaagttttttttctttttctaattgtttgttgctgcttgtatgttgatttcaaaccaaactcaacaacaaaatcatttacattcaaaaaaacatcacaaaatcatccacaaattcaataacaaaatcatctacatccaaaatcactaaaaatactaaaaataatctttagtcctagttgataatactaaccgggactaaagatcaaaaagtttcattgggcttttgagccgaggctaaacatattctttagtcccgtttgtaacaggaaccgggactaatatgatttttggccgacacacgaaaagatcagttctccagtagtttaataatttgttgacaaaactttgtcctagagatttcaaagccaatgctaaaaataattattgtcattgtcatagtgtacccttctgcaagctcctcgtgtccatctgtcaataaacagtacaacatgttccatgataacagtataatacgttccatggcaacggtaaaagtaaacagcttgcttcaattcttggacttttgtttttgagagcattaaattcttggacttacgtgctctatttcaacatcacattgcacagtttgacatgcattcaggcatccagcatcgtctttacgtgttctcaactaagcttctttacgtgtttttttaagaagggtattttttacccgtcctctacatccaatcggatatatacggccattgaaatagggaacttagccccgcaaacaacccaatctgaaattcgctccataggagatttgaactcaggaccttggggtactactcaggtcactataaccactagtctacatgtcctttcataagctgcttacgtgttatttgcacagtttaaatttctccttgaaatttcaccttaatttgctcgacgtgctatatatataagtgcccatttctttcctcctccgatggctgtggctgcaatccgattcaggtagatcgacaacgtcggcgggatggacgatgccggtgagatctgctcgttctcgcggtcgtcgtcttcggcgagggaggacgacgaggaggaccagcggtgggcggcgctggagaagctgtcgacctacgaccgagcacggacggcgctgctggccatgccgccggacggcgagctgcgggaggtgaacgtccagcggctcgccgccgtggagcggcgcgcgctgctgcagcgcgtcgccggcgtcggcgacgaccatgcacgcttcctcgccaagttcaaagaacgcgtcgatcggtaaggcgatctcatattgacatggtgaattttggtggttttatacagtggaaaaggacgtcacaatattctgctcgagcactactacacgtaatatttttttactaaaagtcatctcaatgtanggcttttgaagntagattttat

SEQ ID NO: 17002 - DNA, 5854 bp, Oryza sativa
  unsure (1)..(5854): unsure at all n locations
cttaaaatgtgacggagggagtagaagttacaaaaaaaatttagatacactcatagcatgacacgtccgtgttagtaagaaaaaattaatatgtatagccttttcatttttttatgttgtttaaatagtcgtaaaatgtttttctttcaaaaaagtagaagatctaaattattactgcctcggttcgattttaagtgtagcggtgggtttctgcatctaacatttctccatccatcttatttgaatttttttatgattagtatttttattgttattagattataaaatatgaataatactttatgtgcgacttttttttataaacttttcaaataaagcggatggtcaaacgttccacacggaaacacacgactacacttaaaatattggatggagggagtatatggtatatgtcttcacaaacatgcaagcttgatttgatccaaaaagcttgaatatgtcttcacaaatattcaaatctgaatatgaatggtcggcatactagtgtttaatctgtgtcatttttttctcgagttgtagatcaaatttagaattgagttttaataggatgataaacaactattgtataagtgttattaaatatttcgagattttatatattatacctacttgattaatattccaatggttagaataaacgagaggatcccttaaatgccaataaccagttgtccagctacatatcatatcatattaaatccttagatttcgtaacccattaccagcagtgctgtgattagtataggtatatatttctattttcactatattgtaagttatctactacctccgtcccattataagtgcacttatgaattttcgtgtccaacatttaactgtccgtcttatttgaaaattttataatttttttatagaaattagtcacaaataaagtactattcatattttatcatctaataacaaataaaatactaatcataaaatttctaaaaataagacagacggtcaaacgttcaacgtaaactctgcagtctttatgggacgcaggtagtacaagtttgaaaatatcactaaatcattttatgtgaaatttatttatttttcctgaaatattacttgattctctaactttctatgttcaatttttttgataaattccatgctaattttacttcatgtttaacgtttgcaaatgatcatttttgtatgaaaagtagtaccagaccttgcctagtaaatacatatatttaaataaaatatttacaaacggagaaccaatttatcagaatttttgcaaagtgggtgtagctccatcagttaggtttcttgtgatggaacctgcccacggagatcacatttacggctaattatatttttattcataggcgatgtacctatcgatagagagacaaccgtggtaacttggttaacctcaaaatatgtcatccgagttttacgaaggtgctcatacgggtagggtgtgcgtgtgcgttgagggatgagtgtgcgcgttttgagagcacatgcgtttgcattgtatttctaaaaaaaaatatcatattttttatgaatgttgttaccaatcagaaattacaaggctaattgactcattaatccatatgcaagaaaatttcctgaatgaaacattaaacttgaatttccggcttaaaacagtcaagcaataaccttcatatagcaacatatttacaaatattttttttccattcgtcctcgatttcaaaatatgtcgggaggctatctatacctatactaatcgggcacttttttggagctctcacgttaaccagaaaaatctaaccattgattagatggattgtaaaatcatggccgtacattgaaatctgtgttatcatgggcttttttaagcgaatccaacatgtatagagagtccctctattatacgtattgttaactacctacattgatatggatattcaatctgttaatatatctggacgtatcctatctccagttaggtcaatagatcgggctgtgttaaccacgtacgtacgtagcctagctgatgccgatcggaattaatggcggattaggcagcacgatatgcaaccgagggatcgtcgtgaggagcgaccattcgatggaatcgtccggcaagacggtcagccccatcatattcatgatttccaggttcgaccgctcctggccggggcttcatccatggtactaacaacttcttcatttttcaatttattttaattccgaataaaaattaataactgagtagacgaggaacaaggcaacatgtatgtgggatgatggaactgtcaacagcagtgcaatcatacagggtaagaaaaatacagcttattccctttggttctgatctgttaatgtcattgtgtacatatattttcaggaacatatttttaattttatttgaaattattacgatctttggcgtatcgatagagttattttatcacggtcgactgacagtaaaaatttattagttcaccaaagattaagttgtttcataataattttgaagcaggcaacttacatatcgatttatagtttttctgaacataaacaagcattttgtcctctctatacgccaggttgtgtaatgtgcaattgaactacttcaaaaaccattttcgcaggtatccctttactacgttctttttgccgtacttctgtattctttttgttggaaaatagctttcttcgttttggtaaaaaaaaagttttcgtcagattctatggtataattcaataaaatgtgaatactactatttgaaggtttgcttcaattcaattagtcatgaatatttactcaggcacccatctgtattccttctaaatagattttcaagccaataatatataggaaaagatatatctatatattattgattaaaataatgtatcaagacacatcacagcttcctaattgttaaaattacattaataaataaatgaaatactaaaattcagacccctaataggaggacgatctcatattttcaattctaatttacagaattattaaataaaaaattacgactccaaggagagttcaatttcgtatgtattaactctgagtccacattatctatgatttttctattttgaaaactattaaattagaaaataaaaaaactagaaaaaggatatagaaaagcataaataatgcatttggtactccagtactttgcataaaagcgagtgtcgttgtggagtaagattttgtatatattattattatcaaaattcacaattactttaaataggaaattaaattacttggtttttattaatctatttgtcaattaaaaatatataattctatgtataaatccatttatacattatatatatatatggtagttctgagtgaaaatcaagattcttttaaagttgatctccactcaaatccgctaatatgaaatcaactaattgcctttatgagatatttttgaaaataaataaccaatattctagcatatgattaaaatttttaaaatattaatatagcccgtgcaacattcttacaaattaacattctcaaacgcaggtggggtacactgtgatttaatcttaattttctttaaccttcaacttattgagttaagtggtagagatttagatttcttttattgcacatagtagttctctaatatttaagcgaataaaatctataattgggcttaaactaaacaaatagagcactctggggagctcccacatttattgtaattgacatctgatttatcttttagttaaaccgatataattaaaaaataactaatgatttttctataagtagaatctaaacattataatattaataataatagcccgtgcaacgcatgggttggcgactagtaaacataatatccaaaaaaagccatgttgcttgaactgtggccttgccaaaacgaacatattctcatttcatcttattccaatatgttccgaacattatctactgaaagggcgcgtgaagaaaagatgcatcatacttatcaccaattttttagtatggccggtcaaaagcttctttaataaggcaaaacaatatcaaatacaaggctaattgagcatttgtttccttctataatattcaatcaaagttccttgcttaattcaatgatactcaaatctcttgtgtgttcgaaaaaaaagagagtaaaagttcgtttttaccatgaagtagtgaatgatctcagattagctcctttttttagagttattgggcacatacaatggcagcatacattttggctttgaaaaaaaaaacataagattttctttgctgtcccaacttttttaatggatataggtgagacacaaactgtctggtggttggttagatatattagctataaagtatactagaaagggactaggctttgccgcgtaatgggtcatctagtaagaaatattaatgggccatcgtttataacgtttgtgtagtgattaatatttattagtaaatatatatgctatttgttatatttgtttgtttgcatttggtatcggtggaaattcctgggaactcaaaaaacatgacaagcgtggattggttgactaagtagaccatataaattttaatactgaattttagaagagaaagattacaaaaataatagcaacaaagggttgccacttttaaccataccataagttgatagtaccgaaattttgataactatagaagttttcactctcaaaagttctaccaaatttgcgaagtgagcatagctcaactggttaggttccttgtggtggaaccagcccacccgggttcaaatcctagatttgacacaggtgctcgcatttacggctaattattctttcagtggtaggcgacgtacccgtcgacagcgaggcgcctgtggtgacttcgtcaatctcaagatgtgccggcccagtcttccggaggtgctcataggggtagggtgtacgtgtgtgcgttcataggggtgagtgtgcgcacgttgtgagcgtgtgtttctcaaaaaaaaaagttctaccaacttttggtaatgcataatttaaaaagtacgaattaccccccccccgaactatcgcggtcatccgaattacccccgaaccacaaaaccggacattcttcgcccccaactatgcaaaccggacaaattaccccctcgaaccaatttagagtggttttgtccaacgtggcgcacacgtggcaatccagtcgccccccccccccccgaactatcgcggtcatccgaattacccccgaaccacaaaaccggacattcttcgcccccaactatgcaaaccggacgaattaacccctcgaaccaatttagagtggttttgtccaacgtggcgcacacgtggcaatccagtcagcgttttttaataaaaaattgtggggcccatctgccatacttttctcttcttcctctctctcctctctctctctcgctcttttctctctcgcggctcgcgctgcgcacacggcgaggacggcgcggggacgggtggtcggcgatggcagaggcagcgagcgcggcggaggaggtagcggcggcggcagaacgaggcggcggcggcggccggcgaagtggagcaaagtgcccgcagcgaggggcaacgggcaagggcgcggcaggcggagtggagcgggcggtggcgagtgaccggagcaagtgggcgagtgcgcggccgtcggcagagtggagcagagcagtggcgggagagggggagaggaggccgagcacgacatcgtcgtcgcgctagacggcgaggtgtcggcgtgggtgatcggcgttggcccgttggtaggaaggcgagaggggtaccgagccgaattcagccttaggcaacggcaatcagtnntcaannncccctt

SEQ ID NO: 17003 - DNA, 22097 bp, Oryza sativa
cggactatgactacattactatagggcgaattcgagctcggtaccccatcatccggagcggcggcggctgcgccccctccacggtagacccaccggcggcgacgccgactgccgcgcctctcccctcccccatctttcgtcggctgcctcccctctccctctctcctcctcccgtcgcgaggccctcgaggcagcggagctcgaccgggctcactggccgcctctttcctttctaccgccgccggcctatcccctctttgcagcagaggagcctagcgcggcggcggaggcagcgcccacgatgaagcggaggaaggcgcggccgtgagatggggctggttgtcatgcatggcgtcggccaccgcctcccctcgccgccgccgctgcctccttcaccgtaccccgccatcgcctcgcctcctccgtgagcagcgtgagctcatgccaacgcctcgcctcgccgccgccgctacctcctccgctgcgctcactgcctccgccatcgccgaccacccgtccccgcgccgtcctctccgtgtgcgcagcgcgagccgcgagagagaaaagagcgagagagagagaggaagaagagaagagtatggcaggcgggtctcacaattttttattaaaaaaaggctgactggattgccacgtgtgcgccatgttggacaaaaccgctctaaattggttcgagtggggtaattcatccggtttgcatagttaggggtgaagaatgtccggttttgtggttaggagggtaatttggacgaccgcgatagttcatggggtaattcgtactttttcctaaactaaatacaatcaacactaccaaaatttggtagtgctaaaatataccatgcccataatctttagttagcggatattttggagaacggtcggtgctcggtaaagtcattattttgtcttctccagtagctattctacatcccatgccatgtatacactccacagtggcccactttagataagcaacaaaataaaaaataattacgtacttttttttaaaataggacaaatagatccgttatgagtcttctgtaggataagatcggtttggtcttgtgataggggtttgaggaggaacaagaggggacttctaaaaacataaaatggatctccttatttacagggaacaaagtgagtgatatcttttgtgagtatccaagggttacttctcagtggcgtagctaggaatttttcgttgggtagtcctattgcccatgatggaggatgcaaaaatttaggtgtggccaagtaactggtagatagcaaatataatgatgcaaaagttatactacgaaatttacaaaatttgtccttggtcgtgcctacttatgctacaatttttaatatcaccatacaatataatatgcatttacaaaattgttaaagaccacctaatttaaataaatcatcgtaacataagacacaatgataaaaaaaaaaagacaatgaacaaagtgagtgatattttgtgagtatccaagggttacttcattacttctttatgttctaaaagtgctaggtatgatttttctagacatttctgataggatacgtacacgggagacatgtaggagttcttgccaatggatacatatgttgcatgttactccctcctttccagaaaaaatcaacctagtactggatatgacattatctagattcgtagtactggaatatgtcatagtcagtcctagattcgtttttcgtgggaatgagggaatatatggcttattttcagcaggacacatggcagaattttagagatgtctaacttaatttttagagactttttacagtccttgaggggaggcagtaccatatcttggccattggtttcgcccaatctaacggctgaaaatggttggtaccgcgcggtaccgtgccttcctccgagccggtaccaaatgacttttgaaggtgggagggcaaaattgtacattcgcataccgattaggagtggaacaccgcgtgtctgccccagtcgtcgccacaaactgagcaaccctagaggtggccacgagctcgtggctgatgcggcgacctcccgagcggcggcgacctcccgagaggtgggccgatgcagggttgtggtcccgccgacgaactatcctacctcctctctcctctcgtacaatagaggcggcggccatgggagttgcgcagaggccgcgagaaacctctcagatgcagaggtggcggaccaaagtcggctcctcccaccaccttttggagcctcctccacctttcccatctgtgtctcccttcctcatcccctgcccctagcgccttaaccatcccgtcgtccagatccggccaaggaccggagcagggttggaaatttcggactgaaatttttgaaatttcgaaaattttggtcatttcggtcacccccgatacgatattatttcgaccgaaatttttcattttttcatgaatttgggtaatatttgttcaaattcaactaaattttgcttaaaatttcggaaatatcatatcgaaatttccgaaaatttcgggatttcggtgaccccctatacaaaagcgtcaaccgatagagtcaaccctggtctggagcgccagatattgccatgaggtacacggcgacgagctcagctcggagaacagattgaccttggggctgcggcgcaacgacctaccactatcctccctagcgctgctactggaagtgatgaccgttgggctggtcgccttgtgtaagaagaggatggggaagctgcccggcatccatcaggtacgaagctgatgccagcagcagctgtgagcctgcaagcgcatcaccgtccccatacttggggtcaccagtcgatgtcgtctatgagtgtatgacttgatctgtaatttttttaggctgtacatagtggagtatatttcgctgtaggtgaaatctaatttttttttcctcccaatatctcaagcacggaccttttcttcagcaaattaaccatgatcaaagaaagggtaaaaggatttgtaagatcttgtagtcttgcccttgtttagttccaaactttttcttcaaacttctaacttttccatcacatcaaaactttccaacacacataaacttctaactttttcatcacatcgttccaatttcaaccaaacttccaattttggcgtgaactaaacacaccctttgttcaggcacgatttctacctctgacatgccaaaacctggcgattcttgagtgctagaaggaacttgcatggtggaatatgtcttggtctattctgtcagttactatgttttgttgcagaagctattttgtcagttatgtatgtggttgccggaatcgatattgttggaatctgtcttgagctattttgtcaattatctacaaataggtaattgacagaatgacaatctgtcatggatgtccataaatattggggagattttgccaagatattaaagaaattcctagtgaactctcttattcatgtaaaactgcatttggttgtgaggtttagctgagattttctgagttctgaaaattttcgaaccttttcggaactagtgaatcgagccatgcacagggagttccatcacgccaaaggaaggtcaccctggagacgtctctttcttctcctacaagctcctcccaaatgctgtgtttctccaatcactccatcgaatggcctccgatggccctgcaagagagagggcagggatcttgagcggagcagggctggctgtatcgacatgacccggagagaaatacgaggacgaagacttgggaaaggggtaaaaagtcatggggacttgttgtgtcaacaaatgtccccataccaatcttacccctgtgaaatcaacggtgggattgaagtggtacctcaaggtacctggtacctcgtatggcccgtttggttggagggagtttttaggagggattgggagtttagagggatgaggctattaagtgttttgtttggttgggagacatgaaaattttagtgggatggggatggggaattgaggaaggaactcccttcttttcaataccttggtaggggcaggtaattgggaggaaattcctcctttactttatgtaagcaaatctcagccatccgtttttattaatgataatctccaactaaactctctatcaatttccatcacctctatcaaacaagatattgggattaaaattaaattcccatcttaatctcatcatcaattctctcgtgtaaactcccaatcccttcccttgagttaccaaacaagccggtagtacctcctcaaggatggtaaaaactctcagagatatgtttagtgtgggagtttccggattctcctctcaccctgcccgtttggttggagggagtttttaggagagattggtagtttagagggatgaggctattaagtgttttgtttggttgggagacataggaattttggtgggatggggatggggaatcgaggaaggaactccctccttttcaatacctgggtaggggcaggtaattgggagggaattcatcctttattttttctaagcaaatctcagccatccgtttttattaatgacctaatctccaaataaactccctatcaatttccatcacctctaccaaacaagatattgggattaaaaatcaaattcccatcttaatctcatcatcaattccctcgtgtaaactcccaatcctcttccctcgagttaccaaacaagctgacagtgtatcttcttctccttattaatcaaacaatgcacagatctcctatgtgttcgaaaaaatatattcacatggttacgacattaatttggaaggcatggttaaatataaggaaaataactaggtttttccttttcatggataaccatgctaaattcaattggaaactttgattgctaagtctcctatttgaaagatgtttcctctgtgcagggttggaattaagctaccgacggttgaagtgcggtatgagaatctgaacattgaagcagagtcgtatgtgggcaggaggggacttcccaccattctcaatacatataccatcataatggaggtatttgcatgaatgaactatgagaaaattactacattcataagaaaaaatgtctccatctatctgttataggacaaaattataataatttagatgaaaagaaagactctatcggggttgatcaatgagatggttactactttgtgattatcagacttcttaagcccgcacaaatcaagaaactgctatgtaaactgatcaagctagaaaatttcaacatgaaattcacaggttttcattgataatagagcggtaatcacggtcactaggaagcaattttaagtgacatcttgtggagcacggtctccatgtttaatacaactttgtaagcattaattcaaaacttgtaaaacaattctgtgtttgttcaattcaattataatggtttctatgaatcttaacaaccgaaaactagtttttattccatcaatgaactttgcgacatcctagaaagttgcttcccattatccgtagttaatgctaattctctcctctgttatgaagccacatcaccccaaatggtttttttttttttgcaccatggtcaatcgtccatgatgagcccatcaacattttctcacttattcctaacattttttactacaccacatcaattatttctgaacttttggataaaaattcactttgcatcatcatgtttacttgtcgccatgcaacttttctattccaatgcacaaagtctatgtagtttcaatgaaacaagaaatctatgtggcagagagtgcctgccaactacgcattttccatgagttccatatgcagatctaactcatggaatttgtaaatacttgattgcttttagttaccagatgacattaggcttgtgctgacccatattttattccattttttaatattacattaggtttcccttattttacatagttcaatgtatcacacaaaggtgcaactgacaactagctacctctaaacagggcctgacaaatgctctttgcattacaaaaaagataacacacaaaataccaatccttcacaatgtgagtgggattatcaagcctcacaggtaacttcttagtaattgttagtttacaaaatatgtccatgcaaccttgtccatgcggcatataaccttgtccatgttgttttcagaatgaccttgttgttaggccctccaggttcaggaaaaacatcactattattggccttggctggaacatcaaccttaaaggttattttgtttatgtttttcacatacaactcttctttagtacattgcaatatactttaagtattaatatgaggaaacattgcaattataaaaggtatctggaacaataacttacaatgggcattcaatggaggaatttgtgccccaaagatctgcagcttatgttagccaacatgatgtacatatggctgaactgacagttcgggagacagtcaatttcgctgcaaagtgtcaaggggttggccatcattatggtaagataggagaaatggagagattgatactcatcaacattaataaaatatcatattaaaacattaacattttctagaaaatgcttagacttgctaatggaactgttgaggagagagaaggaacaaaatattaaaccagatccagaaattgatatatatttgaaggtacaatgcagttcttaaatcacaactaactttatccagtgttgagctatctctagtacggttgtttttaccatttattgatgttccactaaaaggtttgaggaattgcactttatcattttgcttatgcaggcagctacaacaggagagcagaaagctgaggtggtcacaaatcacatactaaaggtgtatgagcactgtctagttatatagttctattgtagtgttacaataaatttcacaattgaaatccgtatgccatttcccaataattctttacttttctaactatcgaagattttgggattggatatctgtgccgacacaatagtagggaacaatatgctgagaggcatatcaggagggcaaaaaaagcgactaacgacaggtaatgtatcattggagttattagagtgcatgatggttacaatttctgatccactccctaatattgatgccacagctgagatgattgttacaccaggacgagcacttttcatggatgagatatcaactggacttgatagctcgacaacattccagatagttaacaccatccgacaaaccattcgcattcttggtggaacagcagttattgctttgctacagcccgcacctgagacatatgaattgtttgatgatataattctactatcagatggtcaagttgtctacaatggccctcgtgatcatgtgcttgagttctttaaatcggttggattcaaatgccctgagagaaaatgcgtagctgacttcttgcaggaagtgagttttaccatggtttgaccttagcattatttttggtcaagtgcttaactatgactaattataagtggcttattttaggttacatctaggaaagatcagaaacaatactggataggtagtgatgacacataccaatatgttcctgttacgatgattgctgaggcatttcagtctttccatgtcggtcaagcaatcagaagtgagttggcaatcccatttgagaagagcaagaatcaccccgctgcgctggcaacatctaagtatggtgttagcatgaaagaactactcaaagcaaacatttatagagagatattgctaatgaaaagaaattcgtttttgtatatattcaaggcaattcaggtgattcttaaaaaccaaaggttgtttcattatagaaagataactcataagctttaaaaggtcaaagttaattggcctcttattatattatttcccttaattgttcagctaaaactggtcgcaataaatgcaatgactgtgtttatccgaaccaatatgtatcgtgactcgatagaaaatgggaggtcatacatgggagcactattctatggaatgatgatgattgtgtacagtgctttggcagaaatgggaccagctattgcgaagctcccagttttgttcaagcaaagagatctattatactacccatcatggacatattccttgccatcttggatcattaagatccctatctccttcctcaacacaacagtttgggtcttcctaacatactacgtcattggatttgatccaaatgtactgaggtaaggaaaacaaaatattaccataaataaattcttgtaatgaatacactataagattaatgaaaacaatgcaatgctacagatttttcagacagttccttgtactttttgttttgtgtgaggtaatatatgcacttttccgcttcattgttgcccttacaaggcatccggttattgcaagcaacatgggcccattctgcatcctcatttttatgctttcatgtggattcatcttgactagaggtatgcaaatagtttaatgaattaccatatgatgcttctgtaagttttgatactaattccacaatgtatgtagtacttttatctctgttatatgtctgtatgattcaacagatgatgtcaagaaatggtggatatggttgtattggatatcacccctaatgtatgccttaaacgctttagccgtaaatgaattcctaggtcaaatctggaacaaggtaaacatatacttatggaatcgattaaaagccatatatttgaatttgcctggctaaaacattttgttattgttaaacaacagtcaatacttggttacaaaggaccacttggaaggctagttttaggatctagtagttttcttcctgagaccaaatggtattggattagtattggcgccttgctcggatatgtgcttttattcaatgtcctctacaccatatgtctcacatttctcacacgtgagttattaaaaaaagccaattttttcattagtaaaatttattctttcaaatgatctataaattctaattttatgcaccatgcactctatagtatttagcaggagccaaccaacaaagcctcaggaaatgttgcagataaaacaacataatttaactaatgaagttttggaagcatcgtctggagggcgtgctgcctgcaatacaatatgtaaattttttgattcacctatcaaaagactaaacatgtcataacatgatgagatgccattcaaaagttaattttcatttgtgctgtgtctggtagatgctaaggaaatcatcaatgatgaagcaaattcgtaccatgcaacaagacattctagtgctggaaataaaggaatggttctcccttttgtacctctttccatcacctttgaagacataagatatagtgtagacacgccagaggtacaaaaatattgcaaaatattgttgagacatgcttgctctctctctctgcataattgcctatatttgcaccatttgcgagcaaactctatataatagttgttctaatcctgcaataaaacttgtaggcatttaaagcaaaaggtatgacagagggtcgactggaactattgaaagatatcagtggttcttttaggcaaggagtacttacagctcttatgggtgtcagtggtgcgggaaagacaacactgctggatgtgttggctgggagaaaaactagtggatatgtacagggtagtattaccatctctggctacccaaaaaagcaagaaacttttgcccgaatttcaggatattgtgaacaaaatgacatccattcaccaaatgtaactgtctatgagtcccttatgttctccgcatggcttagattacctgttgaaattgattctgcgacaagaaaggtaagtcaagtacaagtaataactactctctctttatttgaatacaaagtagtatataagaatgtagattttgtgaactgatctatattgtctcacatgatgctacaaatgaaaaacaaaattgatagagatggaatttttatgaaaaatacgcgacgatgtgttgctttttctttatcttgtagtagtttttaaaaggaatattcatgtatctttttgacatggtttctagatgtttgtttatgaagtcatggagctggtggagattctctccttaaaagatgcactggttggattacctggcgttagtggattatcatctgaacgaaggaaaagactaacaatagcagtggaactagttgcaaacccatccattatatttatggacgaaccaacatctggacttgatgcacgagcagcagccattgtgatgagagcaataagaaatacggtggacacaggaagaaccgttgtttgcacaattcaccaaccaagcattgagatatttgaatcttttgatgaggtgaatgaaactataacaatattgtgcatttgatctttcaagaaaagaaaaagtaaatcattggtgagtaaatattgtttgcacactcactcaatttattctaatatggttctttgttgcagctcttcctaatgaaacaaggaggtgaagagatttatgtaggtcctataggacgacaatcatgtgaattaattaaatattttgaggtaagaaaaaaacacataaaacaatacaattttgcatttttgctgtacgaaacatgctattgaactccttttattttctaaaggctattcaaggtgtcagcaagataaaagatggctacaatccttcaacatggatgttggaagtgactagtacaacgcaggaacaaagaacttgcgtggacttttctcaaatatacaagaattctgagctatataggtaggtattgggtagtgctttaattgttgtcccattaacatagcatctatgtgcaaagccaactttctagtatgtacagaatatccgtgatggtatgtgtaagaagtgggttctactaatgataaaaaaaggaaataatgagacaatgtagtggcgaaagcaaaaatatttcctatatgaattgcagaaagcgatgaaatcataatatcaaactggaaatgcctcaaatttattattcttccacaattaatgtttccatttatgaaaatggtaataggaaacatcattgtttcacaatgttactagtttgctttcattacaggaggaacaaaaatttgattaaggagttaagtgcacctcctgaaggttcaagcgacttatcatttccaactcaatattcacagctttttcttacacaatggttggcttgcctatggaagcaacatctatcgtattggagaaatcctccttatattgttgtgaggtacctcttcactattgtagttgcactcttgttcggaaccatgttctggggtattggcaaaaaaaggtaattaactgcaataaacaaatgcaagtaaataatatatatatatatatatatatatatatatatatatatatatatatatatatctcaagtccatccattgcagtttacaaaagatattccattgctgcagacaaaatcaacaaaccttgttcagtatcatgggtgccatgtattcggcatgtatggcaatgggggtgcagaactctagttctgttcagccagctatctttgttgaggcgcacgatcttttacagggaaagagcatcacacatgtactctgctttgtcgtacgccttgggacaggtaaagtttgttggcatcataatcattttgtaaatatatgcatgcgagtcttgataaaatgttttaacatactattatttttttatacaaaaccaaggctctcagtaagtggaaaggaatggtgaaacaaaaagccttcttgacatctagtttcattgcaggttgcaattgaatttccatacatttttcttcagaccataatatattgtgtgctagtgtatgccatggtagggtatgagtggacatgtgccaaatttctttggtacctcttcttcatgttcttcacactatcatacttcacattttatggcatgatgatggcgggtttgactccaaacaatgccatgtctgctgttgtttccacggcattctataacatatggaaccttttctcaggatttctaataccacggattgtacgtataccagcttttctcaagtatctaattgtacattgttcgtggctaaattatctcacatccactaatttttctaatatggctccgtttactacagagaattccagtatggtggaggtggtactattggatgtgccctgttgcttggacactcaatggattgcttacatcacagtttggggatgtaaatgacaagtttaataatggcgtgagtgtatctgactttatcgagagctactttggttacaagcaggacttgttgtgggtggccgctgtggcagttgtctcctttgctattctctttgccttcctttttggactctcacttaggctattcaacttccagaagagataagtaaggaagaccatgtcgagtttcagactttgatcaaatattggttatcatagatgttttacagtatgtgcataatggcataatggcatataacatgcttacaagcatctgttttgccaatataaaatgcagccgtgccgagtgagtttgtttaatggctgtttgcaaaattggctctcctatacccctcattctcaacttttatcctttatttttcctggtagtaatcaggtgaaaagatggttttttccattgcatgtaatttatatgaaccaataaatcttcttgactactagtaaacaaataatagattaaattttcacaataaaggttaatatgtacccaaaacaaaagaagaaacaaaaaatattttgggggcaagattgtaaatttgagtaaagtgcatagccagttcctattcttgttcgcacctatcatctcgatccccaaactcttaaaatacatatcttggtgctataaattgttaaagtgtgttattctgatcccaaattgccatgaacccccaaatcataggtgacatgccatgtggatgctgacatgtgtcacactccacctttgcatcatctaatagtgacactagaggggatgagctgcaagagatctgcgtgaaccgaatccaatggaaccactcttccggtaccagcaataggacacgattgctcatacatgcggtcaactaagatgaatctattcaactgaatatgataccttatagaaggtcacaccttcaaaacgactccaaaagtgtcacgggcaagtagagaagcagcagcagaagttagcgcagctagaccctatccacgagcaatggtttgggattaaaaagaaaccctaaccttcaacttcactcttcttgggggaggggaaaataacaatggctgagtaaatacatactccacaagccacgggaaatttgagtatgcaggctccaaatgacagttggttttgttttgtaaacttttaaaaatatattttgaaaaacaaactaagtgtggcgttgtttaccatgtgattggatggagtttctcgcttccatcctgtctacgaattgctttgcaacaactcaagtggatgaaaaaaaatttagttgatgaccactattatgtcggctgtcgtaccatgactctagcacataaccttctatccttaggcagttcccaactcaatcggtgtccattagtttcttttcactttttaaccactgggcatcatcccatctaatcatctcatctctttggctcccagagccaaccatattctccaacacactagtgtggccctacaaattgggagaaatataatcaaagggtaacttccttctgatttcttgtccaaaataatttccaacgacatagactatgtgcaaacgaaagagaaccaaacaaaaccctaaaaataaaacaatattattaataacaaatagtacgattggatagatctcatttttagaaaaaattgaaggccttaacatggtcgattcgagttacaaatagggagtatgatttttggatgattatgattttctgaaatataccaaaaatgatttatttggagtataaggggaataataatattcccatgacaggttggctcaagggtcggtgagaaagggaagtaaaatagactttgtaggggtgagatgttggttggtgcactcaggcaggcccattggctccaacccatttatgaaagtagccagttgagggagagatagtggacttggaaaggtggaagaatgaggtgggccactacctgtgtgggctaccaggctggcccataaggcatcgacctggtctacggctaacgcaactcggtggcacggagttggcccgcccatcgcagccgcatcggcctagtacgggagggtttgaccgtccccaatcaacggctggtgacagcaaggagttgcagggatgatggtgactcggtgagtgtgacaagtggcttggatgggtaggaaggtcaaaggtgcacgatggcagtgagagaaagccaacacacggcagtggctgattgtggcaatggtgccgttgcatcgaagtgggagagagaggatggattagagagctcatcggagggagttctatagcggtagagacaaaacagacctcgcagcgctccaaattgtatggagcgcagcgagaaagtgattggccgagggggataggaggcatgactgaggcagagggaggacaagcgagaatcctgttacgcgcgtacgcaccggcaaaccaagtcgcgcgcacggggctaggttttcttttttcttttcaggacttttttctttaccggatatgcctatattaacgtaactaactaatctgattagttgattagttttagataataacgataattaaggaaaaattaaggacgttctttttgtattactaatagattgaaaagaaaactatacatgcagttaaattttgaaaactttcaacttttcatctcaaatttgaaaaactttcaactcaaatttgaaaactttcaacccagatttgaaaactttcaactcagattcgaaaactttcaacccaagatttggaaactttcaaactagatttgaaaactttcaacccaaaatttgacaactttcaactctagatttgaaaacttccgactccgattcgaaaactttcaactcagattcgaaaactttcagctcgagatttgaatactttcaaatcagatttaaaaattttcaagttaagatttaaaaactttcatctcaaaacatattgaaaaaataagtgtgctaaagattaaaaaaagtaatcagaaaaaaaaaacgcaaaagaaacagcgaaaaacaaatcaccaaaaaaaggaaaaaaaatgggctggtgggccttttgggttgggagcagctggcgcacgcgcgtgccaactagcaacccccgaggacaagggggcaacgtgctttgcatgaagcacggggtgctgtggagctgcaataggtggaggcaggaactcgacaatcaggtgtggtttctcgatatactgggagggcataggtagggggtattgactgtataattgtacaattataggtgtagactaaaatgactatatactagaagtacagaaatgatgcttttcttttttttctccaattagcttagattattatttgagtgagtgtcttctggttagttccttatgtgtgttaatcgatcctaacacctgaattgattaacccccgcattagactttgatctacatatatgatgaaaattattaacatagtactctcttatcatattttcccacaggattaaataaatatgataccttggaaatacttccgggtgaaatactatatccatgcgcttgcggattatatctgtaataaagaataccgagtaatatttcaagagccactagagggaattatatttctagtaatgttgttaagaaatatcaacaccacgcaccagatctatgcgtggggagggcggccagccaccggatatgtgaggcacacagccgccgctaccggttccttgtgggggttgtccaccacccgccgtccatgcccttcaccgccggatggggccaccgggtgcgggggaggatagagaaggccgccgcgcaccatcgccctcacccgctggtgcccacgcctgccatcgccgtcgtccacgcccgccgctgccgccaatgctcaccgttcaggacagaggagaggggaaaagaggagccgggaaaggaagagattcggtgaggccgtgagagaggagaggagtggtggagatgagtgggtggaaggggggccggtgaaggggagaccaaataaaatgagtgagaagagaagtgttgttgcgtacgggtgagttaagaccccgcatgtgaaaatccttattttcgcgtgccgatgttttaagtggtccgtttggaaaaaaaataatttttgtgtgtgagtctattaaagagccgtatgcgaaaattggggtcaatttttgcggacgcagacacttatggcccgtctacaacctattagggtgcttgtccatgaaaatcatttttgcactagtgtaattcaagttccaagcgtagtcatcggagtgtaatttagtttttccctgctgattctagactagtgcttatcacggttactcaactgatcggtaatgcaaaaaagatattcacgtctgctcaggacgggaactattatttaatgaaggaaaaaatacgaattaccccctgaattatcgcggtcgacggaattactcccgtaaatccgaaaaccagacatcgttcaccctgaacttttaataccggacaaattacctctctcgacccaatccagagctgttttgttctacgtggcgtacgcgtggcagtccagtcagcattttatttataaaaaaatatgggacccacctgttatacccctatcacaaaagcataagtccctatgagagaaactaaaatttttgtgagagggactatagtccctccttcccaaacaccactttttttccttcttccttcctaaacaagcagtgatctgatgacattttcggcccagggccgtatatggtggatgattctactctacttttaattttatttgacgcgagtggtttctacagctgacgtgtatgtggtcaacgtaccgtttcaaattgagagagtttgtagcatggacatttttgctactgtgccacctctgtttcgtacgggctaataagtcactactattgaaactcagcttcgtcagttcacaaccgtgctaagctctatattgccacgtgctaagcaaatttaagtattttttttagaatcacacagtacaacgcaaacactcacaatcactcacaacgtacacgcactcgctcctatgaacgcacgcacgcaaaccttacccctatgagcatcttcgaagactgggccggcaaaatataatttaaagcgcatatatatatatatatatatatatgaaaattatatcctactaccgagagtaaatatacatgtattacaattcattatgtgctcgctagctacgacttcgacgccggtgttatatatgtcagaagaagaaggaccggcgttataaattgtcgatccgtcgtagtagaattcaccgtcgggatcaagaacttgttcgttgatgaatcgcatcaagttgttcttgagcagccacgataaatttcttgtgtgtgaggttgtccctcatgtgaataacctatgaatatatgaaattaataaacaagaaattgatatgtacgtaatgaaattttgaatggtttatatgtacattgtgctctcttgtggtatagatttgggttgataggatgtgtatacagtcgggtacaaaaatttgcatacggactttttaacaaacagatccgcatacaaaaacagacttttttttatgcctcttaacaggttcgcttgtgaaatgaattttcgcatacgggcctatattaattggatacatttcaaatctctttacatataggtcttctttgcatgtgataaaaaaggtgtgttcacgaaaaaacattttctttatagtggcatcctatatatttgtaaagggtgtgtttccactaattgttatagtattatttctgttttttctcattaaaccacatcatctcaagtgttcctaatgcttggattattgatctatggtacaaatctttattatgaagtcatatcatcttaatcttatatttggatgattcatctatatcattatttttcatctctaattgagccacatcaccttaggctatatctatagatggccatatggcccgaggcccacggcccggtccgaagcatgcaattttggcctggtccaagcatagcatgactcgactagggtcgtgcccatgccggcctggcccgacagccgggccgtgcctgggctgcaccctcagcatggtaggccggcccggtacggcccgatcaaataaaaaaatataaggatgcaaaatagacttaaataatcgtataaggcaaggcccaagacaagatatacaagatagatttattttccagccatttaaacacagcgcacattgttgagggaccaaaaatagactttttctgtgaggaagcacgatagaccgtcgtgccttcgggctcctcggcccaggcacggccgggcttgggccgtgccatgccgggcccagatggccatctatagatatagcctataggccggccacaggccagcccctatcaggatatgcgtttcacaacgattgacagcgaacactggtggtgtactgtgcacagatatgcgagatgtgtgtgcatattcttcaacgtaatcgatcgaaaattaacgaccagtgtggcctcttggcgtacgtgtcccgtcccacccgctcgctctccgggcccgggtcggtccatcgccgcgcgaccgcgagctatccatcgatagacgccgcgtcgctcgtgtctcgcgagctaccgcgcgcgtcaagcgcatcgcagcaggcgcatgcagcgatccacccctcgcttttcagttttgtccccgtaatccaccgtactatacggacgacgacgcggtgcccgccgtgtactcactcgcgcgcgatcgccccgcggacgacgcagccgccacacggacgacgcggcccctgcgcacgcacgcgcaccccacgggaaactacgcgccccgcggtccgatcgacctgcctatatggctatataggacctgcctagacgtggtcgcgccagccttcaattgatcgatggatttaattaacagcaggagtagctaccaagcatttgcaggggtagtagtgaccggcctattggctattgcatgagttttccaaacctggggccggccggttttgcaaaccagccctgggaaaggccggacagctgagctaccccaaagttcttgcacaatttttgacaatttgaccctctgcaaaaactaattttgcaaatgaatcgtgaccaaaacttatttaaaaaggaaaaagtacgaattaccccctgaactattgaggtcgaccgaataaccccctcaaacttgaaaagcagacatttcgtacccaaaactaataaaaccatgtatttaacccccctaagctgatttgggggcggttttgactggggaggtggacacgtggtcgtccaacgtacgtggcgacccctgccatgtcaacctagccccacacggataacccgaccggcgccatcccccttactctctctcgacaaaatttcccctttcctctataaaccctagtcggcggcgactagggcggcgattgcgggggtgactccggtgacggtgggcggtgacttcggcgacgggacggcggcacgctctgaggcagagagggcggcgcgttctcaggctgtctcaacccacgacgatgtcgaggagctcaggtacgtcgcagggcttgtcttcgtcttcttgggctggacgtggtgagggaggaaggcgtcacctgccggtgccatatagggaggggcctcttgattacgagcctccagttttttgtgagtgtaaaatgaaggcagctaggtggatttcctggagtcccagtaaccccgggaggagatattttacgtgctacaatgcatgtgtgagtaaattttcgattgttcgatttatttttctgatttgtttggttttgaactgattcagtgtttcacttgatatattctgatatattatgtatagtgtggggggtgcgatttttggcagtggtacgatgaaaagtcctgaccatattgaaagcaatttttgcttgatttgaggaatgctgtgtggtctggacgagaagaaatcaatggattggaggctgcactccgtgacagcaagaatgaagtcaggtagaacagggtggctgcacagagcagagaaagcaaagaaatggaatccctaagagcagctttacagcagatagaagctgcgaatgctgcttgagttgatagggttaataggcagcagaaatgtatggttgtgttgatgtatgtgttagcagctcttgttgttattatggttggtaataagtacctaagatcctagtgcattcctgaacaaaaaatgtgtggtgttggcaagggttgtatggtggcctgtaatggaatttggaattaatggaagtagaaatgatgcttttgatgaacatcagtatgtcatagtgactctttatctggagtaacaaatgttgccatagaaacactttgaatcattagttgttggaagattgcacaaaatgtgggcataaaaatgaatcatgatctgtaaaaagatatgtatccatagaacacattgaataattagaacgtgaagattgtacatatgttgccatataaatcaatcatgatctggaatacagaagttgccatagataggtattgaatcattagaactggaagattgcacatatattgccataaaaatacattgtgaatcatggatctagcataacatataaattcttcattgtctaaaatgttgccatcaacttacttagtgccacatgtttgacattatagtaaccactttacatcaggtaatacacaaaagatgacagttagtgctacatgtccaaatacagaagttgagcaccaactatcactacacaaaatatggtgaacttctgcatattgcttgctatcccagtaagcatgtccaaaagtactatgtatctattgtatctatcctactcactgtcctgatatgttgagctgagtagatcttctaactttcaacttctttgctggttgcccccctgaatcatgtgcagctgcggtggaccttgtccttggtcttgtagatgttgatgtcattgccaattgttgccatagtacataatatttgcagttaaaaaaaaagatacattggaaatcagtacaaaaataactgcagttaaatggcatgtgtggatgtgtggcagttgctcactgtggggtgtagaatctgtgttggcacgtgtggagctgtgctgagaaccctgagcctgtaaaaatgacttaacatcagaaaaatgacagtgaaattagtacatgtagatgataatctatagcatcttacctgcacatttgtctgtgcttgtgatcatttcagacatgatgccttgttatgaccagggagcttgcacaatctgcatgtcatgacagacccaaccctagacactcttgttgcttttggtttctcattgggttatctcctcctatcttttttggaaggctttcctagcattttcacataaccaggtgcttgtgggctaggcctatctgacttgggccaactctcaataccctcaactgtatctaggcagaacctgtatgtcttcttgaatgagtatattgagtagcaagggacaatgtaactgtccaggcagttggttctaaaatgcatgcaggctatagcatgacagcatggtaaaccagccaactcccagtatttacatgaacatgtctttctctcaagatcagcagtgaacctatgagagtgaacctatgagactgatgcttcagctcaaacttgtccatcccattactgattgcatggtaaacccctgattctatgatgtatgcattcagcttcttatgtatgtttgggcaaactgatcctacccacttgtccattatagacctttggtcatgtatcctaaccatcacttttcttctaatagattcca

SEQ ID NO: 17004 - DNA, 758 bp, Oryza sativa
atgagtgatcgattcatatagggcgaattcgagctcggtaccctatatatatatatatatatatatatatatatatatatatatatatatatatatatatatatatatatatatatatgaaaattatatcctactaccgagagtaaatatacatgtattacaattcattatgtgctcgctagctacgacttcgacgccggtgttatatatgtcagaagaagaaggaccggcgttataaattgtcgatccgtcgtagtagaattcaccgtcgggatcaagaacttgttcgttgatgaatcgcatcaagttgttcttgagcagccacgataaatttcttgtgtgtgaggttgtccctcatgtgaataacctatgaatatatgaaattaataaacaagaaattgatatgtacgtaatgaaattttgaatgggttatatgtacattgtgctctcttgtgggatagatttgggttgataggatgtgtatacagtcgggtacaaaaatttgcatacggactttttaacaaacagatccgcatacaaaaacaggccttttttttatgcttcttaacaggttgcgcttgtgaaatgaattttggcaaccgggcctatattaattggatacattccaaatccctttacatataggtcttctttgcatgtgataaaaaaggtgtgttcacgaaaaaacattttctttatagtggcaggggatcctcagagtcgacctcaggctcagcgagagatctcagtttcatcac

SEQ ID NO: 17005 - DNA, 849 bp, Oryza sativa
  unsure (1)..(849): unsure at all n locations
agatgttnaaaggtacagacactctctatccggntcctacatgtttgtttatgaagtcatggagctggtggagattctctccttaaaagatgcactggttggattacctggcgttagtggattatcatctgaacgaaggaaaagactaacaatagcgggggaactagttgcaaacccatccattatatttatggacgaaccaacatctggacttgatgcacgagcagcagccattgtgatgagagcaataaaaaatacggtggacacaagaaaaacccttgtttgcacaattcaccaaccaagcattgagatatttgaatcttttgatgaggtgaatgaaactataacaatattgtgcatttgatctttcaagaaaaaaaaaagtaaatcattggtgagttaatatttgttgcacactcactcaatttattctaatatggntctttgttgcagctcttcctaatgaaacaaggaggtgaagagatttatgtaggtcctataggacgacaatcatgtgaattaaataaatatttttagggtagaaaaaacacataaaacaatacaattttgcattttttctgtacgaaacatgctattgaaactcttttattttctaaagctatccaggtgtcagcaagataaaagaggctacaatccttcaacatggatgttgaagtgactagtacaacgcaggaacaaagaactgcgtgacttttctcaatatacaagaatctgagtatataggaggtattggtagtgctttaatgttgnccaataacatacatctatgtgcaaagccaacttctaagatgtacagatatccgggatgtatgtgtagaaatggttcta

SEQ ID NO: 17006 - DNA, 766 bp, Oryza sativa
cgtggattgaatccacttgtagcccgccacctctttgaaaaccattttgaatgctgataactactcatagcatacatgtatacgaagctatcttcgatgcactcgccaggggttctcctcagccgctggtggcctgtgtcgggactggctaaactattcactatgagtacaaattgcactgatagcgcaccatatgccgtgagatataccagacacatgcgtcatgcgaaaacaccctattatgcgccattcaccattcaccctgcacaactgcagcgaagggcgatcgatgcaatcctcttcgatgatactccagctgacgaccggacgaagtgctgatatgcgacttataagagtaactccctaggttcccagtaacaacaattaaaaactacagccatatacaagtagagcaactctcattctcatactaaaatatctaagctaagtggaaagaaaatagaaggagaatcttttcctatacttctagtatacatagtatacgtacattctagttatctgattaactagtttaataccctctatccgatgccctgctggtacatcgagaagccatccctgactgtcgagttccttacgacagcctatcattaccatacaaccggggctaaatacggaggactaccatcctcagtaaaataacttaggactatatacacgcgccgaggaatatccggactgaggtgtcactatcaatggcccaactctcattcggagcatattacccccaataatgatattccgt

SEQ ID NO: 17007 - DNA, 16894 bp, Oryza sativa
  unsure (1)..(16894): unsure at all n locations
acgcaatagtggatagatgcacgttctggttgttagcttgcatgtaggtgtacatgcagccttgcatagagggttagtttgttagtgcatggcgtgagtcccggtcaagagaattggctggttgttatcctttgcatgtaatttgagtctatatataatgagaaaaatgatgaggccgtgggtggttgaatcaacagaaacttgcatcttgtgctgcttgtgtgtgtctacctgagaagcctttgtggcaaaaatacggtagagagagagagagagaggaagtgatttcccaccagagagacaaaagtgtttgtgattaacacttgtagctgtgagtgagcaatcccaacacaagggagggggagagaagcgatggaggccatcacagaggtactcctcatcgagctccactggatccgaagcccgcttcccacgctaccacgctgtactggagatggagggtaagaggggacgggggagaggataattaagcgagagttttgccactcccatcacccggcccattattttatattttgttgcgattttcgtaggcggttatgttaaaagcaccacatcttaaaaatagacctgcatgtgaaaaatcatactccctccgttttatattagaagtcgtttgactttttttagtcaaacttttaaaattttgaccaaatttatagcaaaatatggtaacatttcaatataaaacaaatattgcatcaaaatatattcaatgttaaatttaatgaaacttatctaatatagatgttgctaattccttttttctttaaacaagcacaatgcctgtgtgttgcactgggtaatgtaaggtggataaagtttaacttcaatgatttaggatatggtatgaccactatccgtccgaatccgctccattttcacccctacgggagggactcgcacacaaccagaaatgccacccttaaaaacgcctctctatgtttcattgttaaatattattaccactcccacacatcatgcttgtgtatagtatctctttagcatcattgacttaacatatgtaaaacatttattttattaaaaatgctataatatcatttattttattatttgttttattgtgattaattttatcatttaagacttctatttttgcataattgtataagatttttaaatacgataaatggttaaaacgcatataaaaattgacggcgtcaaaagaaccaatagagtagtactaactaaagcgaagtttttcttttcgaaaatgacaagaaaggagtaaaaaaattatatgcaaggattgaccctgtttgagagagcttctagctgctgcagtttcttccagaatcagaagctcccccaaacagttcagcttttggtctagattttgagaagctgtaattgtataaaccagaaaataaactagggccatgtttagttccaaagtttttcttcaaactttcaacttttccatcacatcaaaactttcttacacacacaaacttccaacttttccatcacattgttacaatttcatccaaactttcaattttagtgtgaactaaacacagcctagaagctataagctgggaaacccagcttttccagattctcataagctggctaccgaccagctacttcgcagaatcttaagctccccaaacagaccctatatttccttgcacttagctaatacttcctctgtttaatattataagatattctactattatccatatatatatatatatatatatatatatatatatatatatatatatatatatatatatatatatatatgtgtgtgtgtgtgtgttaatgaatctacacatacatatatatgtgtctagattcattaacatctatataaatatgggcaatgctagaaagttttataacctgaaatgaaacggaggtagtactggatcgaaagcaactggaacaaagcgaaacaaaagaaaggtggtctagtcagtatcttaataaataaacccacgtttaaaacaaggagaaaaaaatatcaatttggttaagtttaaaactagattctaacaaatcataaaccagtacgtacatagtgtgtgtatatatgagggctgcctgccagtagcaaccacacacaaagcaagctcgataacgtcgatcatggcggcgtcatcctccctgtctccttccctcctcctcggctgctccttcctcatcgcggccgccgtcctccttcgccgccatgacagcgccgncgccaccaccaccaccaccacccacctccacttctacatgcacgacgcctacaccggcccggctcccaccgccatgcgcgtcgtctccggccgctccttgctgcagtccaccaccgacatcgtcgacggctcgtcgccgccgcggcagttcggggacatcgtggtgctgaacaacgcgctgacggaggggccggacgccggcagcgcgcgcgtgggcacggcgcaggggttcggggtgcgggtgtcggagggcgggttggtgacggacctgagcatgcacctggtgatggaggccggcgagcaccgcggcagctcggtggcgatcaagggccggatcgacgtcggcgtcggcgtgcgcgagtcggtggtcgtcggcggcaccggccggttccggctcgcgcgcgggtacatggccagcagcagctacgactacagcctcgccgccggcggcgtcgtcgagatccacgtctacctgcagcactagctagcagcctgacacactacgtacagctagaacgcgcgcgcctctcctgcatgcctatgccttttcatttcatgtgttcttgcttaaagttgtaaccagcgtcctgtgatgtattgtactgtactgtagctcgtctattttcgattttttgcatgagcacgtctgcatgtttgcagcgtgagcgtcgtgtgttccggtcacgttcgtgcctggaacgcgtcttctcatggacaattaaaggcagcagcgcacaaactacattttacattaagatatttctaaattaattaccgctactatagaaacgattttttcggatgagaccccttgaggttgctggcaaattaaactgctcccgcctgcaaaaatcgctgccccgagagcgtggttcaaagaccacatgcgaaaaaacaattttcgtaggcaggcttcttaataggcccgcctggcaccaagccgtttacccgtcccctccctctctttattctctcctcttaaaatatctcatttcctaacttctccacactccactccactcccttatcttctcctcatatcttctcgccccctcctcaagcggccatcccctcccccctcccccttcctccaccgcggccacgatgatagtggcgatggctacgacgacaacgatggtggcaagtgggcggacgagcgggagtggccagcaccagagggatccggcggcatacaggagcagggagcggcggatccggtggtggggaggacggtggagagcttggcggcaatggatccggtggttgggtgggcagcgatggtgcatccggcggttggcggtagggatggcaatgctgatgggaggtagggagggcatcagcaacagcgaggacgaaccccgggggtgggagcgggggcggcggcaacggctgcggggcataggagttgctatgtgtcacaccccaatccggcatcgccgtacaacggcacctgataggagcgtgtcgtaggaaaaacggcgcgaaccgcttcctacgaaaccgcgatctcagtactagtcccaggacatagcgctggtacccacggtgacaaatatgaatcattgcaatccttagaataaatagaggacttatttaccttaacttaggttgcaactcaggacagcccgagattacaaccgacgacacggacgaggcaacaccaacagcggcagcagcaacggaaacaacggactaacccccaacaccacaggcgacggctggggtctaggacgaaaccctaatcttcacttcacttcaacttcatcttcagagctggcagaactatatttatatagagagcaagggtgagtacttacgtactcagcaagccaggggaacttaggtggttaatgcaagtttcaaagaataggttgttatttttcaatcagttttgttttcaaggttttcaacaatctaagtgtgtgctttccacaaccagagcgagacaagtctcagctcagtcggggtgagaagtacaaaatttatttatcaagattttcacaactcccagagttggcctcaaagcttgttttcccaaaccaaaccatttttccaaacttcccaataatagtggtccccaaacgaccaatcacttccagggacttccggtcccactgtcccccggacagctaattgcttcccaagcattaggtttcccaaaccttaacaccttttcataaaacagggtaaaacaaaaactacgctaaggaatcacctcacattcgcccatgaccgtgggcacggctgttcgaacagtttaataacctctgtagagggggtacactatacccacacgacgttactagccttggtcacccagcccgtgcagaacagccacgtctggtgactttggggctttcacgacaaggtatttcgaaagccgacacagggttaccatatgccaatgagaggagtcccagaccaacaacaggttaggtcccagaccatactgtgccaggaagcccgggggttctccccgacaccaccccgttgaatccacatgtctcttggcatcaaggctcccttgattagctatttactcagccaggggcgtcccattccacccgtgtggtcgcactattgtatgctcggatgtaattccaaaggaatcggtccttagatgcgaccgcacaagtattccgcccaggaatggccttgtgtcgcaaattttatttttaaaactcattttctttcacaaggcaccgacccaggcgtcgggttttccaaagcttttgtaaaccaagttttacccaagaagttacacagattttaagtttgaaggagaccgtcgatactcgcacagagtgcacgaatatcgaggcgcaactagatagttacaagggaacatgatataacaattaacaatggaaggatcagatgcaacaagttgggtaggcccaccggtctgccttgcagacggggcaaatagattaagtgcaatcctatcaatgcataatatttttcaagcaaattaattaagttcaaatataggctcaatatgttcaaaggtggcttgccttgctcagggtcttgatcttcacgaatcttcaagaaatccgcttgacgaaaatccggtaaccgcaactatacgcaaacaatcaaaaacctaaccaaaagactgaaagaaagatcctatttagactaattaatagtgccattaaattgatatcaattttacggaactactggaagtagaacggagtcaatcggtcgagcggttgaggagatatggattttggaagcttaattggatttctggacaaggaaatgatctattggattttttggagtacgagaaatggcttatagaatttatagaaataatattctcaagaatattattgacagtcactgacatgcaggaccaatgggttgaattattggaatccccagattaagaggaaggattttatggaatttggaatataggaaatgttttatggagcaggagatatgatttattgcatttatggaaatgaatattctcaagaatatccttttatcactcattgacatgtggggccaacatatggtgagagagaggtgaattgggagggagcagatatagacttttggtcattgtgtttggcggagggagtaaaaatggacttcctttgtttcaatgggccgaggagggggagctggtcgatgggccaggcccacgagcggggagagagaagggggggggggtggctgactaggcaggggttgacttggtctggtggggtcagcggctgaggtggcgtccaggtggacgccacgtcggacagggaagggagaggaggccgggcggctcatcggatggccaacggcgctcggtgcgctccagcgaacggcggcgaatcggagtgggcggcaggcactggaagcgagaggaggaagcggggaatcggttccacggatcggaccggagagaaggggcgcgacggcggccggcgacggtggcgaagctcgccggattgccgacgtggatacgcgatgggagggaaaagggggcgcgggctatggttcgatcgaatcggtgtggtgttgcgacgcacacgcgttgggcgcggaggctgatggtcgccggtgttgctcgtgcggcggcgcggcgcggcaacgaaaaggcggctcggcgcgagagctgaaggggaggccggtggccacggggcagcaagggggaggtcaagaggggcccgaggaaggtggtggcgagcgggttcgaagagaaggggggaaccgacggcagagcgcggccgtgtgccgcggtggtgaatcgggcggcacgacgtgggaacaagaaagaaggccggcggctagggcggcggttcggggagagtcgagggggctccaggagggtggagacgagaggatacggcgaggggatggccgacggcggcgcgcggtcatgcgtggcggcagcgaatcgggcagagcgactgtttggggtggttcaagggagctcaaggcgggtggtggcgcggggagtccccgagagggtggccaacggtggcgctcagccgagcgcggcgtcggcgggaacagagcacggcggggtggtcatagcatcgagagtggcatggccggggaaacagagagggggcgcgaggagttccgggagggcgacagcgagctggttcggcgtacggtaaggggaaggggacggggagctcaccaatcggtgaggaatggtgtcggcggcgatttgaggatgggaatgggaggaaggccgttggcgttgggcggcgaggccgacggcggcgcgcggtcatgcgcggcggcggcgaatcgggcagagcgactgtttggggtggttcaagggagctcaaggcgggtggtggcgcggggagtcgccgagagggaggccaacggcggcgctcagccgagcgcggcggcggcgggaacagagcacggcggggcggtcattgcaccgagaggggcacggccggggaaacagagagggggcgcgaggagttccgggagggcgacagcgagctggttcggcgtcctttaaggggaaggggacgaggagctcaccaatcggcgaggaatggcgtcgcgggttnccggcccgnngncgaatttttgaaaggatgggaaggggaggaaggccgttggcggcgcacggggacgaacgtgacgccgaagcgggcgcaccagggaaggaagggacgcggggtgggacggtttggtgacggcgcggcgttcttggccgtggcgacgaaggaggcggcggtgctccggggttggccgcgcgacggggtaccgaggttgaggaaggatttggggctcggtgggtaggatttataggcaagggggagatcacagacgagctggcgctcggctggcggtggggcgatggtttcgtgggggacccgaaaacggcaacggcgagaatgcgttggacggcgaggtcggtggatcaagcggtcgaatttgaacgcggagcgcgggccggcacggtcaaagtgggggcggcgggattcggcgccgggaaggaaacgagatttggaaattgaatttggatttcgaacttgaaacttggtctcaggaaaacagggaggagtcaagggaatgcatccaagcgggaattcggtatttctttgggatagatttcaaagatagataggtagacggacggaccgatggatatcgtagagatagatagatcaacagagagatcggtagacggatagttagatgggttgacaggtagagagatcgatgattagatcgagagacagataggtcgatggataggtagataggtagatcgatcgaaagagagagggacgaaatgaaccaatcaatgagtttgaattttgaggattgacgacaaatgcggatagggttttacaagaggaatccgaatacggaaattcgaactctcggattggtgtaggtagattgataggtccaaactttagggagagggagagagatgggctggaatagaaggaagaagtggaccaggaaaaaggaagaaggaatccaacctatgagggaggttaaatagactttcacagagagatttaattggaaggttttagggctggagtctggattcgaatttcgaagtcgatacttggtctcgggataataggaaggagtcaaggaagggaacaatattcggagacgagtcaaataatttagagaaggagagtgtaacttgggagtttgagttggactactcgacgagatatgtgggtaagggatttagaagagaaatctgaatagaagggttcagacgagattatttggaacggatattatcctgggatagatctatactcggggattgttctagaattacttggatggggtttcaaagagaggggaaatctcgggaattgggtttcataaaaaggaattcaatatggatctgcaccaggggattcggagcaaatactcggaaatggtttcaacgaatgacagagcgataggtggagggagattacaaatatgggagttgagatcaattattcgaaagagagtcaagggaaggtagagagagagggagagatgaaattgagaggttaagttcgaattcgagagtcggtttgaaggaaacaagggagtatttaggtctcggaggtgaatcattggactgggttagggttcgggcattcgacaaagatcacgggtggggtttcaggatggaactccgaatagaagggatcgaacttcgggattatattgggatggaaattttgaggagacgatctttgataacagggtatgcagacaagggagggatttttaattgagatctatggcacaacttagactcaaacactcaaagaacgaaattttcacaattaggatttttaataaattagcttttaacgtctcgcgaaaagtggggcgttacactatggttttggattgttcattttcattcgatttaactttttgcattatgacagcttaagcgcccgcatgcgaaaatactgtattttcacatgcagttgctcttccccatgtaaaaatactgactttttggacatctgggtgtaggcgggtcatcccctatctgggaaaatcgattttagtcgcatggaaaaatcgtttgtgaagtagtgtactacttttcaattcatccaacaaatttgtacttattgatagttgcatcattaggtaattattgatagttgcatcattgggcgtgatttttccagtcaagtagagtacataattatataaacttccaagtacatcaaagagatttacctcaatatttatttctgctatttaacacacttagaagtgcccatataatcttagatggatgtatagctatcttcgtatatatactctctgtcccataaaagaaattcaacttttagctataaatataaatgtaggctatgtacggtttgtagcagaagttagtttttatggtttagatggagtagttcaagctaccacatgaactaatattccatcttcacctcaatcacacatccctccagaaccgcgtagccagcccatccgacggacgggcccacttacacataccatcccacttatacttttgtccatacttcgtctaaaaggttaacccggagtgatatagtttgagggaagaggccttataagggcgcacccttgctaaactagaaagtggtactaaacatgcgcacacagttatcatgggttacacaggcctaatccttattgggtcgggatgtctgacacacacccccctcaaaggacccgacgtccccgtcggtccaaatcacccacatagctacacaggcatataagcaaaggtatagaaacacaccccctgttagcacatgcccgaacgtccagtgttggcatcatatgccatgccatgtgcctcacgcaaagtccacatgcgccatgtgccatgtgccctcacactgacccatacgcgcaaccgcgagggtcggctctgataccatttgtaatggtcctcccttcggtggtactaaacatgcgcatacaactctcatgggctacacatgtctaattcttattgggctaagatatcacaagacatgtgctcgggtgtctatgtacaaggaagaaaaaacatgcatatcaatccattattatacggtaagtagtacatactagtacttgtggagcaattattatacggtaagtacataccagtgcttgccgagggatgccaatcacatcttaatatggtacctggatatatgggatatataatccaagtcaaaagtgaagttatgtgaacagctttatgatggaaaacgatggaaaacaactttcatgttcggtttagtgagcacttttttggttcagaataagtccttccctttcatgtgaattccccagcggccaattaacaactcgtggggccctatctattcattctctctggccccaagacgaccccctgtcccttggactcaagcacatcgctatgagtggaacgtagaccataacataatttacagatctaagatatgatcgggcaagtaaagaggttttaatatagtgctcgaaagatggttatgaatcgattgactaacccaattttatgtttagattcataactaggacttttttttactgagggagcatatacagtctgttctaagtcaaaatgtatattttatccatcaattagatttaatagatctcatatctcaaacattctctatcgcaaacttttaactagtgtaattatggatagtttaattaactcaagatttcactcaaatggccatcgtcacatctatacctgctatatagttacagcccactaaagctaaagcttaacgtgtaaacatgtcatctcatcgtccattactaataattgcgtactaagctccaacaaacattgcagcatcatctacaattcattaaattatgcaaataaaagtgcaagtatatccaaccatcaccattcacattattttcataatattttcaacatacatatccaacatttttataatacttaacatatatattcatccatgtaatagaagcgtgggatatcatatttcatccagaatctgctacagagtctataaagtttatttctctccttacatagtttagcaaacctgttttatctgttgttaatatctaatatttttttttacacttagctcgattattgaaaaaacatattaaaaattacccccttagtaatttccgaagcaaagcgcggggaatttcctagtatctatatcatccagtaccttattatctctgtctctctcgtctcatacttattcgcttgtttctataggctgtctctctcgtctcatacttattcgcttgtttctataggcccgttagaacgttgaaaattcatatggtcccctcatctcctaattataggaggttgttgggcatactcttatcccttctttatatgcggctcccaagagtattgaaaattcgtcgaacacggtacaatcatacgtaccatatttgtcctgacagtcacttgaattcattttatatgagagctgatatatatatatatatatatatatatatatatatatatatatatatatatatatatattatatttatttattttagggtgtgtttagttccacgctaaaattggaagtttgactaaaattgaaagtttgaagaaaaaagttaaaagcttatgtgtgtacaaagttttgatgtgatggaaaagttgaaagtttgaagaaaaagttagtaacttgttatatacgatgttcgtgtgacgtaacggctctctcctagaatcacgacgcaaaagcgaagaaagaacatgacatttaccgtccgtttcccagctaaccatgcatggtggcgttcaccatacgttcccaatcgcactaggaccgtcgtataagtctataagaagaaatcgttcacatagcattttttatctctatagcgcatgtacagcaacggccggaatatttgattatttcgttgtctctcaaattgtcaattgtcttctgcttacctcgctatatacccggaccgcgaaaaaaggtcttgtatgtacactgatctaattaatgcttctttgacaaactgcaatcatttcatcacaactattcacttatttaattaccaatacccacggagcgcaaggcggctatatcatgatcatttcacttcctatggagaattttcaaatacaggaaagtttccaaaccatcagtagattggcatagcagaaaaatacacatcaacaacagaaaaatagacgggaggtggggcctcatgcttattctccctccgaaattcatctacaatagtctatttcgttagaattttaaaggggattggttaaaaattagtcctttcttcaatgggctctatagaattatttttcatatgacacaaatgctctaatatttttatgttttgcttataaagtgcaagctgctagttgctttcacaggattagtgaagcaagagtataagttttgagcaattgagatgactgtgaaatttagtgttatagctcgagtccccaagacaagtatcctgcttggtcattgccttcgagtggtttaacatgcttaggttgaagttaataactggctaactattctatcaaaggtttctcctttgcttattacttggtgttgtggttattatattgaaagatgccaatcgtggacatggacacattcagagtgagtggctatatatatatatgattgtacatatggatcctactcattcaaatatgtgtggtacttgcggttggtatcagaggtcttacaaggtgctttgggctcactgcagaacacatcgggtcatacccaatttggtctgaccgatatagtttacttttggtagttctttctttcgtataagactttggtcttaagtttcaggctttcttccaaaaagctaggtgatcagatttaacaacagcctatgattgatggaggtgaacacatggtgaaaatagatcaaatatagcaacaaatttttcttgaccgggctctcagacaccccctcaatactctagctccacccctgcactaagccataattacttcaaagcaagccataattacttcaaagcaaaatatctcatgtatgcagttggctgttggcctagcaaccaacggaagaaaatattttgttatttcttagcagcctacttgagaaacacgtactccacattatgttatcgaaaaaaacaacaactgatgagtaaaaaaaaagaaacatacaaagattaatcagcaatgtttatcagtaagaattttgaaatcccactaaacacgcggggcatcaacgagatgttcgcgcatagcgaatgcaacgtaacaaaaagaaaatcaacgtggccgctgaagcaagtccagataagcgattcacgggatctcgttcgacgcgaatattcacgcaatatctttgtgcctctgttaactattgagaccgttttttctttctccatggccacacctcagttttggcctagcttccccggtgaagatgcaggagaacgtcgtcaatgctggtgcggcgctggaagcaaacgattgtttactccccggagattgtggtactgtattacactacctctaattcaattagctagagtttttatgtcattctcaaaaacttcacattcaatgagggataccagtgattgcaattttggtccccaccggcaaatcaatatatcgaccgaaatttttgggttttctcaaatttttgttgaagttggtcaaagtttattcaaattcattcaatattttagaaaatttcgatccgaaaattgccgaaaatcctaaaatttcataaatttcagtcgtactgaaatcgaaagtgtaaaccctagggatacctaagttattttccttctctactaaattgccttttcaactctacaattaacattcttttcggatgcatctgatggagggagtatatcccatcttactataaaattgctgctcactaacttttaaatctcaactagaaaggtagtccgcgcgatgcgcgggcatatgtatttgtttgttaaaaatcggtctgacaaattaatttcaaataaaaagtaagatgttttttcatttgactttttctttcagtgagccgagtcaaatgatgtggtgttttttttttcaatttgactcagaatcgtgctctctctctcgtgcggactctctcgtgaacggatcaacatatacgcggagtatgtgcggctgactcatggatgtcatcatcaagcaatagaggacagaatcatcttgaagtttttaagtaggttaagattaagaatagatctaatgattgaggatattgaaaaaaatcaatggttagtttttttaatataatttatatgaatttttataatttattagatggtcacatgtcggtttagggggattggtattattgccacatggcgatttagcggcgttacatgatctaaatttaatatttagtatttaatatgatgcttaaaaatttgatcttaaacatttatattagaagtttgagctatgtatatggattttgacttatgtatttaattataaataacacaataattcaaaaaaaattgagaaaatatgtaacttgagttttatgatcatttagaaatccgattattaatttttgatagattgagtatcagctaaaaaatagcaattagcttaagaaataggagagaaggggagagttaggagggtagagggagaacgtaagtacgtaagtgcgcatatatggaggtggtggtgaggatgcaggtatcagattttctttttagatgaagatctaacggttaaaattaatgggtccatcaattttagaaaaataatggctaaacatttattagaatttttatgatttttataaaaatctgttagctagaaaattaaaagaaggaaggaaggaaagaggggggatgtttgtatcgtgaggagaggaggcccgggaggaagggggcagtggagatgggttttggattttttctaaagatagatctaatgatggagtataatattatgtcaaccgtattaagtgaaaattgtgggctagttgttttgttttctcgcatagtttctttgatttctaatttattagagcatcatgtgacaagctataagtgtttgtaggaaatttaatagactttagctaaataataggaagggggagagaagaggagagccctgagtttttctgagagggaagggtctatcaatttaaataaaatcgatggtcatatgtatttttttctcaaaaatatgatttttaaaaataatttattagatgtgaaatgtgaagacatagaggtgttgtaatggacatctaatagatgatgatatgtgatatattatcaatttttatataatgtttaattgatgtttagttgtcacggaaaggatatggatttatgtctgaaaatatatttatcatatatcaagaaaagcctacatggatcaaactaaaaactgaatatatttaaaaaatatactaatcatttagctatctattgtttatatataatcatttagactatgtgacaatcggccaccgtaacagaggaactcacatcctgtaactatatctctaacggcttatctttttttacctattagatgaccaatcggatgtctatttctatatcgaaaacagataaccaatcggatgtctatttttatatcgaaaacatagtaaaaagagtgaatataggacttcgctcattaattaatttaattaaacatataatcattcaagcgtatcataaaattaatgtatagatcgtccataaaaaaagttagtgcttgcatgttgcacagccagctcgatgctccatgcatggaaagatataaccatttccaatattaagttatcatttccaatattaagttatggtgcatatctcgtaataactaccttaattagaaaaagaagaaaaaagaaagagtaaatgaggggaggataggcgtacttacatacgtaagagggattttattttgatatgatgttttaaattattgggtccactattttaaatgaaaatcgactgctagatattttgttttttctcataatttctacaatttattagagcatcacatagcggctctacatcttttgtaggagtgccacatagcagattacgaacatttgtagaaagtttaatagacatttagtatataatagattaaaggtatcagttttttaattaaccgacactcatagtctattaaaggtgcctggtgttatgggtgnnncnnncannnnnnnncnnntcnnnncnccncnnnnccccncaaaaaccctccccgcaaaacctccccacaataaaccccccacccccatcactaccacaaatacccaaaanaatattcttcaacaactttctcccttctttcaaaaacacattatccttcctatttcctatcgactttttttggacaactccctctcattaataatgtaaagtctgttgcgcctggaaattccctcgggtttatttttggcttgagggaaatctctgtttgcttaaaaattttattaaaaggtctctccactcggctttggaaattgctaacgccctcgggattccaggggttcgactgtctcttttcctgggaaccgggcgggttccttaagaatttttgaccaaacactttttgaaagggcctggttttcccggtttgaaaccaaaaattggccaagcttgtgtcgattgcccc

SEQ ID NO: 17008 - DNA, 23506 bp, Oryza sativa
ccgctctggtactagacccagtggttagcattgtcaagctcggcggactcttaattgaggcgggcatcgcactcaacacctttttgttaagaccctggactaaacacacattccttgggcggaattaatacccaagtaatgcaccctccctcggtgttatccaaggattgtcagctacacaaattggccagatccctgttccagttacattaggcactaggatgaatattcgcgcagcctataacaccaatctctaaatgtttttacataaattttgctttttattaaaagaaggaaaatatgagagataaaaagataatagaattaaaagataataattggagtaggagcatacggagtacgtacgtgtatgtacatccgcgggaatagtgagcccaagtggattaggatgggtggactatttttttttacatctaatctaatggtcaaaaataatgggtccactaatttaaataaaaatcaatagttagatgtttctttgccacgtggtaggttaggagcgtttgtagagtgccacgtgacgatccaggagcgtttgtaggaagtttagtggacttttagtactccctccgtactcataaaggaagtcgtttaggacaatgtttaagtcaaaccctaagaatataaatcatgaataactttcaaattgttgagtttgaaaatgtaaaaattatatgaatatatttgtcttgaaaaatactttcataaaagtatacatatatcacttttcaataaatatttttatagaaacaagaagtcaaagttgtgttttggagaccgtgtcgttgtcttaaacgacttcctttatgagtatggagggagtatataatagatagatagatatgcaagtgtgctacatcatcatctactagtaattattatatagattattttaaatatcatataaatatgacatatcatttataatattgttgtatttttagaacttaatatatatgtaatcaatgtcgaaccattatctccacatcatttatatattatttaaacatatatatctatcatgtataatatgcattcatctatatattccacggcaaagtgtggtgtatcgactaggattctatataagtacagcagctgtaagcattaaaggctgcctggaaccacacacaaagcaggcagccaagcatagcccacagcaagctcgaccatggcgtccctctcctccctcctcctcggctgcttcctcctcgcagccgccatcttcctccaccgcaacggcgcctccaccactaccacccacctccatttctacatgcacgacgcctacaccggcccggctcccaccgccatgcgcgtcgtctccggccgctccttgctcgacgatggcggtgacgcggtgccgcgtcagttcggcgacatcgtggcgctgaacaacgcgctgacggaggggccatccgccggcagcacgcgcgtgggcacggcgcaggggttcgcggtgcgggtgtcggagggcggcatgtgtggagattatggatacccatatctacatgacagttgtaatttagtcggatatacggtaccaaatatagatggaatatctctatgaagactcgggttaggttctaaacttgtatgtcaaggaaatacccgggatcttagtcggttacgtttgtattttatctataatcccatattccgttaggatatggattgtattttgtaaagcggactccttcccctatataaagagggtccgtgtgcctcttgggcgcgattctttttcccaatttatacaatcaataacacactcggcggaatcatccccggacaggagtagggtattacttcttgaataagaaggcccgaacttgtataaaattcttcgtctccaaacccatccactttcctagcttgatagccacccccttttattattgccgaaatcttgtttcgacagttggcgcgctaggtaggggtagcgtcaagttctcaccgactaagtgcgataggtttcgtttctggcatcgacgacttcgccttccctcccgggcaggcgttccggttcggcagcctcaacttcatcacgaacgacttcggcaagatctctcttcttgactcggattcaaaccagtcggggagagaccaggtccccgtcccgtttggtattccgaactcggccgaggcctactccaagatcatctctcccgagtcggcttcaaaccactcggacgagatccaatctactcttccgcgaccagatcaagacgacgggtcctatccttcaatcctgatgaaacttcctgatgatttgccgctgtcttcacagtcaagacatctcctactcgaagatctaggcgagctccggcttcggccccgatccgatctagatccagggaggttggcgttatagtccaacctctcgggatagtctcgacggaagagttggatggctacctcagctcccctagcgtcagttctcgaccaaccgagatcctcgactacgacgatttcggctaccactacgaccacggcgacctcgacaacttcgacgacagctatgaggataactacacgcccctcttcttcggcgtattcatggctgacaacgaaacggaggaacaacgctaagcccgagaagcggaccaagatcgcgcacggcaagaagctgaacgtcgccgactggaggaagagcgacagcgacaagagcgagaacgactacagcgtgagcaacaagatcgcgaacggattgcaaaggaggctgaagatcgatgacaacgtgccttggaatctgggcggcgagcgagagagctcattgggcaacaagacgtcgatgggacagcggtctttcgcacccccccagcagaacgcggttgcagcaatcactctcctcgacaccctcctcaaggaagacgcactcaaccaagccgatcatgtagtcaacatcttgaaccagacgaagaccatgatcgctgcctcggttccagccaactctgcaagcacccgcaccccgactggtagccgagtccctcaccagccgagcctcagcattgccggcgccgaatctagtcgtaggagcaggggacatgatgaacggtctgttcgttcgcctcccgagcgatatagggagcgccgagttgaacgaccacactccccacatcgaaggcgccccatcgatcttcgcgacaccatcaaccagcgcgcgcagcaagaggccatcattcaccggatcgctacgacgacgacgtggatggagttgctgccttcacaagcgatctgcgtcgagtggattggccagccggctttaagccgactggaattgagaaatatgacggcaccaccaaccctgagtcttggctcaccgtctatggtctcgcaatccgcgcagcaggaggagacagcaaagccatggcgaactatctacctgtggccctagcggattctgcccggtcatggcttcacgggctaccctgcggcacgatcgcatcatgggcagagctactcgaccacttcatcgccaacttccaaggcacttttgaacggcccggaacacacttcgatctttacaacattgttcagaagtctggagaatctcttcgagattacattcgacgcttcttcgagcaacgcaacaagatctccgacatcaccgacgacgtcatcatcgctgcctttactaaaggcattcgccacgaggacctagtcggcaagttcggacgcaaacctcccaagacggtcaaacagatgtttgaaaaagccaatgagtatgccaaagccgaagatgctatcacggcgtccaagcaatcgggcaccacttggaagccaaagaaggatatgccgaccgcgggagggagtggaagtaacaaccacaaggatcgcaagcgtaagcccgaagaacttgtggcgaccacctctccgtcttcccgacaacgttcccgcattaacaccttcgacaagataatgaacttccaatgtccgcatcatcccaactccaaccacgtggccaaagattgcttcgtctacaaacagttcgcggagcaatacgtcaagaacgcatgtaaaccctcagacggagatcaaggcacatcaaagaagaaagatgatgaagacgatgccatgactggttttcaagatcatcgcaaagaacttaatcacatcttcggcggacccctggcttatgaatctaagagaaaacagaagctaacagaacgggagatcaatgcggttcagcctaacacgccccaatatcttcggtggtcagagatagcaattaagttcaaccgctcggatcatcccgaccgagtggtccactcggggcggtaccccctggtactagacccagtggttcgcaatgtcaagctccgacggactctcatcgatggtggcagcgcactcaacatccttttcgctaagaccctggacgatatgcagattccttgcacggaattaaaaccgagtaatgcacccttccacggtgttatcccaggattgtcagctacaccactcggccagatcactgttccagttaccttaggcactcgggagaattttcgcacagaaaatgtttgtttcgaaattgctgatttcgagacagcatattatgctatacttggacgaccggctttagctaaatttatggccgtcccacactacacctacatgatgatgaagatgcctggtcctcgaggagtcatatcactacggagcgtcatcaagcaggccgtcacatgtgacaaagaaagttgtgagatggcccaaacccacgagactactctcgcccgcgaagagatccgactggctgcgaccacggcaagcgagggagaagcgcctgcaaccaagctgacgaagaccgaagaaagtgatgccaagacgaaaaagattcccttagatccctccgatcctgataagactgctgtaataggcgctgagttagattgtaaataggaaagtgcgctcatcacctttcttcagaataataaagatatttttgcgtggaaaccatccaatatgcctggtatccccagagaggtgattgagcactctttacatgttaaggaagacgccaaacccatcaagcaacgactccgccgttttgcacaggacaggaaggatggatcaaggaggaattaaccaagctgttagcagcaggcttcattaaggaagtccttcatctcgattggctggctaacccagtcctggttcggaaaaagacggggcaatggcgcatgtgtgtcgattataccaacctcaacaaatcttgtcccaaagaccctttcaggttacctcgcattgaccaggtggttgactcaacggccggctgtgagttactcagcttcttggactgttactcgggatatcatcagatccggctaaaagaatccgactgcttgaagacctcgtttattacgccctttggggcctactgctacatcaccatgccctttagattgaagaatgcaggagcaaccaatcaacgcatgattcaaagatgtttttcaactcagatcggtcgcaatattgaagcttatgttgatgatgtagtcgtcaagaccaagcagaaggatgacctgattgcggatttagaagaaacttttacaagcattcgtgctttcaagatgaaactaaacccggaaaagtgcatcttcggagtaccgtcagggaagttgctcggatttatggtatctcaaagaggcatacaggccaacccggagaaaatcaacgccatcctcaacatgaaaccgccaagctcccaaaaagacgtccaaaagctgactggttgcatggcggcgctcagccagttcgtctcacgactcggcgagcgggggatgcccttcttcaagctgctgaagaagattgacaatttccagtggggacccgaagcacagaaagcctttgaagatttcaagaaacttctcaccactctaccagttttggcctcgccacatccgcaagagccgctactgttatatgtgtcggcgacctcccaggttgtgagtacggtcctggttgtcgagcgtgaagaggaaggccatattcaaaaagtccaacgtccaatttatttcgttagcgaggttttagctgactccaagacaagatattctcaggttcaaaagttactatatggtgtcttaattaccgtcagaaaattatctcactactttcaaagtcactcggtcacggtagtcacatcgtttccactcggggatatacttcataaccgcgaagtaaacggacggattgcgaagtgggccttagaattgatgtctttggacatatcgttcaagccacgaacttcaatcaagtcacaagctttagctgatttccttaccgagtggaccgagtgccaaaaagacatgccagaggaaaagatggaatattggactatgcattctgatgggtcgaagaggcttacaggcactagagctggggttgttttaatctccccgactagagaaagattgagctacgtattgtggatacatttttctgcgtcccataatgtggcggaatacgaggcgctactccatggactaaggattgcaatatctctaggtattcgccgactaatcgtccgtggagactctcagttggttgttaatcaagtcatgaaagagtggtcatgtctagatgataatatgaccacttatcgacaagaggtacgcaagttggaaaataaattcgatggactcgagctcacccatgtcctccgacataacaatgaggcatccgacaaactggccaattttggttcaaaacgggaagcagctccttcagatgtgttcgtcgaacatctttacgaaccgaccgtgcccagaaaagagacagtcgaagccatggatactcaaggcgtaagcatgatcaaagccgactggagagaacattttataaaatttttgagcaaacaagaactccctcaagacaaaaatgaagccgagcggatttccaggcgcagcagactttacattattcatgagaccgagctgtacaagaaaagtccatcaggaatactgcagcactatgtgtctttggaagaagggagacagttgttgaaggatatacattctggtatttgtggtaatcatgccgctgcacggaccattgtcggcaaagcttaccggcaaggttttttctggcctacagctgtgtctgatgctgacaagattgtgcggacatgtgaaggttgtcaattttcttgccagacaaattcatttgccagcccaagagttgcaaaccatcccgttatcctggccatttgtggtctgggggcttgacatggtcagcccgtttaaaagggcagtcggcggttacacgcatctctttatggctatcgacaaattctccaagtggattgaggctaaacaggtcatcatgatcacagcagataaggctagagattttttcatcaacattgtgcatcggtttggggtacctaatcggatcatcactgataatggcactcaattcactggcggagcatttaaagacttttgtgaagacttcggcattaaaatttgttacgcctccgtggcacaacctatgagtactggacaagtcgagcgtgctaacgacatgatacttcaagggatcaaagcacgagtttttgaccgactatgtccctatgctggcaagtgggtagatcagctgccgtccatactttggtctttacgcactactcctaatcgggctaccggccagtcgccgttctttttggtttatggcgcagaagcaatgttgccgagtgaagtggaatttgaatcactacgatttcggaaattcaacgaggagggctatgaagagggccaagtagacgacatcaatcgactagaagaagcccgagaaacagctttgattcagtcgactcgatatttgcaagggttgcgccgttatcataatcggaatattcgatcgcgagcctttttagtcgacgacctggttctgaggaaaattcaaacaacacaggatcggcataaaatatctcccttatgggaaggaccgttcataattgctgaagtcactcggccaggttcttatcgactcaagcacgaagacggtactctcatcaacaattcttggaatattgaacaccttcgtcgattttatgcttaggcatttcgtttgtatctttcctctttgactgctaacttcaaggttttccttgaagttttcagtcagggggctactatgataataatggagtgtgatttttatcaattcaatttgcttacttgatttatcattgccctgtttggtctttcgtcttagccaatgaggactgaaggtttttaatagcttttgtgggttttaggctcaataaggtttgacaaaggcttttaagaaatcagaagctaagtatggaacaccaagcatagcataaattcatcagtattgtacaaattgagcctccaccgtcattgatcatcaaaatcattgttatatcaatcagtatcagttttttcatcatcagacttatcagacccagttggccgaaggtcgaaatcttggaatctctcaactacatcagcagcaatcttgtcagcggctttctgctcatcattgatgaggtcaagagcagcttcttcgctcgtcccgtctgcaaagccatcaatggcatcaatgtcaactcttggataaagggatttggtcatcgccaatgccagacttgctcccatacttccagcttctttgatgttcttgaagtaagtatctggtgcgactctcagcttgtcgaagatttcggcagcatcaagtgtactcgaaccggcgttattgaagaacatggcctagataagtggagtagcggcattagcgactttatccctggctccttcaaacttgttgatcttgtcaactaagacatcaaattgtgcttgagacttgatcttgcggtttgcgtcaacagattcacattaatgaatcagcatatagaagataatggcttttgaggtattgattattggtaccttcaacctcctttaaagccgaatccctctatcttgccagctctgccttgtcattttccagagtttggatctgtttctctagttgagatatcttggcagcttgcactacattaacttcggttaatcaagattacagagataacagcacaaatcagttgggcagagtttgcgcgaaccttttgatgagccactcagttcgaaattggactcctggagctcagcaatccgatcccacagatcatgttcattcttcttggcaagttctctggcctcgtgcaattgactcctagtggcttcgagggttccaaaatgaggaactagtctctctagggttgcggttttcgcctcgttcctaagatgaatcctctgcggagcagtttaatcagcgctcgagccagacggcaaacaagatggctgaggtcaggcgtcaagggacttacatttacaatgcgagtcgcttggttgagtgcctttttcagtaggcatacctcttcatcttctttttgccggtttattacaattccttgaggttgcaagttgtcatcccaccacttgaccagaatgggagggcacgaatcttcggctgcttgtatacggggaatttcttcttcatcaccgatcattggtcctaatgtatccattgacaaaggttagacaatcgatcagagttatttgggtcaacatggtttcagacaaagtgtttacccgtaatgatttctggacgaggacgagtggattcggatgcctttaaaggggatccagatctctggtcattgctggcgtcttgtccgtgagggttgtctgcttgggtttcgacttctggaacctcttggcttggccctgcgtccgactggtttccagtcgggggctcctgattaactccggcttcggcttcggccgactggtttccagtcgggggttgatcaccggattctacattatcggttgccggctgattgtcactcggatgatcctcagcagttggcccggtttctttggaagaacttgtgtccatgttagtcgggtcagagtcttttccagacggatctatatcagatggtttcctgcaaatttgattatcagtattattgccacaatgggtgcgcatcaatgcaagagagatcgttatgtaagttgcacctagaagacttcctgatctttggcacagggcgactggatgttttcttccttggtgtagcctgttttgatagtttcttggttgtctctcggtctccaggcctcctggcggtatcatcggcttcgtcgtcacttaaaaccagcttcctctttcgagaatctggctggctgattggatcagaagcacttggttgagttcagaccgaattcgtggtcctccgctcccttgcccagtttggtggcggggagatcggcgttgagcgattgggggatccgacttcatcaaagcaaattcctgggtgtaatatccttcattgttaactaattcaacaagaaaataagatcatattttgagaaaggttgaagtgtatgaatacgtaccggtggaggaggattgaatgcattgaacggtacgactggcagcaagtgtgagtagctgacaacgatggcgtttgagaagatcttatacatcctttccttcatgaccttgaagtcaagagaatctggatcttcacggtttgggtcatgcttgccgtcaaattcgaaggctgtgcgagatctttctttgattggagctaactgacacttgataaagtgccgggtgatctgttctccttgaaggccctgttctttcagctttatcattctctccatcagttctactgcttgtgcagcttcatctcccattggcagtgagttccaagtatcccgataaactggaggaaggcaggagtactcgggaagaacaggctcggggttttgaacataaaaccaatttgcgtgccagcctttatttgaggtcttgaagggcatggagaagtatttttggcttagtgttcccctgagttggaaaccagcacccccaacgacgcatggtttgctcttatttagctggggcttgaggaagaagatgcggcggaacaaggcgaaatgaggcctaatgcccagaaaagcttcgcaggcatgaataaaattggcaatatgcactatagagtttggattcagatgatgcaagctaatcccgtagaagttcagaattccccggaaaaatcttgaggttggaagagaaaatccgccatagaagaaatgagcaaataccacgatttcgtgtgtatcgggggtcgggaatgcctcaccaaatgccggtcgccacccgatgatctcttttgctggaagaacgccgtgcgccaccatctccttcagattgtcttccgtcacatcggagggcgcccactgactctcgaagctttctctttcttccgccatgaatgtgaactggatggtctgatttagttcgagatacggctggaaagggatggggaatcggagcggtggatgcgaggagaaatttcgtgaagtttttgagggtggattggagcggattgatgaaccctagtttgcccggcgcagttttgcactgtagcaggaaatggggaaagtggcgagagtctcggcggggaagacgaagagacgtttttcacttcggtattattggggtatcgggagtactaatgggcctgggcctgtacagtacttcagcccaatactataatcagcgtggcctgttgtgatccctagggacttagtcaatttttgctttggcaatttgtgttcacaatggtgtggcccaatgctgttaaaatcctttttaacgcgattcaataattctttggaattattatgatgcatataaaaaggtgcccgacagaaaggtgttataccattttttgtaagctttattaggctgcaaaagctgtttgggttgatttgagatgactggtttattaataatcattcttttagcatgttatatgcttattttggttatggtaagggtcacagcctaggctattagacttattaattaccatgattttctatcatgtttggtgggtcattttatgagatttttactcggattcctatcaaacatgtctatttttggacctttgagtgtttatcactcggcccttcttgtattttttgtccttggtatgttcaagttgagaagcagtcggctgggtatcttactaagtaccatgcgtgcttcgctataaaaccactcggttcttgactatatgtttagtttttcaactaatcacatagtcgggggctacacctaattaggtacatctactcgatgcaccatgttttattttcgcccttcacagtttttgatctttagcactcggcaagctggagcaagttgaattgaagcactcggactactgttttttgtttcgagaaggctattttgtcaactgcgaacgtctcgggggctactgtggagattatagataccccatatctacatgacagttgtaatttagtcggatatacggtaccaaatatagatggaatatctctatgaagactcgggttaggttctaaacttgtatgtcaaggaaatacccgggatcttagtcggttacgtttgtattttatctataatcccatattccgttaggatatggattgtattttgtaaagcggactccttcccctatataaggagggtccgtgtgcctcttgggacgcgattctttttcccaatttatacaatcaataacacactcggcggaatcatccccggacaggagtagggtattacttcttgaataagaaggcccgaacctttataaaattcttcgtctccaaacccatccacttttctagcttgatagccacccattttattattgccgaaatcttttttcgacagcgtggtgtcggacctgagcctgcacatggtgctggaggccggcgagcaccgcggcagctcggtgacggcgaagggccgcatcgacatggacgccggggagcgcgagtcggtggtgatcggcggcacggggcggtttcggctcgcgcgcgggtacatggtcaccaagaactacgactacagcctcgccaccggcggcgtcgtccagatcgacgtctgcctgcagcactagctagccatggacagaaaacgcacgcgactgctgcatatatgcatggctgcatcatctgtgcgaggagttgtgcagcggtggattcaggaagtaatatctgaacaaactgaaaaaattagtacttctttctatctgtatatgttaaaaaaatttgatggggtttcgtgcgggctcctattgtcctcatgttcaagatcccgatgcctgcatgatagatctgccataaagttgtgtgtatattatccgtgtggaatgaaaatccatctcctatatacgtagaaactcctcaaagtatcgagaagttgtaactacactactatatattgtccagttgatgtattgtatcgagaagattgagtaacattaatcatatatttatttatggtttatgtagcccttgatagttgtttgttttgataaaaaataattagcacgagctagcccttgatagtttctttgctctaagtataataatttttgaatctgaaattaataattaagaagatgtatatgtattggcattgtctttatcgtacaggtgatgtggtgatatgagctgatgctatcagctgaatatttgaacatgtgcttaataatatttagacaagtgtttggatctgtacgacaccactatggtttgggcgtcaggtatttagcttaaaaatcggacgcccacctcagcgtccatcacatgcaggcgcaccacacaaagcttgtaaaatcttgcgtagccatgtagctaagtctatattcatgcatgcatctaataaaaaaccatggttagttgggtggtattagtttttctttagcaatctataaactaccttttctcttaatttacttcttcaatctacgatccatggcactattaaattcgctgcaattaaatctttataataagaccacatatggttatattttaatgaaaaaatatttagcatttttacatttcttttaaatgatgcacaaattttatttaaatgtttcaactagaatacatatgatgttgcactagttaacttgcaaatgttgcacctggtttttctggaatgtttcaggaagtattttataatgtttcaatatttacaatttaatattaatatgtgatataaatatgactttttttcgttctttgggacttaatgtttcatataggtggttactattgttgcaatcggtatttttaatttttgcatttctctgaaactctttatgcagtgaacaattttctttaaagggtgaaacaatatttgattttttatcaaaatataattgtgtgatatattgttataaagatttaattgtaatacaacagtgtaatcaaatgatagaatggataattattttgaaagaaaaacatttgaaaatgggagaaaacgtgcaaatgagcaagcaaaaacttatgtggacatgcgcgaatgacatgacatgatatgcatgtgtagacatacactatggatgagaaaaggagagtagtagtgagagagagagcgcgtaaaatatacaacagtactctgtctgtgccatcaaaaaccaacctagacaggatgtgtgacatttttttagtataatgaacccggacatacccttatcaagattaattgtataaagaaatgtcatatctcatcctaggttggttttttataggacggatgttgtctttcctagaacatgaattaatcagttaccctcatctcaatcacatcaggcaatgtcttcattataccaatggtatggctgatgcctggcttaatatatattctgacatgtgcagttgtgcaccgatttttatgtacgagaggaagaaattaaaatatactccatccgtcccaaaatataagggattttagaggaataggatactttctaggactatggacaagcttttttttttgtctaaattcgtagtactataaagtgtcacatccctctaaaatcccttatattatagaacagagggagtatatatcgttagaaattaaaaggtaagaaaaacagaactaacatgtgggctccatcgcttttaaggtagtagaagtaactcttttcagaagtagaagtaactacattctctgggaaagaaactcttcgtggtatttgaaataactatactattacaggagctatgaaaaaaaataaaaaattaaaataattggaaatttttaatattggacttgttttgttatatattttgagtgaagtacgatcgttcaaatatgtagatgtttaaaataatattgtcgatgttttaggtcacaactacatggtaaggggattgtcggtaccaaggtttatgcaagattgaggtaaaagagatagagacaaggatttttatacaaggatttttatacaggttcgggccccttatttggcaagtaatatccctactcctgttggccgaagccggtgttgctatttattcatcataatcacaccagtacaaaatttgggataatctatcaaccgttgtcgacttggcggcctagaataccatgatgtagtcgacaacgggatagtcttcctccttgaatccgcactcggcgagattagagatagcgctagatcccttgttagcctctacaggcactatattgggtttgtctaggcttatttttgatgttgatatctggcagcttgtcttggcgtgtgtttgcttgtattggtctgtgtctatcttgattgtccccctctcctcctagggggtctatttatacccataggtgtccccttgaccaaatagaactatagggaccaatatggatacaatccgagtagtccctatagtttccatatagaactctacttgtccttccttattcaaaatacctttcataagtgaggcctaattccatataagacttgatatgtggtgggtcccgccgtgcttaattaactactattaggtacgtataagacttgatatgtgttgggtcccgccgtgcttaattaactactattaggtatgtggtatttataaccatgacaaatatatataccgttgaaaagatataagtgattaaaaaaatactactccctccgtcctaaaatataagcatttttagcatagtgtcaagtcaaacttttaacattgactattaatagaaaaaataaaaaatatccatcatgtaaaattgatgttactagatttatcattaagcaaactatcataatatgtattttttttatttacaacatcctatttttatatatcatcttgaagactgtgtcgaagtctaaaaaatgattatattttacgacggagagagtacatcaatggtactgtttctcatagcatgtgaatagcatgctacattctttttgaaaatatgagtatgaccagataagatactttactatttttgataaggccaagtttatatgggactaaaacttttgataaggcccagtttacatgggactaaaactttttagttcctctccatcgaatgtttgacgctaatttggtctattaaacattaactaataataaaactaattgtataaatgagagctaattcgcgagatgaattttttaagcctaattaatccataattagcaaaagttgactgtagcaaaagttttgctaattatggattcgactcgccaattagctctcattcatacaattagttttattattagtctatgtttaatactctaaattagggtttaaacatccgatgtgacagcaccttaaagtatgcatagtgtgtagatatgtttttttaaaactttcacacgaggaggagcccagttcgtttttttttaaaaaagaaacgtttcgcttgcgctagcactcgctatcttgtcacgtccataagtacatgccattgccagctgcaacaacacactgcaagcagctgcatgccatagccccacatcaagctcgacaatggcgtccctctcctccgtcctcgtcggctgcttcctcctcgcagccgccgtcttcctccaccggaacggcgccttcaccaccaccaccaccacccaccttcacttttacatgcacgacgcctacaccggcccggctcccaccgccatgcgcgtcgtctccggccgctccctgctcgacggcgacaacggcaacggcaacggcaacggcgacgacggctcgccgccgcggcagttcggcgacatcgtggcgctgaacaacgcgctgacggaggggccatccgccggcagcgcgcgcgtgggcacggcgcaggggttcgcggtgcgggtgtcggagggcggcgtgttgtcggacctgagcctgcacatggtgctggaggccggcgagcaccgcggcagctcggtgacggcgaagggccgcatcgacatggacgccggcgagcgcgagtcggtggtgatcggcggcacggggcggttccggctcgcgcgcgggtacatggtcaccaagaactacgactacagcctcgccaccggtggcatcgtcgagatcgacctctacctgaagcactagctagaagtagcacggagctagccatggacagaaaacgcacgcgaccactgcatatatgcatgtctggccgctgcatcgtctgtgcgacgagttgtgcagcggtggatttaagaagaaataaaaatttgatgggtttcatagggctcctattgtcctcgtattagtacgtaccccctccgtttcgtaagtcattttagtattacccacatttatattaatgttaatgaatttagatactatctagattcattaacatcaatataaatatgaaaagtgctagaatgacttacattgtgaaacggagaaagtagtaaaggctcaagatccggatgcccctatgatagattcaccctaaagttgtgtgtatagtttccttgtggaatgaaaatccatctcctatatatgcatatagttcaaagtgtcgagaagtagtaactacactactatatattgtccagttgatgtattgtatcgagaagattaagtaacattaattatatatttatttatggtttatgtagcccttgatagttgtttgctttaaatataataatttttgaatctgaaattaataaataagaagatgcatatgtattggcattgtctttatggtataggtgatatgagctcacgctatcagctgaatatttgaacatgcactcagtaatatttagacaagtgcttggatcggtacgatatttagcttaaaaatccgacacccacctcagcatccatcacacatgcaggtgcaccacacaaagcctcaaaaaccttgcatagccatgtagcactggtggagaaaccatctttcgtcggtcggccgatttccacaatagtcccggatgcaataaaaaccggggctaaagatgatctttagtcccggttcaaaagggtaacgggcatatttgatctttagtcccggtttgtgttaccaaccgggactaaagatcatctttagtcccggttcgaatgctgtcaggacctgtcaggcccccccgggatctttagtcccggttggtagcaccaaccgggactaaagatcttaactttagtcccggttggtaataccaaccgggactaaagatcccggtgatctttagccccggttggtgctactaaccgagactaaagatcttaactttagtcccggttggtaataccaaccgggactaatgatcccggtgatctttagccccggttggtgctaccaaccgggactaaagtcccacccctatatatatgtcttcttcctcctccagctgcccgagcaagcttcaaaatttcttcaaaaaagaggggaggtcatgccaaaatttctattgaatttattttggtgattacatacaaatcggaggtgcctaaaaggtttgcaacttcatcctccaatgttttttttttgtcatactacatttgcacctatgttttgcacactttttttgtctccaaaatttagttgtaagttgatgagagagaaaatgtgtgtggggaagaaagaatatatagaaatttagttcatttgctaaacaaggttttataaaatagttgagaaggaaaactctagtgaaagttaatattaaataatagaaaacaaactaaaataaaaattaaaagaagtaaaacacattaaaattagtttaaaactttacaaatagtttttaagaattatttggtgtaatattttatgatttttgtatgaataaagatatcttataattattgtatgactgtcattattgtaagaataattatttgtgtgcggtttttttgactcatgtagatggatcggcaatggatgtacgctgaccggcggtccaaagagtttattgacggcgtgcactattttttgagagtggccgaagctaacaggcaaaggggttttatttgttgtccatgcaataagtgtaagaatcagaaggagtattctgcatccaggactattcatttccagttgtttgagtcggggttcatgccaagctataattgttggacatcccacggagagcaaggtgttgaaatggaagaagatgaagtggaagacgacaatattccggactttgctcagtatgttggatttgaaggaaatcaaacgggcgaggaggaaatagctgctgatggtaacgacgttgcggatgatcttggtcagatgttgcaggacgccagggaagactgcgaaagtgaaaaggaggcccataaattggacaagatgttggaggaccacagaacttcgttgtacccaggttgcgagcaggggcacaaaaagttggataccactctggagttgttgcaatggaaggcaaaaaatgaggttagtgacaaggcatttggcgatttattgaaactcgtcaagaacattcttccggggggaaacaaattgcccgagacaacgtacgaggctaagaagatagtctgcccgttaggactggaagttcataagattcacgcatgtccgaacgattgtatcctatatcgcggtgaggagtatgagaacctagaagcatgccctgtttgcaaagcactacgatacaagattagacgggacgatccaggagaagttgacgggcagctaacaaagaagagaattcctgctaaggtgatgtggtatttccctataataccacggctaaggcgtttgttcaggaacaaggggaatgctagaatgttgcgatggcacgctgaagagcgtcaacaggacgggatgctgagacaccccgccgatggttcgcagtggcgaaacatcgacagaaaatttaaagaatttggaaaggacgcacgaaacatacggtttggtttgagtacggatggcatgaatccttttggagagatgagcagcggccatagcacttggcccgttacgatgtgtatctacaacctccccctggctatgcatgaagaggaagtacataatgatgccgattattattcaaggccccaagcaacctggtaacgacatcgacgtgtacctaagaccactggtcgaagatcttaaacagttgtggaagaaggaaggtgtccccatgtgggacgaggacaaacaggagtttaacctacgagcgctgctgttcgtaaccatcaacgattggcctgcacttagcaacctatccggacagtccaacaaggggtacaaggcttgcactcactgtatggatgaaacagaaagtacgtatcttaagcactgtaggaaggttgtatacatgggtcatcgtcgattccttgcagcaaaccacccggtacggaagaaaggcaagcacttcgaacataaggccgaccaccgtacgaagcctaaacatcgcagcgggaaaacagtgtttgctatggttaaagatcttaaagtagtgttcggaaaggggcctggaagccagcatatagagagcgaagatggtcacgcggcgatgtggaaaaagaactctatattttgggagttaccatattgggaattcttggacgtacgccacgcaatcgacgtgatgcacctcactaagaacctttgcgtaaaccttcttggcttcctaggtgtatacggaaagtcgaaagatacactggaagcacgtaatgatctgaagcatatggaacaacgcggcgaccttcacccggaaccaaaggagaaaggaagccattacttgagtccagccagctacactcttagcaaggcagagaaggaaagtatgtttgaatgcttggagagcataaaggtaccatctggatactccacgaatatcaagcgaataataagcacgaaggagaagaagttcacaaacctaaagtctcatgactgtcacgtgttgatgacacaactgctaccagttgtaataaggggtatccttccagacaatgtccgggcaacaataacaaagctatgtgcattcatgaacgcaatttcgcagaaggtcttcgatccggatagattagaagcccttcagaatgaagtggtgcaatgtctcgtcagttttgagttgatatttccaccttcatttttcaatataatgacgcatctgctttgtcaccttttgaaagagatccgtattctcgggcctatgtacctacacaacatgtttcctttcgagaggtacatgggcgttctgaagaagtatgttcgtaaccgtgctcgtccagaggcaagcatcgccaagggttatggaacagaggaggtcatcgaattttgcgtagaatttatcgaagaccttcgcccaatcggggtacctgaatcacgccatgaagggagactacggggaaagggaactctcggaaggaaagcaataatgacggtagacaacaatttattccgtaaagcccatttcactgttctgcaacactcttcattggtagctccttacatcaaggagcacttggctctagttcgcgctaggaacattggtaagtccgatgcatggattacacggcatcacattgatactttccccgcgtggctacgacaacatctcatgggtaacgagtcgatcaaccaacaacttgccttcctggcgaggggaccgtctgggtcgatcgcgacattccagggatatgagatcaatgggtacacattctacacgagagcccaagacatgaagagcacgaaccaaaacagcgctgttcgtgtcgatgccatgggacacgatggaacaactgccacgtattacggtgccatcgaggacatatgggaacttgactatggtcctctcaaggttcctctgttccggtgccaatgggttaggttgactggtggaggcgtaatgattgatgacagtgggatgacaactgttgaccttaacaaggttggatactcggacgaaccttttgtccttgccaatgatgtaacgcaagtctttttcgtgaaggacatgtctagcaaaggaaagaagggcagagggcctgatgagcttaagcgtcaagtggttctcccaggcaaaagaaaaatcgtcggagttgaggacaagactgacgaggattacgatcagttggatgggcaaccccctttcacggtgacgattgaccctagcatcctcctatcaaatgaagacaccccttactcacgcagcgatcacaaggagggaacaatagtgaggagaaagtacgtgcggtcaaccgtcaccgccgatgtaatgccgtaattattgtgtacatgatgtaaactattttggatgtattgattatccatataaatcaattgatgtatggcatatgttaattacgcacgattattagaggtttcaacaagtttaaatcatgtatatgttagttatatgtgatacttacaatttttaaaagttttaaatcacacaggtggcaatttcatatgtatgttaattagagtttttaacatttaatttactagcattcatatgctaattataattgactagaggatttttaaaagttttaaatcacgcaagtggcaatttcatatgttaattagagtttttaacatttaatttactatcattcatatgctaattataattgactggagaatttttaaaagtattaaatttaatatatttttaaaactatcattcatatattagagtttttcacaatttaatttactatctttcatatgctacttatatatgactattcgaatttttaaaaggtttaaatcatgcatgtggcatttacatatgttaattagagtttttagcatttaatttaatataattcctacgctaagtacatatgatgattacaatttttattaattttaaatcatgcagtatgtacattaatatcttaattagagtttttaccaatataataatatcattcatatatatgctaagaatatatatatattggaatttttattaattataagtcatatatttgcttattacgatttatccacttaatttattacagacaaaaataatttttcgaagtaattgtcatcaatctttgtactttaaataatgttaatgcattaacttctattttataaacacatatgtaagcgaaaatcatatgcagtgctataatctttagtcccggttcttaaccctaaccgggtttaaaaagaatt

SEQ ID NO: 17009 - DNA, 1582 bp, Oryza sativa
acacgtcaacgtacgttcccgcgacaacgtgaacgagaacgagaacgatcgaacgaacgtgaacgagctaggaaacgtgaacgagcgaacgaacgaggacgaacgttaacgtgaaatgcaatatatatatatatatatatatatatatatatatatatatatatatatacatgtatatatatatatatatatgttacttcgcatttatcctaatacattttttttatcttgcagaaaagacgtgttgtcggagtcgtccgtcaagcctgagtggaagagctagccctagaaggaattggagcaggcaagtgacgtaataatataaatgattgttatatttgtaatgcaattaattaagattattagacctgtaattagacttatcatataagattgtgtagtgttctaatattatttgagttttaatataagattattttattgcaaattagacttagtatgacattattgactacggaattggtgcgactcctaggaattgactattgtagtcttaattagacttagcatatacgcacgaaacacttagcatacattactattttagtcttagcatgtaatattatttgagttttaatataatattactttatttgtaattagacttggtatgtaattattgactacggaattggtgcgacaagtagcaattgactattgtagtcttaattagacttagcatatacgcacgaaacacttagcatatacatgactattttagtattagcatgtaatattatttgagttttaatataagattattttatttgtaattagacttagtatataattatttactagctagggttgtataatatacgtcacctagacttagcttatatcacgatttgtaattagacttagcatgtaaggttgtgtagggttctaatgtacgacatttacacttagcatacatgacttagattgttaaaacataaatgtctcatgacttagcagatgtttcttgtatcaacagatggctgaccgcgatgaggaacagatattgtacgatacaatcgcggagggaagcagccagtactgaaatgaagaagaggggaacgaggatccaaaccagtacttgaacgaggaagggaacgtggagagggatgcggaggggaaccagcaggggcacgtggaaagggatgtggaggggaaccaggaggaggaggctagtggtagtcaaccctccgttggacagaagagggcacgcgggcaacgaggtgcagcgaagaagcttgagggtcggcacatcataacggaagtggaagaagatggacgtcctagtgccccggccgaagccgccaagaactatgtacgtcacagcggttgggttgtgcgggataacgtgcctgtcagtacggtgtactggcgaagaacaagggcacgcggagatcatgagagctttgtcccagattcggagaaagagatgctgtggaccacaatgctcgagacattcacccttcctgcgggtacagaggacaaagtgaaaaggtggactctgaagaaaatggcagaacagtttcagagcttcaagggagatctgtaccagaagtatatactg

SEQ ID NO: 17010 - DNA, 1000 bp, Oryza sativa
attatagggaaataccacatcaccttagcaggaattctcttctttgttagctgcccgtcaacttctcctggatcgtcccgtctaatcttgtatcgtagtgctttgcaaacagggcatgcttctaggttctcatactcctcaccgcgatataggatacaatcgttcggacatgcgtgaatcttatgaacttccagtcctaacgggcagactatcttcttagcctcgtacgttgtctcgggcaatttgtttccccccggaagaatgttcttgacgagtttcaataaatcgccaaatgccttgtcactaacctcattttttgccttccattgcaacaactccagagtggtatccaactttttgtgcccctgctcgcaacctgggtacaacgaagttctgtggtcctccaacatcttgtccaatttatgggcctccttttcactttcgcagtcttccctggcgtcctgcaacatctgaccaagatcatccgcaacgtcgttaccatcagcagctatttcctcctcgcccgtttgatttccttcaaatccaacatactgagcaaagtccggaatattgtcgtcttccacttcatcttcttccatttcaacaccttgctctccgtgggatgtccaacaattatagcttggcatgaaccccgactcaaacaactggaaatgaatagtcctggatgcagaatactccttctgattcttacacttattgcatggacaacaaataaaacccctttgcctgttagcttcggccactctcaaaaaatagtgcacgccctaatccgtcattagcaaatgtttactgtagcaccacattgtcaaatcatggagcaattaggcttaaaagattcgtctcgcaaattaatcgcaatctgtgtaattagttattttttaagcctatatttaatacttcatccaagtgttcaaacgttcgatatgacagggtaaaaaattttgaggtaggatctaaacaaggggtaagtctacattca

SEQ ID NO: 17011 - DNA, 3957 bp, Oryza sativa
aagagatgctgtggaccacaatgctcgagacattcacccttcctgcgggtacagaggacaaagtgaaaaggtggactctgaagaaaatggcagaacagtttcagagcttcaagggagatctgtaccagaagtatatactgaaggggcagacaccgaacttcgacacattcccaaagctaagggatcactgggacgagttcgttgcatataagacaggtgaacaagggaaggcgatgatggaaagaaacaaagaaaatgccgccaagaagaagtaccatcaccacttggggtcaggaggctatagcgtcgcgatgccgaagtgggagcagatggaggctagcttgattgagaggggtatcgaaccggcaacagccaattggccggaacgatcgaagttctggtactatgctcacggtggaacgctcaacccagctgatggctcactggtcttcggctatcagatacaagaggctgcgcgacgactaacagatgcagtggaagcctcctctcagggcacgttccgaccagacagagatagggacgagctgacactcgccctgcagactccagagcatccaggacgtactcgagggaaaggggtgattccttggaagattggtttcaaggaggacatccacacgtacaggagtcggatgaggagcaagagagataccgaggcgaagattgcagacctagagttccgggtatcgagctacgaactcaacatgcaagaggaggtggcaaggaaggttgatgaacgcatggccgcacatcggtcccatgatccccagccgaccattcctcctgcaatggtgagcccgtcaggaaaccgtagcagctgcgcctcaacggggcaggtaggatcacagagcatggacgccatgcaaacacaggacgaatcgacctgtcccgttgatgacatcactcagcggacaccatgtgagctgcatattcctttgaagaacttatcaataaaggtaagatttagccattccgctagttgctgcttatatatgttgattactaataaataatctctcacaacatgaaggtggcatcgggcatggccatcccaacggacccttcaggtacttaccactgcaggccgattccagcaggatactccaaggtcgaagttgagttggtcgaaggcgcgtacgaggacctcgagctggattaccctggaggagacggtgagacgcatctacgagacacatgccatgccattattctatggcggtacatcatcctccctgggcgacaagcggcgtctcgtgcaccatctcctccggctccgccatctcctcctcaggatcctgcaccgtctcctcctcatgctccgccagcaccgtctccacctcaggctccagcatcgactcctcaggatcctgcaccgactcctcctcgtgctcctacacctactcccccgcaagctcctcttccggcaccttcatagtcaagggcccccctagctccaccgcttgcccacacaagggcaacaaagaaggcgaaagttgacgccgccaagaacaaggacccggggtacgattgcacgcaagaggagcttgacgcttacgttgcatcagaagtcaagagacaattcaagcctcgaagtccagaaaagaagattcctatagaccccagtgtcaggaacttcttcaggggtatgtctgcatctgtcaaggaggccatcaagctatcggactatgagcgaacgctgaagaaagcatcttctggaaagtccaaaccagtccctcagcttggagagcaaccaaaccaggagatcgagccgttggtgaccggtaaagaaatgacgatagaacaatttattactgacaccggtctaactacggatcaattgctaggagtcgcaccaatcgaaaaggcggaagtgaaatacatgtacgaactcggtaaaccgcttgtcaagcctgagctgctgcagtccctacccacacaaatgtacaagttccatcagctgtacatggagatgagcgccaccggtagagagatgatcggagcgaggatcagggacacggacttcttgcaaggagatgacattctctggatcaatttcaggggaatctacgaactataccagctggacgccctcgacgtctctattatgagttgctggattttgtaagtatatcgttcagttagatttcttactatacgtctcctttaattaattaggtccttgtatataagtagaccatagaaaataatatactcccttttatcgttgtagaatgcagattcaaagggcccgacggcggagggttttcgttactggattcatcgaccctcggaaagtaaacgtcgcaatgctcgaccaatatccacaagaaacagaggacaatctcgtccatctcctgaaggcgcagcattacaagacgttcatactgttgccatacaacacagagttagtttaattttactgtcttcctacataccaaatttcattcccgtacgaacttgctaagtgtttcatatgtaatgcatcccacgcacattgcagattccactgggtgcttttactcatcgacctggaggcctgcaccgtcaacgtatatgactcaatggataaaaaagagtctacgtttgacaaggttttcgaacttatagacaggtaccgtcataagttcctttgttaattaagaaaatcttgttatgttaattgctactacgaatcatagctttaaactccatgtagggcttggtatcggttccgtcatttggtccgcggcaaatggagagaaagacttaggcggaagttcaaatttcctgtgagtacacatgctctacatttatatttctccgattcaaatacatacaagtgtatattaattagatctctcgttgtttgtcatttatttgtagtgcgcaaagcaaaagcagggaactaacttgtgcggctattacgtgtgcgagtattgctactgccttgcagaccaaatcatcaccacaagagagctcgatgtacgtacaaataaattcaaaatttcattacgtagtgatttcttgtttaattactaatcaatttcatacattcatatagtttattcgcatgagggataacctgaccacacacaaggaatttatcgcggcggttcaaaaacaactcatgggattcatcaacgaagaaatccttgatcccaagggtgaattctactacgacggaaacacaattcaccggtccttagcttctgagctagcagcgagtactactacgtcgaaaccgtagctagctaggacatataatggattgtaattaatacatgactacatatgtttctatatgcatgtgtacacattttctataatgtaaatatattttgttcatatatatatctatatacatatgcatttgcataacatatatatgtatgcatatatatgtattgaaacatatatatgcatggtctatatatatatatatatatatataaaccatgcagcaacaggggcatgcaaaaaaaaaaaggtcagctctatctttagtcccggttggtgttaccaaccgggactaaagatcgatctttactcccggttatttcacccgggactaaagataacgatctttcgtcccggattggtactcccggtttggaaaccgggactaaaggggggttacgaaccgggactacaaagggtttctccaccagtgtagctaagggggttgtttagatccatgcgtgtaaaattttggtgtgtcacaacgaatattatatagggtgtcgtatgtagcgttcaagcactaataaaaaaactaattacagaatccgtcaataaactgcaagatgaatttattaagcctaactaatccgtcattagcaaatgtttactgtagcaccacattgtcaaatcatggagcaattaggcttaaaagattcgtctcgcaaattaatcgcaatctgtgtaattagttattttttaagcctatatttaatactt

SEQ ID NO: 17012 - DNA, 1124 bp, Oryza sativa
  unsure (1)..(1124): unsure at all n locations
ctgtgagtangtacaccatgattatagggcgaattcgagctcggtaccctgaccgcgatgaggaacagatattgtacgatacaatcgcggagggaagcagccagtactgaaatgaagaagaggggaacgaggatccaaaccagtacttgaacgaggaagggaacgtggagagggatgcggaggggaaccagcaggggcacgtggaaagggatgtggaggggaaccaggaggaggaggctagtggtagtcaaccctccgttggacagaagagggcacgcgggcaacgaggtgcagcgaagaagcttgagggtcggcacatcataacggaagtggaagaagatggacgtcctagtgccccggccgaagccgccaagaactatgtacgtcacagcggttgggttgtgcgggataacgtgcctgtcagtacggtgtactggcgaagaacaagggcacgcggagatcatgagagctttgtcccagattcggagaaagagatgctgtggaccacaatgctcgagacattcacccttcctgcgggtacagaggacaaagtgaaaaggtggactctgaagaaaatggcagaacagtttcagagcttcaagggagatctgtaccagaagtatatactgaaggggcagacaccgaacttcgacacattcccaaagctaagggatcactgggacgagttcgttgcatataagacaggtgaacaaagggaaggcgatgatggaaagaaacaaagaaaatgccgccaagaagaagtaccatcaccacttggggtcaggaggctatagcgtcgcgatgccgaagtgggagcagatggaggctagcttgattgagaggggtatcgaaccggcaacagccaattggccggaacgatcgaagttctggtactatgctcgcggtggaacgctcaacccagctgatggctcagtggtcttcggctatcagatacaagaggctgcgcgacgactaacagatgcagtggaagcctcctctcagggcacgttccgaccagacagagatagggacgagctgactctcgccctgcagactccagagcatccaggacgtactcgagggaaaggggtgattccttggaagattggtttcaaggaggacat

SEQ ID NO: 17013 - DNA, 1053 bp, Oryza sativa
  unsure (1)..(1053): unsure at all n locations
gctgctcnggtagacattcaagatcnatcgcgaanncgagctcggtaccctttgagagcttggaggctacatgttgaggatggcgctgattttttccgtgatggcctgtatgcctctttgagataccataaatacgagcgacttccctgtcggaactccgaacagcacttttccggacccagtttcatcttgaaagcacgaatgcttgtaaaagtttcttctaaatccgcaatcaggtcatccttctgcttggtcttgacgactacatcatcaacataagcttcaatattgcgaccgatctgagttgaaaaacatctttgaatcatgcgttgattggttgctcctgcattcttcaatctaaagggcatggtgatgtagcagtaggccccaaagggcgtaataaacgaggtcttcaagcagtcggattcttttagccggatctgatgatatcccgagtaacagtccaagaagctgagtaactcacagccggccgttgagtcaaccacctggtcaatgcgaggtaacctgaaagggtctttgggacaagatttgttgaggttggtataatcgacacacatgcgccattgccccgtctttttccgaaccaggactgggttagccagccaatcgagatgaaggacttccttaatgaagcctgctgctaacagcttggttaattcctccttgatccatccttcctgtcctgtgcaaaacggcggagtcgttgcttgatgggtttggcgtcttccttaacatgtaaagagtgctcaatcacctctctggggataccaggcatattggatggtttccacgcaaaaatatctttattattctgaagaaaggtgatgagcgcactttcctatttacaatctaactcagcgcctattacagcagtcttatcaggatcggagggatctaagggaatctttttcgtcttggcatcactttcttcggtcttcgtcagcttggttgcaggcgcttctccctcgcttgccgtggtcgcagccagtcggatctcttcgcgggcgagagtagtctcgtgggtttgggcca

SEQ ID NO: 17014 - DNA, 1015 bp, Oryza sativa
cctccccctttgattgcttctccccttcatgccagcccggcgactctagagtagaggatccccatgatagatagatagatatgcaagtgtgctacatcatcatctactagtaattattatatagattattttaaatatcatataaatatgacatatcatttataatattgttgtatttttagaacttaatatatatgtaatcaatgtcgaaccattatctccacatcatttatatattatttaaacatatatatctatcatgtataatatgcattcatctatatattccacggcaaagtgtggtgtatcgactaggattctatataagtacagcagctgtaagcattaaaggctgcctggaaccacacacaaagcaggcagccaagcatagcccacagcaagctcgaccatggcgtccctctcctccctcctcctcggctgcttcctcctcgcagccgccatcttcctccaccgcaacggcgcctccaccactaccacccacctccatttctacatgcacgacgcctacaccggcccggctcccaccgccatgcgcgtcgtctccggccgctccttgctcgacgatggcggtgacgcggtgccgcgtcagttcggcgacatcgtggcgctgaacaacgcgctgacggaggggccatccgccggcagcacgcgcgtgggcacggcgcaggggttcgcggtgcgggtgtcggagggcggcatgtgtggagattatggatacccatatctacatgacagttgtaatttagtcggatatacggtaccaaatatagatggaatatctctatgaagactcgggttaggttctaaacttgtatgtcaaggaaatacccgggatcttagtcggttacgtttgtattttatctataatcccatattccggtaggatatggattgtattttgtaaagcggactccttcccctatataaagagggttcgtgtgcctcttgggcgcgaatctttttcccaaattatacaatcaataacacacttcgg

SEQ ID NO: 17015 - DNA, 1151 bp, Oryza sativa
  unsure (1)..(1151): unsure at all n locations
tatgccgacgcgggaaggaggtgaaagtaccaaccacaaggatcgcaagcgtaagccgaaagaacttgtgccgaccacttctcngtcttnccgacaacgttnccgcattacaccttcgacaagataatgaacttccaatgtccgcatcatccaaacttccaaccacgtggccaaagattgcttcgtctacaaccagttcgcggagcaatacgtcaagaacgcatgtaaaccctcagacggagatcaaggcacatcaaagaagaaagatgatgaagacgatgccatgactggttttcaagatcatcgcaaagaacttaatcacatcttcggcggacccctggcttatgaatctaagagaaaccagaagctaccagaacgggagatcaatgcggttcagcctaacacgccccaatatcttcggtggtcagagatagcaattaagttcaaccgctcggatcatcccgaccgagtggtccactcggggcggtaccccctggtactagacccagtggttcgcaatgtcaagctccgacggactctcatcgatggtggcagcgcactcaacatccttttcgctaagaccctggacgatatgcagattccttgcacggaattaaaaccgagtaatgcacccttccacggtgttatcccaggattgtcagctacaccactcggccagatcactgttccagttaccttaggcactcgggagaattttcgcacagaaaatgtttgtttcgaaattgctgatttcgagacagcatattatgctatacttggacgaccggctttagctaaatttatggccgtcccacactacacctacatgatgatgaagatgcctggtcctcgaggagtcatatcactacggagcgtcatcaagcaggccgtcacatgtgacaaagaaagttgtgagatggcccaaacccacgagactactctcgcccgcgaagagatccgactggctgcgaccacggcaagcgagggagaagcgcctgcaaccaagctgacgaagaccgaagaaagtgatgccaagacgaaaaagattcccttagatccctccgatcctgataagactgctgtaataggcgctgagttagattgtaaataggaaagtgcgctcatcacctttcttcagaataataaagata

SEQ ID NO: 17016 - DNA, 750 bp, Oryza sativa
ttactatatggtgtcttaattaccgtcagaaaattatctcactactttcaaagtcactcggtcacggtagtcacatcgtttccactcggggatatacttcataaccgcgaagtaaacggacggattgcgaagtgggccttagaattgatgtctttggacatatcgttcaagccacgaacttcaatcaagtcacaagctttagctgatttccttaccgagtggaccgagtgccaaaaagacatgccagaggaaaagatggaatattggactatgcattctgatgggtcgaagaggcttacaggcactagagctggggttgttttaatctccccgactagagaaagattgagctacgtattgtggatacatttttctgcgtcccataatgtggcggaatacgaggcgctactccatggactaaggattgcaatatctctaggtattcgccgactaatcgtccgtggagactctcagttggttgttaatcaagtcatgaaagagtggtcatgtctagatgataatatgaccacttatcgacaagaggtacgcaagttggaaaataaattcgatggactcgagctcacccatgtcctccgacataacaatgaggcatccgacaaactggccaattttggttcaaaacgggaagcagctccttcagatgtgttcgtcgaacatctttacgaaccgaccgtgcccagaaaagagacagtcgaagccatggatactcaaggcgtaagcatgatcaaa

SEQ ID NO: 17017 - DNA, 771 bp, Oryza sativa
  unsure (1)..(771): unsure at all n locations
ccccgcgccaccacccgccttgagctcccttgaaccaccccaaacagtcgctctgcccgattcgctgccgccacgcatgaccgcgcgccgccgtcggccatcccctcgccgtatcctctcgtctccaccctcctggagccccctcgactctccccttaccgtacgccgaaccagctcgctgtcgccctcccggaactcctcgcgccccctctctgtttccccggccatgccactctcgatgctatgaccaccccgccgtgctctgttcccgccgacgccgcgctcggctgagcgccaccgttggccaccctctcggcgactccccgcgccaccacccgccttgagctcccttgaaccaccccaaacagtcgctctgcccgattcgctgccgccacgcatgaccgcgcgccgccgtcggccatcccctcgccgtatcctctcgtctccaccctcctggagccccctcgactcttcccgaaccgccgccctagccgccggccttctttctttttcccacgtcgtgccgcccgattcaccaccgcggcacacgggcgcgctctgccgtcggttccccccttctcttcgaacccgctcgccaccaccttcctcgggcccctcttgacctcccccttgctgccccgtggccaccgggctcccttcagntttcgcgccgcgccgcccttttcgttgccgngccgcgccgncgaacgagcaacacccgggaccatcaggctncgcgcccaacgcgtgtgcgtcgcaancaccacaccc

SEQ ID NO: 17018 - DNA, 853 bp, Oryza sativa
cgcgcttgagtacactactactatagggcgaattcgagctcggtacccaatctgcaatgtgcgtgggatgcattacatatgaaacacttagcaagttcgtacgggaatgaaatttggtatgtaggaagacagtaaaattaaactaactctgtgttgtatggcaacagtatgaacgtcttgtaatgctgcgccttcaggagatggacgagattgtcctctgtttcttgtggatattggtcgagcattgcgacgtttactttccgagggtcgatgaatccagtaacgaaaaccctccgccgtcgggccctttgaatctgcattctacaacgataaaagggagtatattattttctatggtctacttatatacaaggacctaattaattaaaggagacgtatagtaagaaatctaactgaacgatatacttacaaaatccagcaactcataatagagacgtcgagggcgtccagctggtatagttcgtagattcccctgaaattgatccagagaatgtcatctccttgcaagaagtccgtgtccctgatcctcgctccgatcatctctctaccggtggcgctcatctccatgtacagctgatggaacttgtacatttgtgtgggtagggactgcagcagctcaggcttgacaagcggtttaccgagttcgtacatgtatttcacttccgccttttcgattggtgcgactcctagcaattgatccgtagttagaccggtgtcagtaataaattgttctatcgtcatttctttaccggtcaccaacggctcgatctcctggtttggttgctctccaagctgagggactggtttggactttccagaagatgcgggtaca

SEQ ID NO: 17019 - DNA, 1239 bp, Oryza sativa
  unsure (1)..(1239): unsure at all n locations
aagggccatccaaattttagccaataaccggcttaacaaaaagaagttattttgtggaaaccattttacaaaaatgtagcctgtttccctgtatgaaaccgggccctgatgacttctccgtcgaaaaaaaatccattttagcttcacccagtttccaggttaattaaaaatgagttgtgtaataaaaacaagcatataagaaagttgcctaaatataaatcaagtancatcattttacatgagggaaatttttattttttctattataagccattgtaaaaggttgacttgacactatgctaaaaatgcttatattttagacgaagggagtagtattttttaaatcacttatatcttttcaancggtatatatatntgtcatggttataataccacatacntatnagtagttaatttggcacggcgggacccaacacatatcaagtcttatacgtacctaatagtagttaattaagcacggcgggacccaccacatatcaagtcttatatgaaattaggcctcacttatgaaaggtattttgaataaggaaggacaagtagagttctatatggaaactatagggactactcggattgtatccatattggtccctatagttctatttggtcaaggggacacctatgggtataaatagaccccctaggaggagagggggacaatcaagatagacacagaccaatacaagcaaacacacgccaagacaagctgccagatatcaacatcaaaaataagcctagacaaacccaatatagtgcctgtagaggctaacaagggatctagcgctatctctaatctcgccgagtgcggattcaaggaggaagactatcccgttgtcgactacatcatggtattctaggccgccaagtcgacaacggttgatagattatcccaaattttgtactggtgtgattatgatgaataaatagcaacaccggcttcggccaacaggagtagggatattacttgccaaataaggggcccgaacctgtataaaaatccttgtataaaaatccttgtctctatctcttttacctcaatcttgcataaactttggtaccgacaatccccttaccatgtagttgtgacctaaaacatcgccaatattattttaaacatctacatatttgaacgatcgtacttcactcaaaatatataacaaaacaagtccagggtaccgagctcgaattcgccctatagtagtgtgtcatacctctgcc

SEQ ID NO: 17020 - DNA, 2228 bp, Oryza sativa
atttatatagagagcaagggtgagtacttacgtactcagcaagccaggggaacttaggtggttaatgcaagtttcaaagaataggttgttatttttcaatcagttttgttttcaaggttttcaacaatctaagtgtgtgctttccacaaccagagcgagacaagtctcagctcagtcggggtgagaagtaacaaatttatttatcaagattttcacaactcccagagttggcctcaaagctggttttcccaaaccaaaccatttttccaaacttcccaataatagtggtccccaaacgaccaatcacttccagggacttccggtcccactgtcccccggacagctaattgcttcccaagcattaggtttcccaaaccttaacaccttttcataaaacagggtaaaacaaaaactacgctaaggaatcacctcacattcgcccatgaccgtgggcacggctgttcgaacagtttaataacctctgtagagggggtacactatacccacacgacgttactagccttggtcacccagcccgtgcagaacagccacgtctggtgactttggggctttcacgacaaggtatttcgaaagccgacacagggttaccatatgccaatgagaggagtcccagaccaacaacaggttaggtcccagaccatactgtgccaggaagcccgggggttctccccgacaccaccccgttgaatccacatgtctcttggcatcaaggctcccttgattagctatttactcagccaggggcgtcccattccacccgtgtggtcgcactattgtatgctcggatgtaattccaaaggaatcggtccttagatgcgaccgcacaagtattccgcccaggaatggccttgtgtcgcaaattttatttttaaaactcattttctttcacaaggcaccgacccaggcgtcgggttttccaaagcttttgtaaaccaagttttacccaagaagttacacagattttaagtttgaaggagaccgtcgatactcgcacagagtgcacgaatatcgaggcgcaactagatagttacaagggaacatgatataacaattaacaatggaaggatcagatgcaacaagttgggtaggcccaccggtctgccttgcagacggggcaaatagattaagtgcaatcctatcaatgcataatatttttcaagcaaattaattaagttcaaatataggctcaatatgttcaaaggtggcttgccttgctcagggtcttgatcttcacgaatcttcaagaaatccgcttgacgaaaatccggtaaccgcaactatacgcaaacaatcaaaaacctaaccaaaagactgaaagaaagatcctatttagactaattaatagtgccattaaattgatatcaattttacggaactactggaagtagaacggagtcaatcggtcgagcggttgaggagatatggattttggaagcttaattggatttctggacaaggaaatgatctattggattttttggagtacgagaaatggcttatagaatttatagaaataatattctcaagaatattattgacagtcactgacatgcaggaccaatgggttgaattattggaatccccagattaagaggaaggattttatggaatttggaatataggaaatgttttatggagcaggagatatgatttattgcatttatggaaatgaatattctcaagaatatccttttatcactcattgacatgtggggccaacatatggtgagagagaggtgaattgggagggagcagatatagacttttggtcattgtgtttggcggagggagtaaaaatggacttcctttgtttcaatgggccgaggagggggagctggtcgatgggccaggcccacgagcggggagagagaagggggggggggtggctgactaggcaggggttgacttggtctggtggggtcagcggctgaggtggcgtccaggtggacgccacgtcggacagggaagggagaggaggccgggcggctcatcggatggccaacggcgctcggtgcgctccagcgaacggtggcgaatcggagtgggcggcaggcactgaaagcgagaggaggaagcggggaatcggttccacggatcggaccggagagaaggggcgccacggcggccggcgacggtggcgaagctcgccggattgccgacgtggatacgcgatgggagggaaaagggggcgcgggctatggttcgat

SEQ ID NO: 17021 - DNA, 1929 bp, Oryza sativa
  unsure (1)..(1929): unsure at all n locations
ccagcccttgaaacatagagtgtaaacggggactttttcccgggttcggcccgaaataaaggggcgcacggcgcccgaccggggtgncaaatctcccggtattcccaacgtggataccctttgggaggaaaaagggggcgcggcatatgtttcgatcaatcggttggggtgttgccacgcacacgcgttgggcgcgaggtttattgttcgccggtgttgctcgtgcggcggcgcggcgcggcaacgaaaagggcgtctcggcgcgagagctggaggggaggccggtggccacggggcagcaagggggaggtcaagaggggcccgaggaaggtggtggcgagcgggttcgaagagaaggggggaaccgacggcagagcgcggccgtgtgccgcggtggtgaatcgggcggcacgacgtgggaacaagaaagaaggccggcggctagggcggcggttcggggagagtcaagggggctccaggagggtggtgacgagaggatacggcgaggggatggccgacggcggcgcgcggtcatgcgtggcggcagcgaatcgggcagagcgactgtttggggtggttcaagggagctcaaggcgggtggtggcgcggacagtccccgagagggtggccaacggtggcgctcagccgagcgcggcgtcggcgggaacagagcacggcggggtggtcatagcatcgagagtggcatggccggggaaacagagagggggcgcgaggagttccgggagggcgacagcgagctggttcggcgtacggtaaggggaaggggacggggagctcaccaatcggtgaggaatggtgtcggcggcgatttgaggatgggaatgggaggaaggccgttggcgttgggcggcgaggccgacggcggcgcgcggtcatgcgcggcggcggcgaatcgggcagagcgactgtttggggtggttcaagggagctcaaggcgggtggtggcgcgggaactcccaaaaaggaagcccaccgccggcgttcacccgagcgcggcgccggcgggaccaagagcacgccgggcggtcatgcaccgagaggggcacggccggggaaccagagagggggcgcaagagttccggaaggccgacagcgagctggttcggcgtcctttaaggggaaggggacgagaagctcaccaatcggcgaggaatggcgtcgccgccgatttgagtatggaaagggaagaaagcccgttgncggcgcacggggacgaacgtgacgccgaagcgggcgcaccagggaaggaagggacgcggggtggaacggtttggtgacggcgcggcgttcttgcccgtggcgacgaagaaggcggcggtgctccggggttggccgcgcgacggcgaccgaggttgagggaggatttggggctcggtgggtaggatttataggcaagggggagatcacagacgagctggcgctcggctggcggtggggcgatggtttcgtgggcgacccgaaaacggcaacggcgaggatgcgttgggcggcgaggtcggtggatcaagcggtcgaatttgaacgcggagcgcgggccggcacggtcaaagtgggggcggcgggattcggcgccggggaggaaacgagatttggaaattgaatttggatttcgaacttgaaacttggtctcaggaaaacagggaggagtcaagggaatgcatccaagcgggaattcgggtatttctttgggatagatttcaaagatagataggtagacggacggaccgatggatatcgtagagatacatagatcaacagagagatcggtagacggatagttagatgggttgacaggtagagagatcgatgattagatcgagagacagataggtcgatggataggtagataggtagatcgatcgnaagggtccagtcagtnntntcagtnngnnnnttcaatccacactc

SEQ ID NO: 17022 - DNA, 2159 bp, Oryza sativa
catacggtgcttcgcttgtctatatcatttatttggcatcttaaacttctcaagcttaacttgtgcatacaatattgttaggttttagtgttctatgcctatgaaagtgcaaaaggccaataactgatggatgaaatttgtgaatcatgtgatgttattttgcgcaccaaattgcattgcatcgcattgccttttttccccatatctttagctcaagtagtgtgggccaggaggttgatttgaaaactcaatgcatcgaatcttgcttgtagctgcttatttcctattttggtggttgcctacttcccttcctagtaatccatcacaatattttggaactttaaagctgtgctcaaaattatttctgaatatgtatgtcattcaacatacactccttacactgtaatcatacagaaaccatgcacacattatctcatttagttactaccatttgcatgttcagttgtgtacaaatgtatttgtcttcatcggacaatgttgcttccttgtgtcccaattagacttaatttcttcgtgttatgtatttatctttgccaaaggtgcaaagtagcacttagtttgtatcatgtacaatttggtcatctgttacagactttctataaagcgtccaagaaccgctttgatggtgatgcagaatttaaagacagagctcaacaagcagtcgttagacttcaggtcagtgcaccttcttggatctggaatatgttaatgtttttttttttttttggggggggggaacaatggaaacactttgggtgtcattccattagagatagaaaatgagtatgttaaaattgcatcttatcatcctcatacaatgcctaagaaatatattaactgtagggaggggaagagagataccgtgctgcttggaacaagatttgtgaaatcagcaggaatgaatttgacatggtttacaagctcttgaatgtaaagcttgaagaaaaggtagtgtcacactctattggacgcgacttatatttctttagaaggttgcttatcaataacatgaatttgctacctgaaatttctgtttgttgttttagtagaatatttgcgcaaccatcatccctttccttttctatataggatctgagacttaaacttttactgtatcaatttttatgatatttttggatagattgttctttctcttgttcccatctgagccattttgaaaagtctctgataactaaccactagttttacatgactcaacaaggtgtacctcatcttcatatgaagagtggaaacattttgctgccaaaattttacaaattagtcagttgctgattggggtccttttacttgatatttctctgttgcatagcttgtgattcctattggaagatgtattgacgttcatattccagggatgttagaaacacattcaatttgttgaacttctgtctttttagctgaatccattagtcaatattttcaggagatatttatagggcttcacttatctgttttgtcgatatgtatttgttgaagtttccgatggcactaatattaatttagttggatttctggatttctttcttattagtaaaaacatcagtttgtctgtttatgatctgttacagcttgtatggctgcattttatcttaatccattttgacaatagcacctgtagctgtgtgtacttgctttcaaccaacttttggctattggtatcatgaaatgcttatgtttgtcgttttcttccctgagcatccaagcagcttgttgatttatattttgtagtgttgagaagagagctattcttttcagggagagagcttttataatccttttattccacaagtcttggaagagttgaataacaaaggtttgatcaaagaaagcgagggtgctaaagtgatattcatagaaggccatcaaatccctttgatagtggttaaaagggacggtggctttaactatgcctcaacagacttagctgctctatggtgagttgctaatcgataattttggtgtgttcctacagtgcaattactcttatattagctataatttgcagaaacaaagtgaatatattttcgtagttgattcagtctatttccacaggatcagaatttgtgaatgtaatcgttctatttgtgcttttatgcaggtaccgtcttaatgttgag

SEQ ID NO: 17023 - DNA, 1504 bp, Oryza sativa
cacatttagctttgaacaaatgctgagtgataaggtatttctagactccactatttgtttacttgtataaaagggtgtttttctccattaattttatttgtgttaaaacttttatgcgccacatatttgcttatgatgtattccagtatttgtggaaggatctgttgctctatgttctgcattggatattgaaaatcacagtctatagtggtcgctcttttgcataaatgaaaaaatatgttcttgagtagtttctgggcagattctttatattagtaagtagttggtgaacccattcaccttcttgcttactctcattacttgttattgacaagctcattcctttttgtcaccagggaaatacagctgtttaccttcagtatgctcatgctcgcatttgctctataatcaggaaatccaacaaggatgtagaagagctgaaaatggtaatacttgtgttatttctatgcactgattctattgttgattttataaagtcctgctgttgttattttagagttccatcatctttttttttttacttgagttccatcatcaattattcgttctctttcagctatcagacatggatttaaacacgttgactctgttttcctgtttttcttctcagagtggtgccatttctcttgatcatccagatgagcgtgtcttgggactgtacctgatccgatttgcagaggtatcattggcgctattaactgaatcttttttcttaaagatcttttttcagacctatattttcataaggcctaggaactaaaaatgagctaaaaagggtagtccagtttattcttgaacagcaaacagccgcagtggtctgacagcatgttgattgtgtgctcttgtttggagttgtttgtgcttagcccacaagtaggtgcatgttactgagattttcctgttcaactttaggtgtggttagtgcaagaacaatggaaaaactagaagtcatacattacatcattcagataatagtatttcattcagataattcctacgaggtgtaacaaacaccgataattctatttcatagtttagtcaacaatatggcttaattcacaactaaagcttttttcccctcttctgatttacgtttgctgtgtctgtcaggttgtggaagaggcgtgcaccaacctacttccgaatgtcctgtgcgagtacctgtacaacctttctgaaatgttcacaagattttacaccaactgccaggtatacttccatctgtttacatcattttcccctggtgaatcttactttcttccagaacttgaaaaaaagtttctgacatgttcaccaagtgaattttgtttctcttataaactagagaataattataccaaacattcaaaagaaatgatttttactgcgggctcactttacgttgaacccatcaggtggttggatcgcccgaggagacaagccgactgctgctctgccaagcgacggcggtcgtgatgcgacaatgctttgagctgctcggaat

SEQ ID NO: 17024 - DNA, 719 bp, Oryza sativa
catatattacgttacccctattcctctggcaacatacatagcctcatatctccacctcacatgaatgtcttgtgatcttcttacctcacatttggcatcatcttcatcatatgtaagtcgaaaaacgaaaggtacagtaacccacagcctgacgcctctgtcaatggcggcgtcgccggcgacacctcctctcgccggaggagggtggcatatgctactactgtctaggtctcttggagctgcagctcgggcacttgtactgctttatgctctccgccttcgccggagtgatcttgacgcacttgccgtggtaccacctctcgcacacgtcgcagccgatccagaactcgtcggcgctgtatatcccaccgcaagtcccgcatagggtctcactgtggtcgccatcgtcctcgtcgtagccttcatcttcctccttgatattattttcgacacgcgccacgtcgctggtatgctggggagatgggatttgttcatcaggactcgtgatggaagggaggggaaatggtgaaaaactgtggagaaattcttgttaccttcgatgaaattttatttctgctgctgttgtccatgccggatctgtccctctccttagattgtcttgaaccagatacgacttcgtaaacagttggcaaatcattcatcatgccaaacaaacgcttcctgttgaattggagagcgaaaacagcaaggacaatgag

SEQ ID NO: 17025 - DNA, 3458 bp, Oryza sativa
  unsure (1)..(3458): unsure at all n locations
gccgcccccgccgccgccgcctccgcggccgtcgcggcggtaggatgcgtccatggaaggnagncggcgcgtgggtaaggcgatctccggcgaggcgaggcgaggagaggagaggaggaggtgatcgcgatgcggaggagaggagagagcgaagtgaggagtacacggccgatgccgtggagatcagcggaagatgcgttaagattttgcggttttacgtctaggtcctcgtatgagtagttgtagtatttatttgtaacaaaagaaataaaatcccaacttttaatcgacccttatgaggattatatgtgggataatctgagtgaatgatagttggttaagatatcaaataatcgaaactcattttaatgggtgttagattatcaaatatatctttctaatgcggtgttattttatactgctaaatggcgcgttccgtgtaaaaattttctatagataagtttctttaaaacattagataaatattttttaaagtttgtaataattaaaattcaattaatcatttgctaatagtttgttgtgttttacgcgcctttaactttacattcatcgtgttaaaaaagaacatgtaatgaaagcaaaggattgaggtgtgatgttccatagcattcttttggaggcaccctagtaaagcccccacctcttttcttattaagatatactccctccgtatgttaatgtatgacgccgttgactttttaaccaacgtttgaccattcgtcttattcaatttttttatgcaaatataaaaatacttatgtcatgcttaaagaatatttgatgataaatgaagtcacaataaaataaatgataattacataaattttttgaataagacgaaaggtcaaacgtttattaaaaagttaacgacgtcatacattaaaatacggagggagtatattttatcttggtttttattaatacgttttcaaactgctaaaatatcgtgtgaaaactttctatatatatataagttgatttaaaatataagataaatctattttcaagtttgaaataattaaaactgaattttgatgcgctaatggttaatggatttctcgttttttcatgcgctgatggccataactaaataaccactgaaataactaatacaatgacataaataatccgaaaaggtccactttatgtttcttaactatgaatcaactttcattcgtgtcccttagctacaaaaccgatataaaacattccccaatttctaatgttggtgtaaatagagtccctcggtagtattgaaagtggttttagctgatgtgatatatgcatgtcttgttaacttgatcttagtagtctatacagtgctataaacaaaaaaaaaataaagatactactaggacccatatatcaatgatagttcagattgaaaaaaactaacaatttgtggggctcatatgttaaaggcacttcttccctcaccgctatatgcatttgacaacaacagcgatggcatgcactccccaagccagggcggcgacacaacgctttgctacctccgcggtggtgattttcggtggatgcagaaggtgaagctttgcccaataggtgaggtagtaggcgaaagaagctgtggatcttctcgctgtgttctctcacctcagtaagctcgaagtgctcgaggaggtcggctactcagtgtcagccgttgaaaagaacgtggtctctccggccctcggacacgatgtggcactccaagctctaggtcgaacaaggaaaaggtcccatatgctactaatactaatttctttttgctaattaggataccatatagatcaaaaccacttttaatactttgtaggtcccatatgctaccagtacttttttttttctttaattaggataccacataggtcaaaaccacttttaatagtatcgaggaactcaatttacatcggttttagaggttacaaaacaccctatatcaggttttacggttcaaaggacaagaacgaattttttttcctaaataatattccagagattgatcaattgtgaatacggcagagattgatcgtgagggataacaattgggcctcgtactgagctacagtgtacatataccaagcataactcataaattttgagtttagtaccccaaattttaaacccaacccacaaaaatgtggggccgtttaccaccccagatccacatcattttcggagttctttgtgatgtgatctctgcttacatttactctctgtgatctcagctgcaagaactgcatgtcattttagtacatatcatgtcacacccagttctttgaagggcagactacatcagggaatacaacctctcgaaacaaactgatcatatgctactacaggtcgcgtcaagtcacaggttattgatctctctactcaagacggcgtgaagttcatagcagacaggctacgtgaaggtgtcctccctatcaccttccgcgacctcgccctcgtcgatgttgctgaactcgaggaaatgtgtcggccgatggtcctcgtgatagaagtccctgggcgtgccaagcttcatgttgtacttcatcagcgggtcgtgcttcactcccatgaagttgaagttccaaggggtgttatccggcacctggtagagacacggaagaaatgtaaaactctcggcagagtaagaactatctccgccccaaaatgttataacttctggctccagctccagatccgtatgtccagatatatagccaaaagttactatattctaggacggaggtagtaattcttatgttgttgagtcttgaaaaagcatgcgttagaaaatcatcaaaacataccatgtagaatcctaggaatctgtcactgagaagcatctggaccttctcgtagtgagtcgggagatatccatgtgggttgcttccactgtccttgttgctacggccccactcgtaaccacttggcgtcaacttgtacgcggtcaatgaacaagatcctggggtaaagctgcatgtcaaaatgatgcacttctcaccatcccattgcttgttgttctccaagatcttggcgtgcgatgtcaaatcctgcaataatcaacaaaacgattagtctagtcttatgacaacttgtgttcctttgcaacagctaaaagaaactgaaagcataaataatctaacctgtggtgatagctggggagcttcattaggctgggtatgcatccagcccagtggctccaaatcattaaggaactcgtgctcaggaaggtttgcaggcagtgtcaccatctgatgagttccgtgctgtggaggaatagctatgcatctgatctctttaacttgggggttatcctgtggactcagcccatatagaaaacctgcaatctgtgtccttaaatctgctatgcatatgaacttctttaatatattcttcggcataatgtaagtgtagccagtctcctgcaggtagaatatttgagt

SEQ ID NO: 17026 - DNA, 581 bp, Oryza sativa
tactctagttatggtgattgttttgatctgctagttgttttggctgttgattctagatctctctttatgcttggggttgatgccgtttgtgtctggtactctggtcctctgttactaggaatgggggcaagtggatgttttgcttcagtttgctgtcatatatctcatcttcaccatcagatactatctgggctgtaattcatgagtatgttgcagacaattgatgattctatttcttgctgatcagggaccatggtgacatgtcttcaaagaagtacaggcacgataagcgtgtatatcttggagcactcaaatttgtgcctcatgctgtttacaagctactggaaaatatgccaatgccctgggaacaggtattgtaccctcacactcttcgatgtgaacattgatgtagccatttgtgagattacgtatacagtggcaatacacaatagaataacggaacttttcttttcaggtccggcatgtaaagattctgtaccatatcactggtgcaataacctttgtaaatgagatcccatgggtagttgagcccatttaccttgcacaggtaatgatctaaa

SEQ ID NO: 17027 - DNA, 3024 bp, Oryza sativa
ggctttatcaattagatgatgtatattgtatgggtgatagtgtgagaaggatttaaattttcgtgcttatgtctgtgagtttggggctttgaaaattagctacctggttgggatgtaaaatttgccttctctactgttctcttcatcccttctcctgtaagcacaactttccatttttttgcaactagctttattcaaatatgagaatcttgcatttaattaatttttacactgggaaacatttttagaactgttgaatgggcatccaaacattggcatgtttatgagattttttagctttgtaggaagattgtggcatgtacgttttgctgtttctgcatcataagctcttttaccatattgaatgctatgttgcaggaggtccgaagtttgagccactgtaccgtgatatggagaagggggatgaggactggaatgagtttaatgacatcaacaaactcatcatccgccaaccacttaggacagagtatagaattgcttttccacacttgtacaataacaggccaaggaaagtgaggcttggggtatatcatactccaatgataatgtatatcaagacagatgatccagacttgcctgcattttactatgatcctttgataaatcctataacttcgacaagcaaggttgatcgtcgggagaggaggacaattgaagaggatgaagatgaggacttctgtctcccggatggtgtggagcccctcttgaaaggaacagaactttacactgatacaacagcagctggcatttcattactctttgctccaaagccttttaatatgaggtctggtagaacacgtcgtgctgaagatatccctcttgtatctgaatggtacaaggagcactggtgagtgccattatgacatccttgatactttttaatgatctctttttaccaatgttctgcctgatgcacttgaacttccaatgctaatcacattaatctctcttttgtagcccaccagcttatccagtgaaggtgcgtgtcagctatcagaagctactgaagtgttatgtgctcaatgagctacatcataggcctcccaaggcgcagaagaagaagcatctgatccgttcactccaagcgacaaagttttttcaaacaacggtgtttgtctgggcagaagcaggtttgcaagtttgcaaaacagggttacaatatgttgaacttgttgatccacagaaagaaccttaactacctttacttatactacaaattcaatttgaaacctgtgaagactcttacaacaaaggaaaggaaaaaatctcggtttggaaatgcatttcatttatgccgtgagatattacgacttactaagttagtagttgatgcaaacatccagttccgcttgggaaatgttgatgctttccagttagcacatggcttgcaatatatattctctcatgttggccagctgactggtatgtaccgctacaagtatcgtctgatgcggcaaatcaggatgtgcaaagatctgaagcacttgatatactaccggttcaatactggtcctgtaggaaaaggacctggctgtggattctgggctccaatgtggagggtgtggctgttttttctgcggggtattgtaccactgcttgaaagatggttaggtaatctactggccaggcagtttgagggtcgtcattcaaaaggagttgctaaaactgtaaccaagcaacgtgttgagtctcactttgatcttgaacttcgagctgctgttatgcatgatgtccttgatgctatgcctgagggtatcaagcaaaacaaggcacggactatactacagcatcttagtgaggcatggcggtgctggaaggcaaatatcccatggaaggtcccaggcctaccggttcctattgagaacatgatacttcgttatgtaaagtccaaggctgattggtggaccaatgttgctcactacaatcgtgagcgtatcaggcgtggtgctacagtcgacaagactgtgtgccgcaagaatcttggaagattaacccgtttgtggctgaaggcaaaacaggagaggcagcacaactacctgaaagatgggccatatgtgacacctgaagaggcagttgctatctacacaacaacagttcattggctagaatcaaggaagttctcacctattccttttcctcctctttcttacaagcatgacaccaaacttcttatactagctctggaaaggctaaaggaatcttacagcgtggcagtaaggttaaatcaactgcagcgggaggaacttggattgattgagcaagcatatgataatcctcatgaggcactgtcaaggataaagcggcatcttcttactcagcgtgcttttaaagaagttggcattgagtttatggacctgtacagctaccttattccggtatatgaaattgagcctcttagaaaatcaccaatgcttaccttgaccagtacttgtggtatgagggggccaagcgacacctattcccgaactgggtcaagcttgctgattcagaaccacctcctctgcttgtttacaaatggtgccaaggtataaataatctacaggatgtatgggacactagtgacgggcagtgtgttgtgatgctgcagacaaaatttgaaaagttcttcgaaaaaattgatctgacactgttgaacaggcttctgcggttggtcttggaccacaatattgctgattatgtcactgcaaagaacaatgttgtattatcttacaaggatatgagtcatactaattcttatggtctcattcggggtctacagtttgcatcatttgttgtgcaatactatgggcttgtgctggatctccttctgctcggtttaacacgtgcaagcgagattgcggggccacctacgatgcctaatgagttccttacatatgctgataccaaagttgagacaaggcatcctattcggctgtattctcggtatgtcgacaaggtgcatataatgttccgctttactcacgaggaagcacgcgatttaattcagcgttatttgactgagca

SEQ ID NO: 17028 - DNA, 2116 bp, Oryza sativa
ctgtacgtgtcgctcaagatggagaacgcgcggatcaccggcgacctcgtcccgcacgtctacggctccgagcccatcatcggatcctgggaccccgcccgcgccgtacgtacgccaccacgatgatgctcctccattccgttcatttgcttgatgatgatgaatgccgctcacttgcttaaaattactgttttgcttcgaattcgcgcccccccctgcagctcgcgatggagagggagctggcgtccatgtgggcgctcagcttcgtcgtgccgcctgaccacggtacgtacggtctctgcagttcacatgtgctgtttgatatgatgagatcattgggatgtgccgcttgcatgatgcttttgctgtttttgtgttcgtatttggggtgtgttaagaatgcaattggttattagtgactctatttatagtctgtcccatcttttttttttcaacgcaaaaggtcctgtccttttgttcttggcagtttttacttgttattggtgttctttttctttgttttttgcgctttttttttatagaagcgggttttgtgagcttgtttgatggactctatttatagttagactgtctagtaatccttgctgggttgctgtaccttcaggctgtcttcctgactgtaatatcaagtaaaacatgtaggatttttgcgtttatatttttctgagtagaattatgaaatttcgttagtttgtttgttaggcatagagtttcttgactcagttacaagaggggcagttagatttaacttacttaaaattctgatgcaaattactatgctcatgctatttcctaaccattgcaacttgtggaatctaccatagaaacactcgacttcaaattcttgctcaagcccaaggatgcagacaccccgtgcatcattgaggaaggtccgacccggcatctcactggaggcatgctcgagggcgatgtgaggattgcatggttcaagatgaatggggatcatgagacgcttgagttcagggttttcaataaggcagacattgtgtccccacttgatcttgcagcgagttggagggtgttcaaggagaattttcagccttccaaagtccggggaatccctgatgtcagtataaatgtcgcacctgcgcatgggaccgaggtgataacagtagttcaatttctatttgcatttgaaattggtcttcttgtgctttcatatcaatatatgatggtccgatttgattgcaaactattactatttaacctttctactccaatacttatttactgatatcctatgtttatctatagccaaacaaattgacagaaaaggccaagcactgaattatctgtttaaaacatctgcttcctttgaaagttatctctcgagggcataagtggccttgttctgaaagccgagatatgcttgttaaaaaggcatgtttaggggaaacttaaacaattcagtattcagatggaagagatcccatcgtatatgttattacagaatataccaatgaaactttttttttcgctggtgggatatttgctcttccattttcttcattttccctggaaccatctggtgcaacatttatcattgtacacgcttaataaaatttctaaacaaaacgaaatgccctttccatttcttcaacttttccacaaagcttccaatgcttgcatgatgttttgcactttaatgatgatagctagtctaatcaatgttctggtttctaacaggttttttttttcatatcttactgtaggatacatctactgaaagtttggagcttgacttggagcattacgttattccaacaccatctgcagcaacatctgaatatgcagcaaaccttgccgcaaacccagcatcattgattcaaactggagctttatggacaaatgacatgcttctcagtgatggcatccagagtccaagtagcgccactgcagattttgaagatcacaataactgtaacaaggtaagcactaaccaggtcgaatcggtatgctagaatatttgtcccaccaatgaattattatgtattcccccccagaaaatgaagtgtgttgtgtttttattttaaatcatattttgatgtgatatgtcacctatcaataaccatca

SEQ ID NO: 17029 - DNA, 809 bp, Oryza sativa
gattgcatgggtcaaaggaggaccgaaaactagctattgttttggtaaattactgctgtcatttcctctcttatacgactttcagtatttaatcaccagacatcaggagaagccaactttgcttgttggctgttgctatctaccagcagacctttctatcatgtctatatggttttaaacacataaatgaataaaaataaatgaaaatacactgagttatctgggagctaaaaagctaatctccaactatcatagtataataattatttgttattgcatcttaagattcatttgtatcactgcttattttgaaaagcagattttcttcctaaacatgtctacttgcaaacaggttggcctaccagctcgtggtaaaacttttaccgcagctaagcttacaaggtaccttcgttggttaggtcatgaaaccagacatttcaatgttggaaaggtgattatattcttttcctgattaattgttttgccacaatggcgtatgttggattgtttggcaagtgaacataactctcttttggttgaaactcggtgtgcagtaccgccgcctgaagcatggagcaaatcaggtactaataactaatttgctgcaattctctttgcacacactgattttctttgaagtatttcttcttgttaaatgctaccatgtcagaaattttcatttcaagttttgtaatccaattttatttgaagttactccatttttatatttcatttgttacatcgctattttattttggtgtattaagaatgatattatcttatgttctgattcatgagacacatgccaa

SEQ ID NO: 17030 - DNA, 3719 bp, Oryza sativa
aggtgtatgaaccagtgcaggaaggttcttacattaaaatgattgatatggtaaaagggcagggaggccagttacaggtaaattctattatgttatccctttccatgttttgcagtaaacaggctacattagaaaggttgagaatgtgacatgactatggaatgatgcatgggcggataagggtgtaccagttgggcactggcagccccaaaaaattttaccatcaagtatgtatgcattggagagactaaatattaattgcaaaaaagaatcaataggggacaaggattgaagtgacgttttttgtgatttgtaggcttagattaaattgagttgatcaaatttaaaccttatttttgtttgtgtgtatgattttgtttttttattcttgagacgtgtgggcactcccaatgagatatttttgggtcctccactcaatgatgtatggtattggtagcaattctatttcatgtacctttaaaaatactgaaaaatacttctgaaggacacaatttcaccaagggtcatagctcttagtgtattcggatcaattcattacataacactgtttggcttttattatcatatgtttttagcttctgaaacaagtcatgcattttagctttattttgattaattattcattattgtcaagctattaatttgtcctgaccttttatccaggtcaacaatatcagtggttatctccctggaaggattgtctttttcttggtatgtacttcaaattcaataatcagaaaatacaagaaataaatagcagaatgcagttctatgagaaactataattttgataatgggtcaatgataaagagcttttaattactagtgcattgatgtgacacatttctcaacatttaactgcaggtgaactctcatcttacacctcgacctattttgcttacaaggcatggtgagagtttacacaatgtcagaggaagaagtggtggtgacacggtccctgaggtttgctttaactttttttttcctttactaccttccaatggggcacaccttcagaatatatatttctactctgatatctcatttgagtatatggaagttataaaatgctatgagtaatattcagcaagttttcatatttacggaaagtgtactctgaaaatgcagagccatttatttgatgtattgaactaataaatttataattaatggtgcacagtgaagatggagagctttactcgaagaaattagccaacttcatagaaaagaggctcaaatctgagaaaactgcatctgtacgtaatctcttgattgaattgcattgtttctagaggcaacttcttatgtcagtatagcatttggagatgaagactgtaaaggagatgagctaatagagtgagagtctctcatttttaattattctgatgtttagatatggaccagcacgcttcagaggacaattttgacagcaagtccaatagttggattcccaaaggtaatcaggaaagttttggagtatttcttacataactcttgcaaggtagttatttatatgggcgttgcttaacaattgttgtttgcagatacaatggcgtgctcttgatgagataaactctggggtgtgtgatgggatgacgtatgaagagataaagaaagttatgcccgaggaatttgagtatgtgctattgttatctttgtttacatttgtttgggagttctttctttagtagtttacatgatgtgcccatctgctagactgctgattgtcaatttgtatcttacattgcacttttaactatcatggttttttttattaaaaaaaacacaatttgagttgcaaaagatggtagtaaggtataaccatacaagtcgcagtctaatgtgtaagtcttgcacttatcactggctggtccacttgtatttattgaatgcttgcatatgaaacacttatgatgcttttccaatacttgttgcaaccagatcacgcaagaaggacaaattaagatatcgatacccccgtggagaatcttaccttgatgtgattcagaggtttaatcatttcttctaatattattcagaaaaaacttttcacagttctttagactgcacaatgcaatggaaataatcaattctaccagtacgtcttcagtcttcactaacttgtgatttggtaaaatcctcagactggaacctgttatcattgagctagaacgccagcgagcaccagtagtcgttatttcccaccaggtaaatctctaaacttcatgatttttccttctgcagagccattgatcgtaaaccatttatcctgtttgtaggctgtattgcgggcgctatatgcatatttcgctgacaggcctctgagggaagtcccagatattgaggtcacacatatgatcttctcttgttcattattgtgctagaaacctaagaaatacatagaccaaactaataccctttaatcttcatgtagatgcctctccacaccataattgagatacaaatgggagtcacaggtgttgaggagaagaggtacaagctcatggactgaatatacatacatctaggctcagtaggacagcaagtctttgctgttttcagatagtcatacagtaacacagatatacgatcgagtcactacaggtctacagctaccacattgtcatttttctcccgacggtgcaaaaacaaaaactagcacctccggtgtaaaactgtaacccactatacccatgaatcactgtaaaaagaagcattcacccaatcagtagttaaaaaaaaaaaactgtaaaataaaaggcatactgctaccaataaagagtgcagatatatacatatagggccctccctaaattttttttctaaaaacatcacatcgaatctttggacacatgcatgaagcattaaatatagataaaaaaaactaattgtacagttatggagaaaatcgcgagacgaatcttttaagcctaattagtccgtgattagccataagtgctacagtaatccacatgtgctaatgacggcttaattagtctcaaaagattcttctcgcggtttccaggcgagttctgaaattaattttttcattcgtgtccgaaaaccccttccgacatccggtcaaacgttcgatgtgacatccaaaaattttcttttccccgactaaacacacccatactgtcaaaaggtaacagaagttgtggctgatccatcactgcttagttggacttgatgagactgacctaccaaactttgaactgtcctgtcctcctgtgccatgtgaggacacaaggcaagcagtttcttgctccagaaactctgctcacatcatggcacgatgctgaatagtatgccaaaaacttccttgattccatgcggcctccatggctgctgctgctcatttgtccctgtctcaacaccccttctatctaacaaacactagtaccattttgtaaattatgtatgacgcggttgactttttattaacgtttgaccatttgttttatttaaaatttatgtgaaaatataaaaaattttatgtcatgcttaaaaaacatttgatgatgaatcaagtcataataaaataaataataattacgtaatttttttaaataagatgaatggtcaaacgttaaacgaaaagtcaatggcatcatatattattaaaatatggaggtagtactttgtaagcttgtatgcttctactactatactagtgtaatgcattgctattgcct

SEQ ID NO: 17031 - DNA, 1308 bp, Oryza sativa
gtgatcagcgtcacggcgtgcgcgctgaaggcgcggccctggacgccaagcagctgggcgcgctgccggtgttcacgtgggggtcttcttctccggcgacggcggcgccgaacgccgccgtgcagtgcacggtgtgcctcggggagatggaggacggcgagctggggaggctgctcccggcgtgccgccacgtgttccacgccgagtgcatcgacacgtggctcgccgtgagctcaacgtgcccggtgtgcaggacgacggtgggggcggcggaggatgatgagccagcggcggctccggtcgctggcgtgtcgccggcgagctaggtgtgttgagtatcagtgtacattcgatcacttgctagagtttgtatctatgcacttgaaaacaaaattcgggtattttttttctttaggaaacaataaacttcgtaggatttgtacattgcaaatcaaatcgaccctgaatgagcacagagaaacttagaattctcgacaaattccaattaaaaactttatatcccactttcacatagcgtataaatccaggtgctccatatttcaacctctctgtgtttagggcgactgggttgcttgagattgatttaaccacatgtgcttcaaacaaatatttaaccatatctcatcggtccggactaattcaactagaaagccaacaatccatggattaaccatgatgactcgaggtaaaacttgaagagctcattacagcatgacaccatctcgaaggttcactgcttgatgcataagaacctactccctccgtcccaaaatataaacatttttagctataaatctagacaactatatgtttagattcatagctaaaaattgttatattttgggacggaggtagtagtatgtttccctacatcactaacccctggattggcagcctcagatgatatcactgcacttcaccaatcacaggctttcagtttcagaccatataccttgttgggaatttgagacagctgaagatactggtggttctctcgcaaaacaatcctgctggaaatactaacttttcacataaatttcaaggaaatccagacaaagttgagatgggggtcacttgttcagggaaaatttttctttcaagagcctttcttcagagtcaccgacatcttctctgccgttgatgcgcatgcacgctgcatgtcccctgacgtcggtgggccgggccttcgtttgaagcccatatactacgcgcaaaaggaaggaaacagttttgattagtcccaccgtgtaaatatacgacgccagaaacctgcataaaaggaagcaa

SEQ ID NO: 17032 - DNA, 1046 bp, Oryza sativa
aggccatactatcctgctccacagagcaccaacataagtgcacctgtgccaacgcttcctatttcttgtgacagtgcaccatttgctcatggtgggtacgcccctagatcagctcatcgtaacaacttacgcacttatcctcctccagcttttgcatcgtcttccaaccctggagcagtctcccatgagccagctattcctagctatccacctgctgcccctagctatccacctgcaacctctgcagcatcatcaagtgtccagccatttcatgctgaagctgctgcacatttgaggcatccaaggcatgtatctgtagggggcagtggtagtgcaaggagtagaaggatgagggattcctatcatggttttcatcatttgatgattgaagacaataacttgggaagatcagcagctgaggtagatattattctctcctcttgatatcagtacaatgttaaaattttgaacacgcatctaatctattttcactctttgtagcggtttatgatgctggatcagttagttatccatgaatcaagagaagcattcgatcctcactgggacatgagactggacattgatgacatgagctatgaggtagaaagaatcaattttctctttaataccacagcagctttagaatgctatttaaacaaatgcaactttttctatacacaggagctgctggctttggaagaacgcataggccatgtgaacactggcctcgctgatgagaaaatttctggctgtgtgatggaggtagcctgctgcagcagtagtcatttgcaggatgatcaggacaatgaaagatgtgtaatctgcctggtaagatagtggatggtaccaatctacctactatgatagcgattcccgcagcgcattttacgcaatacaagttacttaatccacaacctctttttcactgcaggaggaatacaagcatgaggacacacttgggaggctgaaatgcggccacgggtttcactgcaattgcatcaagaagtggctgcaggtgaagaacacctgcccagtttgcaaagctg

SEQ ID NO: 17033 - DNA, 8621 bp, Oryza sativa
tgagcgtccatatgggtgcaagcccgtaggatgcaaatgggttttcaagaaaaagcttatgcctgatggtacaatcgaaaagtacaaggcaaggcttgtagccaagggttatacccaaaaggaaggcgaggacttcttcgacacatactcaccagttgctcgcttgaccacgattcgagtactacttgctctggcagcctctcatggtcttctcgtccatcagatggacgttaagacagcttttctaaacggagagctggaggaggagatctatatggatcaaccagacgggtatgtactagaaggtcagaagggaatggtgtgtaaactattgaaatccttgtatggcctcaagcaagcacctaagcaatggcatgagaagtttgacaccacgcttacatttgcaggctttgttgtgaacgaagctgacaaatgtgtatactatcgctatggtgggggagaaggggtgatcttgtgcttatatgtcgatgacatactgatctttgggaccagccttaatgtgattgaggaggtcaaagactatctgtccaagagttttgaaatgaaggatttgggagaggctgatgttattcttaacatcaaactacaaagaggagatgagggtgggattacacttgtgcaatcccactatgtggacaaggttttgagtcgctttggatatagtgactgcaagccagctcctactccttatgatcccagcgtgctattaaggaaaaaccgaagaatagcaagggatcaactgagatactctcaaatcattggttcattgatgtacttggctagcgcaacgaggcctgacatcttatttgctgtaagcaagctgaaccggtttgtctcaaatccgggagatgagcattgacaggctctggaaagagtaatgcgctatctaaagggcactatgagctatggaattcactaataccgggtatccaaaagtactagaagggtatagtgactcaaactggatatctgatgctgatgagataaaagccacaagtggatatgcgttcacacttggaggtggcgctgtttcctggaagtcttgcaagcagaccatcttaacgaggtcaacaatggaagcagaacttacagcactagatactgcgacagttgaggccgagtggcttcgtgaactcctgatggatttgccggtggttgaaaaaccagtgccagctatcctaatgaactgcgataatcaaacagtgattattaaagtgaacagttcaaaggacaacatgaagtcatctagacacatcaagagaagactgaaatctttcagaaagcagaaaaactccggagtgatagcattggactatgtccaaacggctagaaatctggcagatcagtttaccaaggggctaccacgtaatgtgatagacagtgcatcgagggaaatgggcttgatacccacctaaggttgcataatagtggaaacctgtccattgtgatcggagatcccgtgaatttggatggtgaaacaaactattgtgtgactgaaagaagagacccttgaaaagggctcattttcatgatgtgcttctcttctttcctgcatggtagaatggcttatgtcttaatgtgaaccgagtggcttttccaaacagagatgttgacctgcagaacattctcagaaggaacacacctatatgagttcgactgctagtcacagtctataaggtttgggcaatctctagatactcatgaaaggcctggagtttgacttatatgctccaaacagaggggatgcgaacgacagcccagtcccagtcaaggttttgagtgaaacctgatcacacaaaacttacaattcaaggcatagtccattgttcagttgtggtctgatgaagctcatttcctaggtggaagttcaacttgacagtctccaccaaaaccctggtatatcaaacaggcacaacattgggaacatttcttatgagccttgaaatttggtggggattgttaaaataattgggctaggcccaatttataatattaaatctcaaaggcccataataaatgttgaggataataataccacctcaggatttaagcgagaaatatctcaacctaaatagggagttattagaggctccctgttgaccagttgaggtgggggtcggaatgccacacgcgcgcgccgggccgggccgggccggggcgagggcgaggcgtggcgtggcgtggctggctggcggctggcgtgcgtgcgtcacgtcgctatccttttgcagccactaacccacgttcccacgattccctccgcaacagcgcgtccacgttctttctcctgatagataaggaggccgcgagtccgatccgacttcttcgcttctttcccggtgttagtttctccttctccgcgcctgagttgctctcgcttccccgcttctgatctcttgcgcgcacgagagattggaaggagtagtgcctccgaaaccacaccttcgcctgagatctgcaccgggtaggcgggtgatcaggttttttgggagtgcctcccgcacgactgctcatcgccatgtctggagttgctgccgccactgctggcggaggtggtacgccgccgccgacaggagctggatctggatccggagctggtgcgccaggaggaggtgccgtgaacgactacaccaacggaggcaattctgcctcaccatccagcggagggccattctcggggtataatcttctcctcctgctactgctgttagcgctattcctgttcccattgttagcgctatactatgtgcgctatgttcttgttcctgttctacatgatgcctctagcatgttatcgcgttactggtatgttcctgttcctgacattcatgatgcgcatagtatgctactggttatgttaagatcaccctacactgcttatgccatgatcattgtttcattttcttggattaaaatatgccgattaatgactatattttcaacagaccacaccactatcaccgttggccatgggcgagggcagtaccaccgctgcggctgagagggatgctgctgactcctcatctgagtacagctctcctctccgtcgaccaatggtttattataactccgatgtggcagcagtggatctctaccacaggcagtttttcaagtaccaggaaaaaaaaggtataaaagtgctccacttttccccatacgttcaattttgcttactacctaaaacaacaattgactatttctcaaaacatctataagcttggccttagagttactgtcatcctgtgagctatttttcactgagtttcataaacagttataatgcatgtaatcttttgatgacacaatctttgtctatatatatttagctcgtctagaacagttgcccacactcaagcagtccgattattatcaaaatattgccgattggcataatctaaatcagaagagagcagttctgggtgtagcaaaatcagtgctgagcctttcatcgactcatggtattacctttttttctctccggtatacattcttagttactttatccatatgcacatatcactaaatttgctaagtttttattgatatacagatgagaaagaaatctatcgctgcacgggtatcatcatcgagtgggatgaagtcagtaaatctgccactcttgtcacctcttcacaaatcctatgcaatgaggagtcacaggataacagtatctactatcccaacaccaaggtaaatttgtgaacaacattacttcttggacgtttgctcagtattcttctgttgagcttaggttttgcttcttagtgtttccttgatactgtaatttcgccttactttgtggtgctctattttctctcagcctttgtactttggttattgatgatacgaatagtatacctgtggcgagtaatgatttttggtgaatttttttatacatttctgttgcatttattatggttattggttgaagttaagaatgcttagaaatttcatagaaaatgcagcttcctaatagatacaaactttacctaagcagttcagtgaaatgaattagtgcccctcccacatccacatacacacaaggtcacacatacaaaatctaatatgtagcgatctttcaaataaaaaaaactgtgaatacataatgctaatttgataccccgtcaagacaaactaacaatctacacccactatttctatgtattaaaacataatatacaaagtctttgaatgcacgcagctactgccaggtcttgcccatcttaggccccgttcgatctcccgtgttggagatggatttctgttgcacgcaaaatgagaaaccttattagcacatgattaattaagtattactacctccgtttcaggttataagactttctagcattgtccacattcatatggatgttaatgaatctaggcacacatatgtctagattcattaacatatatatgaatgtgagtaatgctagaaagtcttataatatgaaacggaggaagtaactattataaatttgaaaaatggatttatttgcttttttaaacaactattatgtagaatcttttttaaaaaaacgcatcatttaacagtttgaaaagcggtgctaacggaaaacgaggtatgtagctccatggcctcacagttggctgcactacaaatctttccaattaacctttctcagttgctgagcaaattatcacaatggcacattctgactatctttgaagttcttttcagcataactactggatattttgcatggctagcagtatgcacaaacagtttgcactcactcttgaacacactaagccctaagctttttttcacgggttacatggttgcccacgaaggcgaacaatctgccttctcatgatcttgagcacattatgcgctaaacatttttacatggctaacttggttaccagtgaagatttccaatccaagtgtagtcttgtagcgtactcattgactgcccaatatagttgttcagctcatgcattcaccaaatgtttcacaaatattaatccctggcatccctggctaggaatttactaatttttcacagaagtcttttggatgtttttacctatagttgttgattgcaggattttatttcttgttttttctgtttgttttcaccattgttctcaagactcataatttgttctacttttgtattctcatgtaatcatcttttgtgaatgtcatttacttcaaatcacaatattttcttttcagatgattgctcacctattggatgggactacttctgagatggaattgctctactttagcaaacactatgagattgtcttttttaaggtcaatggggcattggatctacaagtcgcgttgctagatactgagttggaatttggcagtgaagcttgtgtgctagccagggacaaaaatcttgatttgatctgtagacgaacaacaatagtggcaatggacccttgtgaacaccaaaagaaccattatttattcattgatgcttcggactgtgaggtgataatataagcaattatctgattcctttattattatttagataagattgtttagtataacttcattgctaattttattcaagactgcaatggaggagcactgacaaattttaataggaatattgtgagtatggtattatatgctttacccaatgttgcttttattccaagctctcttattctgaagtgcttcgcattatggaaaaagttcaggtattttgattcttgactgtttctaaagtttttgaattcttataaatgattaggagtaagtagagagtagtcttcaaaacttatttgctcaattcttgcatatatatttatctctacaaaaaaaagagacaaagttgcatttagagcaaatcgtagcctaattgttatttatttatttattgcttgctcgtgtctgatttatttgatagtgttttgatatgaaaattgtaacaaatgtgaaatatttttatttttttattttcatctatgattcttaatttaactaattccatttgttcgaatctaataaattgatgataatttggtgtaggaaacttggtcgacctcatttgggtttgaagctgactgtgaattttctggatatatcacatttagagaatctgtctcgtgtttatggtattagttctggcctgattgtagcaaaggtatacccctttctccaagttttctaatgataagctctgcaaactgtaggcatgttatgctttttttttctatatttagcaaactacatttctatcttacacacactactacacttttaattgttcggatcatttctgatgagctggaccaaccaatagctctcaccagcccagccttttttcatttgactatcagtaggcttgtgacttgtgactttgtgagtccaacaagtgggaccaatcttttgaaataatcacaatagtccaagtgtagcaatatgaaatagatgcttgaaaaggtggatttacgataatttaatcaaatctagtgtgattttctgaagctaacttttttagcacagatacagactgttcctatgtttttaacttgattctaggtatccaatggttctcctgctgagagaaatggaattagaatgggcgatgtcatatttcattgtcagcaagagtccatttcaaccacagctcaggtaaaaatacgttgtccttataaatgcaagacttgtgggaatttattttaagtgacttgagctatttctttttagtttgaagatgttctgctagatgtatgtgagaagcactttgagaagggaatcaacttgaactccaaagtagatgttgaggtaagcttttattgaaattagcacattgctttgtggttttttagtacaacttattttttttggcacatatactatcttatagtataaatttctcataaaaaaaactgcagttttttagtgcatttcacgaaattaaaacttgacaaaagtaatgttctaaaaaaatatacaaccgggtgagactggcaggtgattctgcactttcaactacagaatcagcagaggtttgcatattcgatggatattttctaatagttttagttttggatgtttttagatcaaaagggaaaaacctgtgttccattttttaatggaaatgaaacaattttcttcagtttaccattcttacattcttagcacactagaacattgtttaatcgcgactgacacgagcagaaactaaaatgagaacaagttagatcctgcaacatatagttctagtacagaataaacgagagaggaaaggaccaagacatcatacttataatctattacctgccgtgaaatcttatccctatctaaatggtacctttgatcgaagaagccaagagataagattcaggtcttgcaggtttgggcacttcttttcttttcataccgtaccccaattggaaaggcgatacttgtgatgaccttaatgattgcccaaaaatgccatgccatgtgtccgttgatagctttgatagcccattttggaaacttaatgactgaaaagggatggatggggatacatatctacttaagtaaaaggagactttaagaagcagtttttctccatgatatttttcagtcttattcaagaagttatcagctagagacatatttaatcaaggttcaactgcaattggtatcatatcttttgttatcatataccagtccctcaggcccatgcagcattttaattgtttgcttctttttcctctgagaagagcagcattatggtctctcactaggatatctttctctctagatctctatctatccttcatctttccggactcccgaattgaagaaattcctgggtgatttctttcattctatattatcatcgacagataaaacgtctctcagattgtctacccaaaacattatattcattaaccattttttttctgtttagcatcgacactcacgttccaacccttgagagtttttttttcataaagtctaattttaaactgcaccctattaattacttttgtttcagaatgcagagtattccaaatctgtttgactaagccatgggaatctttcttttcaccatttttgaaaatgaatttttcaggcctgatatcaattggttatgtttcaatgaagagcgtaaatattgccccaattgtaggtaaaacaactacagtagataaaggaaattgcgtatcctaagaagtagataaataaattctatccatagcagccaagaccaaagtacattggttgttttcactaatgtactgtcttgcagcattttcgaatttgagttgaatagttcaaatattaatcaatgaaactcttttggtttcagataaacccaaaaagtcaggattacatttctgttgacaaatatactttttgcctttacagctcgttgtttataacttacgcaagcgttccagaagaaccgtcagtttgtccgtagagttatcagatggcatggaggtcattgactaaggtaacaaaattttgccttgttgcccctagatcatgtttggtcacaacattttgttgtttcttacaaattatgcggtcatgtttcctaatattttgcagggttatgggacgactaggactgcaaattgctgtgaggaaattgttattttgtagtagg

SEQ ID NO: 17034 - DNA, 1580 bp, Oryza sativa
  unsure (1)..(1580): unsure at all n locations
gcctgatgtcaaacccaaggctgcaaccaattttaagaagaaaggcaagggaaagacaaagggagactgctttgtgtgtggcaagtctgggcattgggccaaggactgtcctgagtgcaaagacaggaagtctgccaacatgatcattagcgagggcggaggaacatcggggtatggtaaaatattacctacagttctctctgtttttcattcacctgattggtgggtggatactggtgctaatattcatgtatgtgctgacatttctctgttttcttcttatcaggtcgggagaggttcctccttgttgatgggaaacgggtcacttgcggctgttcatggtgttggtacggtcgatctgaagtttacttcgggaaagaccgtgcagctgaagaacgtgcagcatgtcccttcaataaagaagaatctagttagcggctctctattgtgtagagaaggttttagacttgtgtttgagtccaataaatgtgtcgtatctaaatatgggacttttgttggaaaaggttatgacagtggaggcttgttccgcttttctttgaatgacatgtgttataatcataatgctgtgaaccatattagcgagaatgatgagtctaatgtgtggcattcgcgactctgtcatgtgaatttcggttgtatgacgcgcttagctaacatgagtttaattccaaaattcactttggtcaaaggttccaagtgccatacttgtgttcaatcgaaacaacctcgcaagcctcacaaggcatctgaggcgaggaatttggcacctctagaacttgttcattccgatttgtgcgaaatgaacggcgtgttgactaaagggggaaagaaatatttcatgacactgatagatgattgcactagattttgctatgtgtatctattgaaaacaaaggatgaggcattgcattactttaaaatctataaagctgaggtagaaaaccaactttgaaggaaaatcanacggttgaggtctgatagaggtggggagtatttttccaatgagtttgcatccttttgcgaagagtttggaattattcatgagatgacgcctccctattcaccccaatcaaatggggtggccgaaagaaagaaccgtactctaactgagatggtgaatgccatgttagatactgcggggctttccaaggaatggtggggtgaggcagttttgactgcgtgtcatgtcctgaataaaattccaatgaagcataaggaagtaacaccattcgaggaatgggaaaggaagaaattaaatctctcatacctacgaacatagggctgtttggccaaggtaaatgtacctatagccaaaaagcggaaacttgaaccaaaaactgttgattgtgtgtttcttggttatgctatccacagtgcgggttatagattcttaatagtaaactctggagtacccgacatgcatgctggtacaattcttgagtccagagatgctacattctttgagaatgaatttcctatgaaatatacacctagcacttctagtaaagaaactgtcatgccccatgagcactttgcaccgatagaacacgatgatcaaa

SEQ ID NO: 17035 - DNA, 3279 bp, Oryza sativa
cccaaatttaaatcccggttcctcccctcccaaacgcgaatgcaccaaaatccccatcactttataggtttagaagttatactatcacgagcaggcattttaacgatagtgtacactttctacagttggccttcagcgatgcatcgaaagcactactactatatgtaaaatgaatactttttaaataatgacacctgaacatgtaaaatgtcctgcattggtaatgtgcctaaactgatttttttttactactatacattgttatattacactattgagaacatggttctataggtgctaatattgtcggcagaatcagtttcaaacgtagggatttttctttttaccttggaggatttgagaaattcaggcaccaatatctttttcaagcgcttattcccttggactgaatttcttgattaaacttcctgattctgtttaacagggattctcacactgtcatctcttgatttccctttatcgtagacgttctcccaaaaaatacaatcacaaaggtagacatctcattcaattcagagaaatatatttttgtatatgtgtgtcgaaacatgaattcggcaataataaaacggggtagcgcacgagacctaaaagtggatggatgtggagacaaatgatttagacaggttcaggccctctcaatgagaggtaataccctactcctgtttggggatttgaatccgccgagtgtgtattgatctgacgatcaggttgtctcatgcccctagaggggctccctgccccccttatataggttggggggcagggttacaagatagaaaccttaaccaatacggtatcggtttcctaaatctactttacaatcttatcaaaccaggactttaggccgttccataatatacagggaaacgtaatacccaagtcatgatctgttacatattccatacatatatgttatcccctattactagtcggataaccatgccgtgtgggtatggggtacccataatctccacagtagcccctgagaccttcacagtcgaaaatataatcttctctcgaactagattactctaaagccgagtgcttcaatcatcttcgccatggtctcccgagtacttttaccaaatttgaagactgtggagggctgaaaaataaagtcaggtgcatcgaatagatgcacctaataggtgtagcccccaactatgtgattagctgaacaaactaaacatatagtcaaggaataaattatccaattaaccgagtggtttttgataattatagtcaaccaagtgacttgatactaatatatagcatatgcggtgtgaatccccgaataatatgatccaagtgatataccgactgcttggcaaaatatgatgcgtacaacctaaagttgacaacatctttgaaagttcacatagcaaaacaattataaagaagcttgaatgctgtgaataaagaaatttccaaagtattgggcatacgccatgcgcacactgctttaacagatgtgcttaagtccctaaaagacacatggtttcaccacacctggaaatatatggcatatatggtataacatccgagtaagtaaactcataaaggatttaccaaccgcctgaaaaatgaccataatatataatcagcctaagccataatattggtcaataaaaatgcacacttacgtggcaaaaaacaatgatattgtatccaatcaattgcttgataaacccaaacagcaccttgactatataaaaaagccagcggggcagctatataaagctttactgtttgacaccttttaagatgcattgtaccaactcttaaaaagtcgagtaactgcggtataaaaggattttaaggtattgggcacttgatcacgcgcactttggcctaagcgaaaagtgcctaagtccctaaaagaacgtgacaggccacacctgaaaatatgggctgcagacatattaggcctagaccaaaaaatatgccttcgacaccctttaaaggatgacgcatgtaacatgctctcgagtaataaatcttccgggtgatatagaccaggtgtagctcatatgaatagcttctgatctgagtgattatcccttatgagatactccaaaatatatataataattgaatcccgactggcgcaagtattcggttgatagcccttacggggaataataattggtccagtctttgagcatagaaaatagactcatgactatgaatccatgtgggatgtatccggaacaagtccaaattggagatataatcctcacgcttgagttgatgagcccctgagcatatagcttgtccttctgtcatagtcaaaattgtccattgatggtagctgacgcagttggcatagagacaagacgaccaacatagagataatattgcccaccagaggtggcaaaaatattggtggtagtgaagataatgataccaatcaaaagtgatgaagttgcacagccgtggaggcgaagaaaccagtcggcagtagtcaggtcagccatcaatgaagatgaaagcgcccagcgataaagttgtgtagccatggcagcgaaataatcagtcggtgacagacgaggcaaatcaaaggcgatgacaaaatccaccaatcatggagatgaagaaaatagtcggcgacgacaaatgcaactgacatgatgaagatgacgatgtcggtgatccagtcaatagcagtgtcgcaaccaatgataatgacgaagacgctcatcagcatttgcatagtaggtcaaccgtcaaggtgaaataataagtcagcgaaaacataatcatccattagcaacagcggagatgtcagggccgatgaagcagaggtgctggtgatgatgtcagtgacaataatccatcaaattaatgttatggctgttgtagatgcttcacttggaggagagttgatgttgttgtctaactcgtccaaaccgaaatatttgaagttgttgaagtagaatgtctgctccgaatcaaagatgaagataatgactcctggagttgactcgttggttgatgaattgatttcttcagcttgacataaaatttgtcaaattttgagccttgtatttgtgtagcccccgactctttgattagttgggaaacaactgaacatagagtcgagaactgtagcttcttgtcatcgaatagtcattgcttgattgaagatatgtgttgaagatgtccgagtagaaatcctgaatattggagagccacttgttgtagtaaaataacatggcattgcatgccgagatgtcgaggttcacaaagacgtcg

SEQ ID NO: 17036 - DNA, 1725 bp, Oryza sativa
tgcctgcaggtcgactctagaggatccccaagaagatagcatcagttggcgttataacaggccagccgtgcaggcggtgacaccagtcagcggcggatgcagcggccggtcggtgaagacgtagacgcccaacaacggcggcataaaggccagccgtgcaggcggaaacaccagtcggcggcggcgaaggcaagccggtcggtgaagacgtagacgcccaacaacggcggcataaaggccagccgtgcaggcggaaacaccagtcggcggcggcgaaggcaagccggtcggtgaagacgtagacgcccaacaacggcggcataataggccagccgtgcaggcggaaacaccagtcggcggcggcgaaggcaagccggtcggtgaagacgtagacgcccaacaacggcggcataaaggccagccgtgcaggcggaaacaccagtcggcagcggcgaaggcaagccggtcggtgaagacgtagacgcccaacaacggcggcataaaggccagccgtgcaggcggaaacaccagtcggcggcggcgaaggcaagccggtcggtgatgttctgactgatccattcctggagcgtaagagataagcttaaagccatgaatcccttttatgcatatctggatctggatcctgcagaacaaacatataggatgagtagtatctgatataaatataatactcgagaaaaaatcaagtattttaaaatatttataaatatgtatttctcctcttgtcaattttgatttccccgagcagatgactctgtacgtttaaacactctgtccgactagtcattgcccccaagcatcgggagtcggcctaggcatttcccaaacatgcatatgagtgacatgagttcgtcattaatggaacaaagtttcacggatcagaatttactactcaggtacttttgcaattattaagagcagaaaataaatttatctcatctctatgcttttgatttattccgaataatacttagcaccttgcgttactcggcccatccaacgagcccccgggtgctaggaatcggcccaaaggcaaccatccattggcaaaccaaacggaaagcataggaagatagaactccataactcgataggtacttttgtactcagattatgtcgcaagcaatcaagataaatattatgaaaaatatgatataacatctgtagcccccgactcactactcaatggaagaccaattggtgtagtgaggcagaggaaaaggaaaaatatcatataaagaataaaataaatgatgacttagctttgtaatattccccttggtgatggcagaagtggccaatgtgggaacaaagtcgtccatcaataacaatgaagacaccagtcggcggcgacgaaggcggtcgacggtgaaagcgaagatgcccactaacggcggcataataggccagccgtgtaagcggaaacaccagtcgacggcaacgaaggtgagccaacggtgaagatgtagacatccaacaacggcggcataataggccagccgtgcaggcggaaacaccagtcggcgaaggccagccggtcggtgaagacgtggacgcccatgaacggtggtgtgaccaaccgaccgtataggcggggacaccagtcggcggcgacgaaggcaggccggcggtgtagatgccgatgcccatcaacggtggtgtgaccaaccgcccgtatagacgaggacaccagtcggcggcgac

SEQ ID NO: 17037 - DNA, 5327 bp, Oryza sativa
ggaaaggaagagaggagcactcggacacggcaagggcacccaagtaggcgacgatgatggccgtgtttcgatctcatccagtatatgaaattcgtcaaaatatcaggaaatcaaacaatgattaaaaattaatctaatagagattaaattggaacggtagacccgattgaagatttgagccatcgaaattgatgagattgatctcggggtttcttctgaagttgattccatcgcacttttcgacaggtaattcgacgcaacccctacctggcgcgccaactgtcgaaacatgaattcggcaataataaaacggggtagcgcacgagacctaaaagtggatggatgtggagacaaaggatttagacaggttcaggccctctcaatgagaggtaataccctactcctgtttggggatttgaatccgccgagtgtgtattgatctgacgatcaggttgtctcatgcccctagaggggctccctgccccccttatataggttggggggcagggttacaagatagaaaccttaaccaatacggtatcggtttcctaaatctactttacaatcttatcaaaccaggactttaggccgttccataatatacagggaaacgtaatacccaagtcatgatctgttacatattccatacatatatgttatcccctattactagtcggataaccatgccgtgtgggtatggggtacccataatctccacaatgtgtttttttattttttttaaaaaaaattcagattattgcatcatctcgtttatacaaaattgcagaatcccatttcataatctatattgtatattcttttagcttctaagttgaatggacctcatgcatgattaaattttcaatctatattctaactaatgttcactggtcaaataagggaatctacatagtttatgtggactgccggcatatatactatcttcttctaccctataattcaccaattataatcctacaaacctcatttatcaaatccagcgatccagaatcaaccaaaccaacgccttagataagaagctagaggcaaaacattcagccaccgcagccgattgccaggaagtcctcgccgccctttcccctgatcgagtgctcgatctgcctggacacgtgcctacggcaagtctgcctggactcggtgagcagcttttttttcttatatatacttgcagtttaattttcctctctcccactgtagcatacatcatcagtgagattattgatatcagattatgtgcatgtgtgacacaaaatttattatataaatggacttttcatttaattgccgcttcctgaataatgtaaataatcctaatattaaattatcaatggctattagcctattatgcatttgtgaaaaagttactgaagtagagataaataatgaatacaaatgaatatatacttgcagtttaattttcctccctcccactatagcatacatcagtgagataattgaaatcagattatgtgcatgtgtgacacaagaagttaatatataaatggacttctcattcgattcccgcctcccgaataatgtaaatacacacctatttccatgttaacaaaataataaacaaatcattaatgttaacaaaataattccatattctcagatatatcctaaatttatttttcattggttggtgtagctttccagcatataatttgaacaaaaaaaatccatgattaaaaaaaaagaacataagtatcaccatttttaatatatctgtgtgtgtttttttatacattcttatggaatcatctttttcttatcctcgctgttaaattactttggtacttgctgtacaaaataatttgagaagctcaccatgtgtttatggctaattgtccgtactaaaatgggattgaaattggataacatcttcaattgtaatgcaatatgtgtatatgtctaattgttttagcgatatggagtctcataaaatttattactaatgctagaactgacagtctcacctgcactgaactattcaagataccatcatcctgcccttgatggtaatttagaaacttagatccattcacgatttgaagattgctaacgtgatgaagaattccaaaatggaggctgaaccttctgagttaatggcgtctacaattagataaaaccaaccgatatatgaactaaaatgaacttaaaagacttttattgagttgaactgcacctaaaataatatattttgtgttagtatctctgggaaggtatcgatatgtcatttttcattattccactaatattttggacaaacagcaggctcatactgcatactattttgcatcttgattcagcagctagactcgatgtctgtctcttgcagctagacttggtcagccatcaagtttgcagtcttacatgcatgtttaaaaaactgagaatatcgggcacattagcgattcctgataagagaagcttagaatatgtctggggagtgaggatttaaattcttagtttttagcccaattgacaatacaaagatttgtacccaggatatatatcatgaattagccatttttcctttgtatggacctatgtgtaagagatgatttgaaaaatacaacatttgtgatgttatttttcaaatacaacatttcaagtgctttattcccttggactaaatctcctgattcaactttctgattcggtttaacagggattctcacactgccagctcttgatctgcctttatcatagacattatcccacattgtgtactgtaagtatactctgcaaactgaaaagtatacatgttcttatccagttctttacaacctaagattttaaattgacttttttttacataccttaattatatgaaatatcaggtgtgaagccaaaataggagcgacaacaatatgaatctcctgtatagaacacaaagtgaatcattaggctgtttttgtcggtgacctttggaatatattaagaacaattatgattaacttagcagattctatataacaacagtactacctccggttctataactattgacttttgggataaggttgagtctaaacttggacaactttgactatcaatatttttaaaactgctagcaaccatgcctgtgccttgcaacgggcaagacaattgctcttttgtgtattgcagttggtgtacatatcgtgctttgttgttggcattgatagtaaaccaattagattgttattgtcaactcaggattattatgctttgtacacaagaagcttctattgattgatagagtaaatcgataagaatgtaatatgttatattgtgctttgctgttggcattgacagagtaaaccaatcatgatattattttcaactcaggtttgtttattattttatctgttaggaatggatccaaatggttcgtccaatgggttcgcattgccttcagagatatagcaaatgtttcttcaggtgttgtaacacgccagatattttgtactttgttgttgagttctatatacacccatgatgtttatgaactccactatactgtcgtgtgcccgcaacaaataatagaataactcaatactttttaacatattttttaagcgtatattgcccttttatattgtatactgacatgattatatataattaagtcttgtaaagttttattgtgcccacacaatatcattgtattgcactttacatgaaatatattttatgtatgatataaattgaattaaagtttaaatgcacagatcatataaaaatatattttgctaacataaaattttaaaattattatagacaaatagaattgcaccgtagcgtttagcacgggcatattactagtatattataagttcttttatatttgttctctgtcaaatttatttaaattgattaagtttatgaaaaagaatgtagcaatatttttagtataaaacaaatatgctacggaaatatatttaatggtcaatttaacaaaactaatttgagcttatagatgttgttctataaatttgattaaacttaaaaatatttgacttgacttaaaacatagaactgagggagtaatgcatataccttatctacatggatttgtttcttcccttttttggttccttcacttctctgtttctccattgcatattggactggttcattggacccctgaaagggctctaattggcttggactggacgtggccggcttgttctatttcgacctggacatcaatccacctcgatcagacgtaatctttgaactcgtaatgtttgtttacatttctggcacctttcttggtgcttgcattctttatttttttccaatattttatgacttattacctttatagtgtatattgaccaatgccacagcacataaatcaatataaatcaatatgaatgagagggatgataatcctacctgtggtaaagattaccgtgggcacattattggatggacacaagcgtggattcaattttttttgcacgtgggtacatccgacctggggccccaaatcctaacttgtaggcttgagtattcttttatgcctatggataacccacgcccgacctgatatatgtgtttctagctgattttgtctaatcctatatactttagccaaattaatcacatcactcaatgaaaatagaacttagccagcttcgaactcaattctatatctctcccttactcatcttctctcctgtgacgaaggtcgatcgatagagcaggtaggtgtcagcgtagtcttgcttgtgattctagattcttgtatgttcttagtgcctatctgagtatatatatgagctagtggtgcctatctgattgtgtcggttaattatgttgatatgtttaattatctaataatgtgaggatattagttatgttttaataccctattgggtacccaccgggttgccaatgctcgtcgagcatgggcatggattgatttctacccaccaaaactatcgggcatgcatgggtcaggctagagatatctggtctacggtcatatcatgcgtgttcttgctccacccgactcggctcattgccaccccctagttcatagtgcaatggctaatgtgttatgtgtgtatatttgtgatcaggcaaacgcattgcttagtacatatccatgattgagctacaattgcacttctagtgacattttagaaacaagccccactgcttattgtcccatgaagcaataagatgggacacacgctaaagggaaaaaatgataggccaaaacaagcagcatgcgcgcgcagagacagagaaaacaaattattatttttatttaaaccagggtcgcaactcacaagcttatagtcaac

SEQ ID NO: 17038 - DNA, 3459 bp, Oryza sativa
cattattggaaataatgagatattatgattgggtgaaactgtcttggccatctaattggagtatttgggagaggtgtgtgcactgtgaagtcagcctgatcgtttgattcgtagttatctccagtcttgggcagcttaatctggctccaagttggcagcaagcagtccctgttctgaactgttagccgtacgaaatcaagattttgttctgaactgttaggcgtacgaaatcaagattttgtttgggatgggatcgttttcggcaatctcttcaactctgtatatcacgtcgctttttatttggttaagttagtgggatttggtcggattttaactctcacggtgaggaaaattggattttagtggagtatccttttcagccctgttcatattttgtttggaggaattgtcagttctgctcctcagctatcatgggagctttacatttaatcttgtgaattaactaatataagctaacaacattatttaagacatgcgtttttagaaatcggattgttttcttcgtagttggtttttaacaactaaatctggtccatacacgtttctttctttatttatgagtactttcgattgcaataataattaggcaggtggtttgcttgcacggcttgcactggtgttgtacttttcttacgttgttgtcagcaagtacttgcgtttcttctttcgcaatcttcttcgacttatttaggttggacaaattaatttccgtggcatttatactagtcactgttattcaatattcctaataatcgtggattgctgtaccttactccatgtaaatttgttagccactttttatctcgggatagagataaagatggtaaaagaccaagttgcccatactagtaaatcattgatctgtgttgaatatgctcttctatgttccacacagatttaagcagcacttgcgcatgcatgtatgcgaattcaaactacaaaagttaaaaatcctttactgtgtgtgcgtgtgcaccttacaataatcaataaagtgaaaaatcaaaacgcaccttacaactcttgtaaggagggagaaatgtacagcatatagttatgcaataaactacatattggttgtaagttcataaaattgcttttgcagtatcggattactaccagtttgatgatttgcttactgatgaagagaagacacttaggaagaaagtccgtggtattatggagagagaaattgcacccattatgacagaggtatgttgttgctatacatagttttcatttgttaatcccctgcttcttttttttttttgcaaaacatatatatggtatatcttctaggactagtacatttttttcttgtcgtcgctggatggtaactctcccttgggttgactagctgttgtgttacagtgacagttgcctgctcgatgtgtatcatgtcataactataaacccctatgggctttttacatatgcagtactgggagaaagcagaatttcccttccatgccattcccaaacttgcaactcttggcttggcaggagggacaacaaaggtatataaaatactaaatcatctagtacttatgttttacatttgactgtaaaatttcaccagtacgctcgttgtctcattgaaatttgatccttttccttgaatttatcttggcgttacagggatatggttgcccaggactctcacttacagctagtgctatttctgttgcagaagttgcacgggtggatgccagctgctccacatttattttagtacattcctctttggcaatgagcacaattggtaaagctataacttattcagatgattttgtttgaaatgtgttatagactgaccaagacaactattttctgagctcactatttttgtcctttcaattttctgtgcaaatagcactttgtggatcagaggctcaaaagcagaagtacttaccatcattaacgcagtttagaacaattggttgctgggtgagttgcattctcctatttatgtggttagcctttgtagcttttattatagtattcaacatgctgttttacatattgtcatcttaagaagaatgggtcttcttgctgtaggcattgacagagccagattatggaagtgatgcaagttcattaaggactgcagcgaccaaggtttgaaacatagatatcatgaaaattttaacttctaagtaaagaaaaatatctgaatgtttctgcacaaccttacaatgttgtcatgttggtttttaccttggtaggtgcctggcggttggcatttggatggccaaaagcgttggataggcaacggcacttttgcagatgtgctcatcatcttagctagaaattcagatacaaatcaactaaatgggtaatcatcttccgctggactattgttgatatcattttgtctaccactgtacacatgttaattcgaactcatttctatgcccatgaatgtgaccactcataattgatatggcaaacttcctctagatttattgtcaagaaaggagctcctggtttgaaatgtacaaaaattgaaaataaaattggactcagaatggttcagaatgccgacattgttctgaataaagtatttgtccctgacgaagatagattaactggaatcaattcatttcaagacataaacaaggtaacaaagacatctcttttgattgcgctaatcctactctgtgtcagtcaatttgaatacactgccatgtgcactaacctgatttttacttgctgaaactttaactaccggatcaggtccttgctatgtcgcgcattatggtggcatggcagccaattgggatatccatgggggtcttcgacatgtgtcatcggtgcgaatcaccttcttagttcagtctttactagtttcaaattggtaccacctaatatgtattgactttattatttaccattggataggtatttgaaagaaagaaagcaatttggagttccgttggcagcttttcagctcaaccaacaaaagcttgttcgcatgctagtaaacatccaagccatgcttcttgtcggctggcgcctgtgcaagctgtatgaatcaggcaaaatgacaccagtccatgctagtttaggcaaggtttgtacaaaatcacaatgcacttagaaaaatggcatccaccttatgattgtgcgctgttcggtttgatttacttttcgcttgctttcttcaacatctcactgataatacttgaatccaggcatggacatccaagaaggctagggaggtggtttctcttggccgtgagctactgggtggaaacggaattttggctgactttctggtagcaaaggtaaaatgattcagatttttttttcttttttggtaacataatctctttggacttctccaaatccaaacatgataggtttgattagaaagattaaagtaattcttaagattttccgacgggcacgtctttaccgcagtacgtacattgcata

SEQ ID NO: 17039 - DNA, 631 bp, Oryza sativa
ttctttcttaactagtgggtgaacagtgattcataatatacttcttatttgcaggcgttctgtgatctggagccaatcttctcgtacgaaggcacctatgacatcaacagcttggtgaccggaagagagatcaccggaatcgccagcttcaaacctgctgcattgacaaaatctcgtctttaattttttttcctttcaaatgtatatagctgcaatagacaaaataatatacgtccaccctatattttgatgaaagcaaatgggcaataaaaggaatagaaaaaccatatttgttcttgaaaagaaaataaaagctctgatatgcttcgttttgctaattctttctgaacagttctgttctactctttctcttctactcaaagcgaagaaagctgggcaatgtattcagtagaaaaccatttaaggtgctcaatctttcaaactatcttaaataacagactcttatacgggagtaaaactaagatatgttttatatttcaaagtatttgaattcttcataagcatttgaccagcctgattttatattttagtgcgacgtttcaattttgcggatttgaacatagattttactttatttattcaaaatgtagcaatgtatgagatgatgttg

SEQ ID NO: 17040 - DNA, 2538 bp, Oryza sativa
  unsure (1)..(2538): unsure at all n locations
ttcgtcgcggccgatcacgcccaaggacaaggcccccgctgtagcgacgtcgcggccgatcacgcccaaagacaaggccaaggcggcggcggcgtcgacgtcgcgatggtccgcggtgtcgccgaggcagctgatgcagaaggcgtccaatgcctttacaagaggcagcagcagcaagtcgcgcgctgccaagaaagacaaggaggcggccaccccggcggcgacctcggccgccgccaaggacgcggccactccggcgtcgacctcggccgtccgcaagaaggccgccacaccggcgacctcggcggctggaaaggcggtggccggtgcttcgcccgggccgacgagagcccagcccacggaggagcaccaccagcaacccactgaagcgccgccggccgaaccgtcacctgccgccgccgcggtgcaagaagaggcggtgacttcgagagcccagctcacggaggagcaccaccagcaaccacctgaagcgcccgccgagccgtcacctgccgccgtcgccgtgcaagaagaagcagcggctgcggagaccgaagcagagcaagaaaaacaaccggatgagacgccgcaagaagtcgtcgcggcagtggaggagaaagttcaagacgagcaggttagcacggaagcagcggaggaagccatcgccgtcgaggaggatgccgccgccgtgaagaccgatgcgccggagccggaagagacgcagacgcaaaccggtgccattgcagagtcggaaacagagtttcagaggagttcagaggatgagccggcatccgacgccattgtcgaagaagcggcgatcgaatctgcaacgcagaatgagccagatgaaccagaatccaccacggttgaagagatgcccgtcgaggaggagatcaagcccgatgagagccaacaagaagagacgccaaaaccagaagagagaatggagaactctgaaacaagcgtgatctctgaagatccaaaagaaatggatgcaatctctgaagaccaaaaggtggaagaacccgtggttgctgaagaacaagaggaactctccgaggttgtaaaaatggctgtcgagccgagcatattgtcagagccagcaacgccgtggaggaagaagatcgcgacgacgtggagacggagcaagcgaactcgtcggagcccgcaacgacgggggaggaagaagaagatcgcgacgacgtggagacggagcaagcgagctcgtcagaccccgcaacgccgttgaacgaagaagctatcaacgaggagggcacgtcgacggagacggtgaagacgaagaaggtggcgttcaaggggagcaaggtgaagacggcgatggagaggcggccggagggggagcagccgaggaagaaggacgtggcgcggagcaacgacgtgatcgaggagaccaagaggacgctgatgatgaaaaggaagagcaaggtgaaggcgctggttggggcgttcgagacggtcatggacacccccagcccgggaaaatcgagctgattttgatttggatttttttttctttttttttggagggaaagcttcagcggagatgcacgtattgagtggtttgaattgaactgcgaggtgtgctttgtggtgtgatgtttcggtttcttgttctctttgttgcattgatcgttgattgattcttctgataactgaaacaaatggaaatgttattgtcgatttgtttgtttgttgatcattcgatctagtgttgtttactaggcttagttgtatgtaactaaaaagggaaatagctgtgtgttcttgagagctgagactggtgtggttgtcaacttgtgctacattgctgagttttgagatttatgcttgtaaacaattattgatgacatgcaatccattttgtacgttttttacatgttcatggatatggatttctttatagtacatgccctcatttcatacatgaaatttgaatatttattgaaaataactaaagaaatgatgatatcatctaccctctctgctccaaaatataaacactagttgaaataccaaaaatataataacttccaatactattgatctcatcaatcacctttcatttaattctttttctgatcttacctctaaccattccgataacaaagtatttttcttgttaggtttactctcagttaatttttttttaataatggaatagaacatcatcctcaacaagctacaaccaattattacatccaaacactcaaagtgagtgtagtctctgttaaataacctagagattattatattttgaaatgaaaggaagtaccattgtatcgtactccctccgtcctacaatataagggattttgagtttttgcagcgtttgaccactcgtcatattcaaaaattttttgcaaatataaaaaacgaaaaagttgtgcttaaagtactgtggataataaaataagtcacaaataataatttaaaatttttttgaataagacaagtggtcaaacgttgcaagcaaaaacttaaaatcccttataatctgngacggagggagtaccaaat

SEQ ID NO: 17041 - DNA, 2665 bp, Oryza sativa
  unsure (1)..(2665): unsure at all n locations
tttcctggaacagaatatttgtataatcacttttagccgtaaaataaatcaatttctgcatattacacgtattactaccggccggtaaccaggctgaacatcttcaattttcagtagtaggcagttttagtcatggtgtcatggtgtccacgattaacatttctaagtttatccaaaaagattcagactaattcgcctgaaggcatatacttggctgatcgaaatacctggatagctagtcatggtgcacacgtcgacatatctgatggttttttctgctcgcattggcaactaattaattaaattaatcaaccaaaccaacgggcgcagatctgcagcggcggcgcgcggcacgacgaggtggacttcgagttcctgggcaacgtgagcggcgagccgtacctgctgcacaccaacatcttcagcgacggcaagggcgagcgtgagcagcagttcgtgctctggttcgaccccaccgccgacttccacacctactccatcctctggaacccacacaacatcatgtaagctctgaaaaatttaaattttatcttttaggagtatcttttcttttttctgggcttatatttatacttatcaatcaaaatttaaatttttaacattaaatttggatttgatttttagagttttttaatcatagtttatttttcagaacttgtttttaaatcgctaagaacatttacataaaagttttatttataaattatttttcgtttgtaaatatgtcgtttggctcggtctcctcgtcaaattcagagagacaaacctgtgtgtaacaaatctgtaaaaaaaaatgttggtggtgcagactgtacattgacgggacgccgatcagggtgttcaagaacaacgaggcgtacggggtgccattcccgacgcggcagccagtgcacgtgttcgccagcatctggaacgcggaggagtgggcgacgcaaggcggccgcgtcaagacggactggtcgcgcgcgccgttcgtcgccacgtaccgccgctacaacgtctccaacgcctgcgtctgggacgccgccggcgccggcgcctcccggtgcgccggcggcggcggcgggtggatgaggcggaggatggactggtggagctggatgacgctcaactgggtgcggatgaactacatggcctacgactactgcgccgacaggaagcgattcccgcaccgtttccccgccgagtgcatcatccccatcggtagaacgtgaggcgtcgtacgcgacgtcgactccatgatgattccatccgtcgtccagcgatctgtaggctcatacttgtgttttgcagtgaggggaactgaatgaataatcgtctcttcttgatcttttaggtttgggttgagttgtgcagggtaatgtggaaagtctcaactcgttccagagatctgtttttttctttctttggtggccacgacgatgtaaatggacttcttgtttgatttttttttctaaagatctattcgtctcgtgatcgtccccggcttttattattgtgagacgacgagctatagaactctgcaaattggatgtttgggccgtaatggcgaagtattagtgctgggcctttatgcttggtgggtatgggcctatctgccaaagtattaagcccaataatttgtggaatgggctgaagcgtacatggggactggacctgctattaatatctgtataactcacagacttttttttacatatatattcgagatgtctagctcctgtgaagaaaacctcaggtgaattcatccatgaacaaaacgagggatttccagtgcgatgtgcaattttaagttttttaatatgcaccaaacatttcttactgttacgcagagagaacactattcctactactttagttgttcacgtccaaaatctcaaattaaaggaaggaattgttctgctttgtgtgtccacagtgcaccgtgctcgcctgtcctcccagtgctcccctctaacttagccgccgcaccgacatttcaccagcaataatcaatggatgcgaccctccgaaaaactggaccttatcttcgatcagctagctagttcatcacccttccgaaaattgaagtcctcacggttcttcttccacctccctttcaggcatcaacatccagcagaggacccgaaatccccgcaaatatcccttcatggagaccacgagctactgcatgagatgtgctactgctgtttgagatcagcagaagagcagagagtctagtcagacagctgcttccaactcggctccagattgctacaaggtgtacgtccttctcttgacaggcctagacgatttgtcatgcagcagtattcgggttttatcttttcgcttatacttatacttataagtcaaaatttaaatttttaactttaaatttaaagctgattttagagtttttttttatcgaagtttatttttaatataaacttttaaatcgctaagaacacgtatataaaaattttattcataaattagttttcgtttacaaattcccttaaaatttatttttttcgtttgcaaatatggccgtttcccttattctacaaataaaccaaacaatgaagctaggagtaagagattttaatattttttngtnntntntnnnngngnnngnncntactgtaccntaatacgatgnagcctt

SEQ ID NO: 17042 - DNA, 647 bp, Oryza sativa
cagccgcagcagcagcagaatcaacaagggactcgtgcgccccgtcctccttcaccgactgtgcagcctggtcaaggccgcagggacgctcaaggtccgcagcgtctgtgcttcaactgcttcgagcccgggcactttgcggataaatgcccgaagccaaggcgtcagcaaggccaagcgcctccccgccccaacaacggtggtaaggacgtcattcggggtcgtgtgaaccatgtgacggccgaggacgtgctgacaactccagacgtcatcgttggtacgttccttattcattccatccctgctaccattttgttcgactctggagcttcccactcgtttatatctgtgccattcgtggggagaaatcagttgggggtagaaaggcttagaaaccctctgctcatcaccacccctggaggggttatgacagcaaagtattatagccctgccgtccctatagaaattcaggggattccttttccctcggatctgattctgctagacaccaagaacttggatgtgatccttgggatgaattggttggctcaattccaaggagtagtggattgcgcgagacgcactgtcactctgtaccgagggcccgaacaacccggttgttttctttgcacccccaacctcagtca

SEQ ID NO: 17043 - DNA, 3781 bp, Oryza sativa
  unsure (1)..(3781): unsure at all n locations
cagaggggttcacgtggcaatgtgaaagtaaagtagggaactcccatgacgtgctgtgggttccacatgatgtagtaggtgtgaaagactgtgtggggtcaaccaaaggcggaattgttgctcgctctgcccctgcccctgcgtgaacacgttggtgtgcagcgtgtacggctcgccggtcacgttccccaggaactggaagtcgatctcatcgtgggtggaaccctccggcgtcatctgcagcccaaagctcagaagatcactcaaaccatcagcttcattactccactttagtgccgtttttttgccgaatttggtagatgaataaatgatgaagtgatgagaccgtttgggaaggaagataagcttacgtataaggtggtcccggtgccggcggagttgccgggaccgagcttgatctgcatgtcgatcttgcctaagaggtactcgctcttggcctggaacccagagccgaagctcctgtcaagcgtaaggtggagcccacgcccaccattgtcgatcttgccgcggccctgcccccacgacacctccgcgtcctggaagaagttgcctccatgcgcaatggcccccaggcaggccatcgccacaatgccaagcgccaccgtcctcatcgcgcgatcacaacacacaagaacccaaagatctagcaagcgagtcgaagcgtgaggacaatgagagctactgggatcagtgtggattggtcactggaatgggatggcgaagcacttgcctatgagccggtatttatacttgggcgtggccggggcagctagcaatagcagagctgcgggcagacaggtggtatccgacgggcaaatgccggctggggtggcgcgtcgcgtacacggttaaagaagtaaatgcggcacggagcgcgtcgctgcagagcgccggatagatttggggcgggggcgatgcatggctggacgcacgctggatccagccgccgcgtgcctacgccggggtgtgggggccagagacgcgggggactttacttgaccacaccacacccatccccgggggggcatccgcgaaagcggtaacccgtaaaccgggcaggtgatgcctgccgatggacggatggatgcgagtacgtggtaaagtgtgcagcttttgtggcgcttttgctcggctttgctcgcggatcgtacgtcacacggggccgcggccagcctcggctttacagttcatggcctgcagtgcagttcggttcgcgcggaagcagcagatcgtgatccggacggacgagccaacacgacggcattgccgccatgtgcgcgaaggcctgcgattcggggaaggttcgcctggtttgccccatgggcgaaggaagtggcccggccattccatccagggcatcgacggtcgatgcacatcgttcgtacgtactgtacgatgagcgagtgatttaattgcggtcacaaatcggtctcgaggacgactgttgctgctggtgagagtgtaattgcgcccttgatgtgtctgttgggagtttgtgttttgtgacagcggattacacgctgtgatttactggagtagtggtaagttttcaatacctgaaaggttacgttttgattgatcgagttcgggattagtaaggacgacgtccgtagatgaatcgtagctgggctctttagtactccgacatgatgccgttaggtacgggcatgttgattacgacacctctggccaaatgatgaacagagtcgccattggacttgtctaggagggagacaattgattctctggccaaattcttgcgtcactcaaccctaaagatggataactattttttttaacacctaaaatgattacacgtcaatatattagctaaagctggatatagacctaacccgctatatgtaacttgcactgtggagcatgcagcttatactgttcttgatctacgtggcatgtgaagaacgataaaacttggtggcgcgctgtgagtggccctagattgatgtgaagtggctaaggctcgcgagctagactagtgggctacaactttcttgcctcatgattgcttgttatgtctaacgtctagtcgactcaatcctaatggaggtaaaacattgtaacccttaggaaacagcatcatgatctaagtagttaaggcctaagagtatccccagcagcttatccaaatttgattctcggtacactcatatggatggccatcaaaaaaagattccttcttcatatccttctcactccaatagatcatttatatttcatactccataccacatcctcctatcttttactaatatctttcaactaagcatatatttgtattattttctaagggctatattttgaacaactaaattttaatagttttattttatcacggtaatctaaatggttagattttaacggacatatttctaatagataatttagtgcattaaattgctactttctctaaaattactcagactatgtttctcttttttctctacccatagtctgccttttgcccattccaatatattccaaccttttctatttctccttttctctctgctctgttctacactcttcattctacccaggaagcatgcgtggaggcaaggtggcctgcgagcgcagaggtacggcggcctgtcggtgtagaggcacggcggcctacggacgtggaggccggtgggcgccgaggcaactggagctagcaagatcgatggtggcggccgacgggcgtggaagggcggacgaagatagcagcaaggggcggaggcagtcggcggggcgcgcgcagggccgacggccacaaccggccggcatgaagggttggagggatgcatgctgccgctggcggggttctccttctagatctggtatgtctctctctcaccctccctccatggctacacactccctctacaccatccaccgtacagaaaaatacacatccgaccggcgacgatgacaacataggggaggtcgatccaaaactcctgataggggtgggagctgcggccactgtgatatagcgtgaggagagagaaacgctatatttgggcttcctctctccgttttggcgcatcatctatttttgaagggctagatggcgtatccactggggccccgtttttcactcccgtgcactgtatctcggacagggtatccgatagaggatctcctgatgctctaaggctattcccaacccaataattagaatgatgtccatagcattaaataaggtgccacctaggatgaaaaatgatgtggcaagtgaataaatgaggaaagagaaggaaatcatgtctacccaatatccaagacatcatgtgtgataaggagcattaaatttaagtatggaatagtaatgcttgtattaaaagagtagtgtctagtactaatttcttgatgatgtggagtttatagaaactatctagtgttttgggttgggaatggtctaatggggtgtaagagtcgaagacccccgttgtccgtacgaccatccgaaaatgcaagactcccaagtcaagtcctttaccacgcatagcatgcaagacttgtctgtcacacgacgtgccacgatggaacccacatggcatatactgcttcttttgctggagatctcgtactatacaatacacctggttccagaaacttcacaagaaatctagctggccatggcataagcaaacattcagcaactgcatccaataaaatccaaataaatacttccacagtggcagcactgaagaacacctcggcatccaggtggcgagtcgaaatntcaanncacact

SEQ ID NO: 17044 - DNA, 1035 bp, Oryza sativa
  unsure (1)..(1035): unsure at all n locations
cgactggttttganaatcgactcggcaccctgcaacggccagctcctgacgctgtcgctggacaggtcgtccggctccggcttccagtccaagaaccagtacctgtacggccgtttcgacatgcagatcaagctcgtccccggcaactccgccggcaccgtcgccaccttctacgtacgcatcgcatcgatcatcgccaatcgagtacatatgcgtatgcctgcctgtaagagctaatggtgattgggtgttgcgtggaagcagctgtcgtcgcaggggtcgcagcacgacgagatcgacttcgagttcctggggaacgcgagcggcgagccgtacacggtgcacaccaacgtgtacagccaggggaaaggcggccgcgagcagcagttccgcatgtggttcgaccctaccaaggactttcacacttactccgtcctctggaacccctcccacatcctgtacgtatcacggttatgttcttttcactttttttacaccaatgcacttatacattagtagagtcgtggttatatgactcaactcattagaatataaattctgttgcttacgaatattaagtaattttatcatacttgaaaagtactgggaggtgccatattttttaatttaaaatttagtacatctaactactaattatcttgagttaccaaaatttctagtataaaatcttattacctctagacactttatcaagaattataaaattcctcatgaatattatgcatgtgtagatgggcttttaataagattttagtgatatcgaaaatatatcattggtttgtgttagagtgtatagtggtgtgcgcgtgcgcgcgtttatcgtggtaatcgctaaaatgacaaaaggatcaacttctgttaatctgttttgtttgttcagtttctacgtggacgggacgccgatacgggagtacaggaacacggaggcgacgacgggggtggcgttcccgcgggcgcaggcgatgcgggtgtacgcgagcctgtggacgcggggtccagctgattcaaaccagc

SEQ ID NO: 17045 - DNA, 1476 bp, Oryza sativa
  unsure (1)..(1476): unsure at all n locations
ttagggtttgcagtaaacagcattaaaaggcacttagttgctcaagctattttgtaaatacgatcctagagctatacaatattattatcaaaggccgtgaacccacacgaacctgtcttaacccaaggcctacgatgattcagaccgaactggcaacccgaccctgggtcccagctcgtcccaagccaacccaggccaaccattccacattttagttgttaagcaagttttaagaatttaaaacactaacttgggtacattgctcggcttgcccataactgagggcgcggctattcgaatagattatactctgatcagaggtgtacatctttacccacaagacatgtcttcctcacgtgtaaccacgtgccacataccaccacggcatacggacggaagacatgacatagtttccaacccatcctagccatagacaagagtaccgacccaaccccacctacggccggaacctccgggacaggtaggcaggactgagcccctagcagcaggacaccagccctgtgccatgacatatcgactaccgggccgcagctcgtgtagccttcattttccctagagatgtccatcgacccccgacttcgtccatctccatccgtgtacttttgtttataaccagactgagccacaaactaagccttacccactagacatgtggaagtacggtagtgctttgcaacagaggcccgaagaccggtccttatatggccgaggtgctactatcaaaaccatgcaccccgagcccagcataaaaccattttgagggttttgaatagagggggaggtgtgaatccaattccacaataatccaatcattccatagtgtccaggtgatatgaatattcccaaagtctagagttgtaaaaccacctaatgttgcctaattaaccagcgaagcatctacctaagttcacactagagtacccactagttggggttttgtttattctagggtgaacaaggtaataataccaataccaataataataaggtcataacaaaggtaaataggcatggctaaataaaacaatgataacgcgggaatttaagtaaagcggtaatgcaataatttaaatcaaaataattttataaactgggattcaatatgttcaaggatgatgtgacttgccttgctcgctttcccaaacgtcagcttcaacctccacgtagagcggatcttccgaagctccagcgtctacacgaccagcggaaaggaaaaaggcttttactctaaaaaactccatataacaagcaggaacaaaacacaaaaatgggttcttgacttcttaaggaaaaattagagacttgaacggtccaattccgagttcaaatggccaagttatgaacatttgaagtttatatgctctttaagtgaatatttgcgaatttcatcatttaaattttaatttaaaaaggatttattgcttggggtaccaagcaaggntacaaaanngccac

SEQ ID NO: 17046 - DNA, 1552 bp, Oryza sativa
  unsure (1)..(1552): unsure at all n locations
cggcgcgagctcgattccgcggggagacggtgcggcaagggcgngaaacgggcnaaggaggcgcgggaagggtttaaatagggttggaagttggagagaaaggaaaccggccggaaggtccgaccgccatcaaatggcgccggcgagatttgcgggagcaaatccgcccgtttgaatgcaagagagagagggaaaaatgggggaacagggggaggggatcccgggaaatatttccccccacttaattgcacccggggacagcgggatgcgccgaattcgccgtcgacggcggcgcttggcacggacgggaagcgggaaccgccaggagtacaaggatgacaggtgggccccacccgtcagcgagggtggcgggcgggcccgcccgtcagcggcgcgcgcgcgggaaaagcccgagtggcccccggggagagaaaaaaaaggggaagggagatgggccgagccggcccattagaggaaaggggacttttttgggtttttctttttataaaacctttttaactttgtttatttcttcttaattattatttgtgctctgaaaattccactaaaatttatttacgcattttaggcttttaggaaatatacaaaaatcctccaagccttatttgacttttagctttgcacattttaatttttggaggctttcacatggattttacttattctttgcataatttcgaggatgtattttagagtcgatttgggacgcggcaaccctcgagtaaaggacataagtttatattggtagcaaccgattattttaccaagtgggtagaggctattcttttaaagaaagttgattctggggatgctatacagttcgttcaagagcatataatctatcgatttggtatccctcaaactattacgactgatcaaggttcaattttcgtatccgatgagtttgttcagtttgtcgatagtatgggaattaaaatgttgaattcttcaccgtattatgcacaagctaatgggcaggccgaggcatctaataagagtttgatcaagttgattagaaggaagatttctgattatcctcggcaatggcatactcgactggctgaagcattgtggtcttatcagatggcttgtcatggatcgatacaggttcctccttatgaacttgtttatggtcatgaggctgttttaccgtgggaagttcggattagctcgaggagaacagagttgcaaaatactttaacagccgatgagtactataaccttatggccgatgaaagggaagatctggttcaatcacggctacgagcccttgcaaaggttactagggataaggagcgagttgcccggcattataataagaaagtagtacctaaggacttttcggaaggtgaacttgtatggaagttgattctgccgattgggactcgggatagcaaattcggcaagtggtcgccgaattgggaaggactgttccaaattcataaggtggtgtctaagggagcatacatgttgcaaggactagatggagaaagttatggccgagctctaaatggcaaatactttgagaaga

SEQ ID NO: 17047 - DNA, 737 bp, Oryza sativa
  unsure (1)..(737): unsure at all n locations
gtggtttgatatccacttggtacccctactcagatctcccaaaacacaggagtagggtattacgcttctcagcggcccgaacctgtatacatcgcccgtgtcttgtgtgtttcctgtcttgcgagccttccacatacagagagcttagaatctctccctgagtccccggccgaaccggcaaaggggggcctgcgcggtctcccggtgaggagccccacgctccgtcatctggcgcgccaagtaaggggctctgcgagggattttctgagctctcgcactctttcgtgtgcgccaagcttttcctgttcagcccaatggccgagccagcaaaggcgcacgacctctccccgagtatgagcggggacgacggggagccaaacccacgccgtcgagctcgtactccactgccccctccacgccaaagtcctaggtgggagaaggcgctcgagagggccgaaggatccgcgacttcgacacccacaggaggtggagaaaggcggcgagatggggagcatcgcctcctcgtctacggcgacggcagcacgccccagggcgcgcttctacgtcacccgcccgtcgccatgacccggagtcttcagcccaacgttggctggacgatgtggccaaattggtcatgacttgacngcacgcctaaatgctgtgggcngtccttcgcaccaaaggctntgtgctgttaccatggctccgattntaaaattgaggcgcgcaagcgcacc

SEQ ID NO: 17048 - DNA, 2004 bp, Oryza sativa
  unsure (1)..(2004): unsure at all n locations
agtggctttgaaacccattttganatccnagctctgtaccctgaaaagatcgcctccaaggagccccagactaccgcagagctttttcagctcgcggaccgagtggctcgtaaggaggaggcatggacctggaacccctccggttccggtgtggcagcttcggccgcccccggatccgccgctcagatagggcggcgtgacaggaggaggaagaagaggtcagcccataccgacgacgagggtcatgtcctcgccgtcgagggcgcttcgcgggccacccgaaaggggaggcctgcgggaggcaaaaagaacgaggccggcgctcccaacagggagcgcccaaccggcaagtggtgcaccgtccacaacacttcccttcacgacctcgcggactgccgtgcagtcaaaagtttggctgagcggacgaggaagtgggaggagaagaggaggcaggagcgccgagagggcaaatccccggcggttccttccggtaatcggcgaagtgaggccaagcagaaggcccccgccgaggacatcgatgacggcgatgatgacctaggtttccaagagcctggggccaccattgccaccgtcgatgggggagcgtgtgctcacgtttctcgccggagcttcaaggccatgaagcgagagcttctggccgcggcccctactcatgaggcgacgtgtcgggcgcggtggtcggaggttgccctcaccttcgaccagaccgaccacccaccgtgcgttgcccggggagggcagattgcgatggtggtttctcccaccgtttgcaacgtgaagttggggcgtgtcctcattgatgggggagcggccctcaacatcctttcccctgcggcctttgacgccatcaaggccccggggatggtgctccggccgtcccagccaattatcggtgtgacgccggggcacacgtggccgttaggtcacatcgacctaccggtcaccttcggtggatccgccaacttccgcacggagcgggtgaacttcgatgtggcggacctcagtctgccctacaacgcggtcctggggaggcccgcgttggtgaagttcatggcggcggtccactacgcctacctacagatgaagatgccgggccccggtggccccatctctgtccatggcgacctcaaagtcgcgctcgcttgtctggagcagcgcgcggaccacctcgtcgctgcatccaagcccgagggtggcgacgagaggcttggcgcttccgcccccgccaccccgaggcaacggatgatcacaggcgacgaggtcccggtcaaggaggttgccctgggcgacggcccgtccaagaccacacggatcggtggtcttctggacggcaaataggaagacgcgctcgtctccttcctgcgggcaaacgctgacgtcttcgcatggagaccggcggatatgcccggggtccccagggaggtgattgagcaccgtctcgccgtgcggccgggcgcaaggccggtccggcagaaagtgcggcggcaggccccgaaacgtcaagccttcatccgcgaggaggtggcgcgacttctggaagccggattcatccgtgaggtcatccatccggagtggctggcgaacccggtggtcgttcccaaggcgaacggcaagcttcggatgtgcatcgactacaccgaccttaacaaggcatgtcctaaggatccttaccccctgcctcgcatagatcagattgtcgattccactgcggggtgcgaccttttgtgttttctagatgcatactctggttaccatcagattcgcatggctagggaggatgaggaaaagactacgttcattacccccataggaacctattgttatacgacaatgcccttcgggttaaagaatgcaggtcctacttttcaacgtactactcgaatttctttgggtaaccaattaggacgtaatgttgaggcttatgtcgatgacttggttgtaaagacgtgcaactaggaaatgttactctcagatctagcggaa

SEQ ID NO: 17049 - DNA, 726 bp, Oryza sativa
  unsure (1)..(726): unsure at all n locations
atataataatgttagccgcgcaatctgcgtgggccaccacgctagtttacatcattgtaagtgtaccttctatcatatcacatgggtaggggccctgaaaatatatcctaattaatgtatgacactttttatgattataagaatcaagaaaagaattggcgggaacaaatacaacaactgtgcgcggtggacttgtgaacatggacagtgagaatcgaagatcatcatggagaagaagaggaagaagaagaagagagacacagagaagaattcaccaatttaccctctctaccacccaaatgtgagctatactgctctacgttattagttgaccttggtgcagactcgccggatctcggcgtcggagccggcggccgtcttgacgccgacgcggccgagcttggtgatggcggcgacgaaggcgtcgaaaaaggcggtctggttggcggcgaagtagttgacggtggcgcgcgagcggcggtcggcgaagagcacctggtcggaggcgaggaggcccttgagctgctgcagcgtctggaagtagccattgtcgaacttgttgggcgagacggcgtcgagcatggcgacggtggtcgggctgtagctgagcgggcacgtnttgctcatctgccgcaggaacgcccagttcatcggcgggctgtactgcggcgccgccctcttgaactgtaacagccgcccacgaacttgttgcagtgcgtcacccta

SEQ ID NO: 17050 - DNA, 1794 bp, Oryza sativa
  unsure (1)..(1794): unsure at all n locations
gcgcgatganccgaattgccgagnacnnctcnnnnnnnanngnaanaaaaatacaaattttccaccaacattcttttcccaaccaatcacaacccttcaccattcacttttcacacctacctctactattcatccaatcacaaccctccaccattcacttctatctactttcttaataaatatatataacccctaaaacttcttatattctgggatagagggagtatatacaatggtttgcttgtagcatttatgcagacagagtgacacatcatcagactggttggccatgcatgccatctgttgcagcagcaacgttttgtgttctttgagatgctttagggccccaaaaaggtacaaatggacacgagaagcacctttttctgttgcaccaaatcatctattcattaggccatgggcatgatttgcacaggacaagatgctttcctatgagtttggcattgctagatgaagggacaacaattgagaatgaaaataggaggttggtagcaatttttgggagctttcgtacatgtcgttagcactgtctcttcaacagttttaccaaagtaaaaaatgttgttaatctcttgtgcttctgaaagtatggaaagaggtttcaccatgtgacaatttcttgtttatcttaccaagtgaaaactagtcccaacttttttttttcttcagttaagttagttggtaaagcaagcagtttagtgcttatgagttgtgacagctgatttcccttcagaaagcgatggcatgtttgctccaaactaagacattatgatggcaatccaaaaggagttgtacgtgacaatgaattggatatactgtagagtgtagacctagaaagaaaagcagtggtgtgtggaaggcataaggaattgtgttctagagtcacgtttttatcaccattatttttcttgtttgcttattattgacttgtggttccctatttcactctagatagccaagggaccaaactgagaactagtttgtaacctctatacagtactccctccattttaaaaagaacaaatactgcttaaaatttgatagctttttcaaattcatagccaaaaaaatattttttaagggacagagatggatgctgtatgcatctatgggtcagttacaaaattatgcaacaaaagcattgtcgaacttcaggaaggaaagctgtttaggttgggcacacaactgccccccatgaatgacatggccaagaattcaagctgatgtggaagtttgagatattaagtctatcagaaattaagggcccctttgaatcgcaggatagaaaaaacggaggaatagaaaaaacacatgattctgacaggaattgaagtgtaaaacagaggattgcaaaacacaggaaaaacacaggaatggtcgtttgattggtgcacaggaaaaacgcaggaatcggatgagagagatagactcaaaggaaattttccaagaggttggagctcttgctaaatttcctctaaaatccacatgcaatgtgccattccataggaatttcataggatttggaaagcttcaattctttgaatcaaagggccaaataggaaaatttcctataggatttgaatcctattaaattcctacataaatcatttaattcaaaggggccctaaacgctggtttgctaaattttccagccagctagtacatacttctattgctgtggtaaatttaatttgaaggtctggaccatgctgaatctttctgttaaaggaggctagtcatggaaacggcatgttcatcgctttgtcaagaaaatag

SEQ ID NO: 17051 - DNA, 1119 bp, Oryza sativa
ttgctcaaggcacacaagtgcatcggtatgaaataatgtgtgttgataggagcaggcgtggtatctatcacaagaagccgtgcaggaatgtgtcttgaaggcggatggtggatgtacctgcagttgtatgaagccgaagcttcatcaccttccttgctcacacgttcttgctgctgccggtgattgtggcatatctcccaatgtgtacgtctcaaattatttcaggaaagaagcaatctttcatacatggagtgaggagatatatgggttcgggatctcaggatcttacacaacgctgagtgcccaagttttttatattccagatccatctaagttaagggtgaaaaagggtcgacgccaaactagatgcatcagaaatgatatggatgagtcagaagcaggtgggaggactttacgttgcagcaagtgtgatctgcgcggccatacttacaagaaatgcccgaagaatgcagaagttccaagcggcgcagatgctagtccatctggacaggcaagtgatggtaggcgaccacctggtgaaggaacaacaagcaggcgcgcaaggccaaggcgtcgtcgcgcagcaggcgattccatggtgtaacaatgctttcgatttaggaaataaaatgctgttgtgatgtaatgagtgttcggactaaatacttctatcgtgtaatttcaattcaatgttgttgtaatgagtacctccgactattgttgtactagtagtattgcgaattattcggtgttgtatcataatgttatcgtgatgagtgttcggactaaacacttttgtttgtttgtactcttgtttaatatgtgttagtaattcgcttatgaacatttattacttatgttgaactaattatttatatgtttctgatcaacgtatttgatgcaggtatggcgtacgacacaccggtgctgttgaaccgtgggattgacaggaaccaccgctcgttcctgtcagcagtcgagggtgcacagctcggcaccttccgtccacgcacgtcgcgcgagtggttgcgtgtcgacccccgtcacgttccttggtacgcgtatgttcacatttcaactcaactttgctttgtgttgtacttatgtttgaagtttgct

SEQ ID NO: 17052 - DNA, 990 bp, Oryza sativa
tgttggttgcggaaattccccaagcggcgcttgtgcgactccaggtccttgtgtttttcttccaagcggatgctcttgatcaggagacgttggaaatccggataatccccggagactagacggacggacaggtcaaggtccattcctggcaggaacttctcttgcttctcctcatcttcccgcacatcctccggagcgtaacgggccaggttgatgaactcgtgcaaatactccatcacggagcggtcgccttgcttcaactctcggaattcccttttcttaagggccacgactccggcgggcacatgggttcttcggaaagcggcggtgaagcgagcccatgtaataggctgtccctctggctgcgtagcctggaaatggtcccaccatagagatgcgggtccctgcagctggtgggcggcgaagatgactttctcctcatcgctgcactgcacagtgtctagctttttccccacggcatgcaaccaatccaacgcatccacggggttgttggagctagagaaggtaggtgggcggatgcggagaaactcggcgagtttagagtgttgtgggggtggtggtggagcattaagttgtggcggattttggaggtggtggaggaaagcagtcatcatgttggcctgctgggcgaggatttgggtgagaatggcgttggtgtctggtggtggtggtggaggtggagaagaaggtgaaggtgggttgccctgatggttgtggttgctgccttcaggttggttgccatcaccggtgttagcacttctcctggtcatcaccatctgaaaaccccacacagaaccagcaaacagagagagctgacaattaaagctaaccacccacgactaccataattcttgaatttattactgctattaaatgggttcattaaagttcaagttgcttaggcgaataaaataaagacaggctccgacacagttacaccacacaccggcataaccgtgccccacacaa

SEQ ID NO: 17053 - DNA, 1659 bp, Oryza sativa
  unsure (1)..(1659): unsure at all n locations
ccatccggttttagattgttatattttctagtgtagaatttggcactcagaatacaaaattttggtactgtaaaatttgtcatgtttttgatacctgagagggcgatcatgtcggtctgggtgaggccgttggtggcgaagagcttgttgagctggtcgaggtcgaaggcggcgccggggaggctgtgcttcaccacggcgcgcgtcccgaccttgccgtcaagccgccccagctccacctggtagtagggtcctcctgcctgcatcaacgacaaccaccaccactgtgattaccaccacacatgacacatcatacaacttttgcctttgccttgcagtgaaatccaagcaattttactgctactacagcacgccgttcttgccatcaactgcaactactcacgagtgtgtgtgtgtgtgcgagcagaattttcggcatggcctaataataattggcagatttccgtagctctacgagtccacagcctgcctgtcgactgtcgagagcgtggctggtttggtaggtacgtgttggacgccggcgtctctgcttctgtatcgccgtaccgtacgtacgcgcgcggctcatttcagcgccccaacccataccgcgtaggagtagtagtagatttgaacggtgtgtttagttgacgctaaaattagaggtttgattgaaattgaaataaagtgatgaaaaagttggaagtttgtgtgtagaaaagttttaatgggatggaaaagttggaagtttaaaaaaaaactttggaactaaattcggcctatacttgtttttcacgctggagaaaaaagaattgatggatccaatcggagaagaagaaagaccaaagcaacgacatcgcagtaactctcgctgacgagacgacgaccactatgcagtggtggttacatggacaccctgctctgaattaataggacagctgaattcggacatgctaggggggaccacctccctcgccctcgcgaattttagcgccaaatcccaatttttccgattccattcggttaggtgaatgaattctctgcttggcttgcttctgtggagtattttgggcttctgtttagtgtagcaaagcaccggaccgatcgatataacgaagcgcacagcgagaggcgcataattgccgcacagctaagagcgtggactcgtgccgagccgggaacacgctgcggcgccgtgcggggcggcatggcatgtcaccctcatcatcgctgtcgcgcgcgcacggtgaaaaaacggcaaaaactacgggcgaaagcgaagttttctctcaagcgagcgcactcgaagcggcacgcgcgcgcacgccgagagagagagagagaggggatggtgtgggtgtgtttacctgggagacgacgtcgcgggcggcgagggcgaggatgtcggcgcaggagaccttgttggcgcactgggcgtcggcgtcgacggcggccttggcgcgggtgatgaggtccagcgcgtccggcgacagcgtcgtgtccgcgcccgcgctgtgctcgtcgtccggccccgcgatcagcaccgacgcgtcgcacccctgcacacgcacgagcacgacacggcacgatcagcaacacgaagaacacggagtcgatggcatcgggtaccgagctggaatagcaattcaatnggaccac

SEQ ID NO: 17054 - DNA, 8784 bp, Oryza sativa
  unsure (1)..(8784): unsure at all n locations
gcccacttatatagagagcgggcctgttaaaatgaactagatgtttagaaaagactcatgtgtcaataaagctagggggtgggtggtgcatcttttgtgtaattctccaagtgtacccgacggcaaaattttgaaaaaaaaaacctaattttaggcgggggggtaaagtggggaaccgtatatgaccttcttgaagggagctagggagtttgttttaaagaattcgatacacccccttaccggccattttgcagcggccccccggcacagtacaaattcgccctcgcgaaggcgggcaaggggcccaccttcaaatttagttgagggctgtcgcccaagaacgaacggccgtttgccacgtcattttccccgccctctggaaggccgatttttaaaaatcgccttcccagaggccggtaggttttatnttgggtccagccactctggcgccctaaaaaggaccatttctgggataagtttttttaggggtctatttgcgaaataagtttttcaaaagaatcaaaatgtgaaaaatcggccgatcaacccatgtggcttccatagttccatcagcctaactgttgtgtcatatcatatcaacaacgatacaaaaaggttcctgtctagatatgctccgtggggcccatggaaaagtgactcaaagaagaagaagaagaagaagaagagatggtactcgtggcgaaggaaggatcgacggggagaaagcggcagcggcaggagagccaaaaagggcgcgtctttccttcttttttttttcttccttttttctgtctgagcatatattcttgagagattatactggtttagtttaatgaccccactatcagactacccgttatagtgcaagagacatctttgctttttcagagtctttcggatgcagaaagagactagtttaaagcgctccgcttcttgacttctttcagtaaggacatccttgttggcactcaaatgttctagagataatcttctggacgaagaaatgtgcataaaactattacattcagggtgactagttatacccattaaactagctactagtagtactagtacattcttaaagaaaatgttctactactaattactccttgctgctagtactatcctggacttgatgactgaatattcacaggccgtgttactacagatcgagcttagtagtactcccaagttaattactgggacatattcagatttgccgtaactaccgtgccagttttgtacagagatgtcatcgacgtaaaaggaccggagatcattccctcacatgcctcctccaaaagttctgaatttgtctgtgcatgagcaaaaaagcaagagttactacctcactttctttgcaccttcacatgctgcctccatcaagttactcgtgtccgatttcatgaactcaacaacccgagttacatactcgtgcgcaacatcacgagcagttattaatgcgagtgcttgtgatcactcggaagaagtggccggtgcgtctctcggatggagccaagtaactgtgacctgtgaaatcccattggcacgatacgttttgtggttgcagcttaaagagcggctagctttcatgctttgaattgaaagttcgaattacatgagtggaccgattgattaggttatctttcgagctctgttattactctatctaagttataactggagtactatagtaaggaagacactgtagttagttaatactagtatagtaatagtactgaattttggtatagaacattatattgggttggtacatgtgcttgtgtacatgtttgtataactttccatgcctacctattggatgcattcatggacaaagaaaactgctttcagtgtctagattaacatatctcaaacttcatatgcacggaagaggatgcatgtggcacaaagcaatgcaaattcggtacagattgctcagggatatgcctcttctagccaaccaagtaatgctagtttatttccgttttgagtacctgaccatacctgatcagctaggaatgtgctacacaaaaaaaaagtgtttgcacaaaagaaacaaagttttgctttgtcaggtacgtgcaaaggagaatgattgaaagggcagatgaattctgatatgagtgaattctgagaccggtcagtaggaagcaataataattgtacacaatcctgtgcttgaacggtaactgctttggaaaagcttgacagttgcagcgcaaagcacaacactttatcgtgcttacagaacaaaaagaaatgattaatcgagtgtttctgagtagatttaagccctggtaggaagcagtatggagggattatcttaggggtttgtgctaacaaagcaagataataatcagcacaaacgtaacttggacggcaaagtcaggtaagccatgattaattaacaaagggttaatgatgattacaagttctttggacgccgctccttccactgagtgacagacaacggcttcggagcgggtagtgactcgtctccctccacttgttattttccatcacttttataagtaaaagaacactgaaatgccggtagtctcagcttgttcttcactcccatccattcaacaggttacatgaatgaatatacaacaaacattaagtactgaaaaaacagatttaataaatctgtcaggccatatgtgatgaattaagggatggaaacggtcaggaactttatcatttctaaaaaatggttctccatctattgagaatcttttatatttatcaatttaacgacgatctcagtacatcgttaatacaaactagaaaagtcaaaatttatgtataataaaaaatgtaaatggtcgaaaacggtgctcccttcgtttcacaatataagtcattttagtatttttcatatttatattaatgttaatgaatctagaaagtacattgtgaaacgaaggaagtactatttttacgaaaacaatactcggtctaccacgacgtcactatattcatcattttcagtagtaacatggataaagagtacactggtacaagaacaggatcctgtcacaatcggctttgagtacacagtggtagtatttcttagatgcagatatcaacgccgtattagcgtgtcacggacaattctagccaaggaccacgcaaaacgttctagacttctagtaaggtgtgcacctgcattatgccggcatccagcccccattccacccggttttccccgtgaatccacgccgatatcgttgggctggcgcctgctggcttcgcaaccgtctcgccgcagcctcggattgaccaacgcggcgcatcacgcgcgcgaagcaagcaagcacgcctgccttccaatccgtcccgattttgcacgacgatgaggaggtcgttttcgcggccacgaccacgtcgtttttgcaccggattctcccgtgcgcacggggcgaggcgtactgccctacttgggcgaccgatcgatcgaaatggggcaccacgaccaccgttgtggtgcgtggccgtatctatccggctttcccggatgttccaccactaacagcgatcttatctcatctttcagattgtttcgtcaagctaatcatcatggtcgacgcattcgttggattatacgatcctgtgatcctacaagggtaggtttaagttaaccgtgggggttgattattgctgtctcttgttgagcccgtgaacattaggtggtgataaaaacagaggggaacagactacagagacaggcccagcgcaatctcggactcgcccaatcatcgccgatcccgtcgttacgcatcgtactcgcacaagtaagcgacgcgaagccattaaactgggaagaaaaactagccacacccgtgagcgaagaagatcagattaaatatagacacccagctgcgtcgttgcaacgggtgtgattcggcgccagttaatcgcgcagcaagcaactgatcggaggagctcgtagccttctcgatcacttgacgcgacgcttgccgctcgcgatctcgcatagtggcaacagctaagtgtggcaagtgacgacgacgacgacgaggctagctaaaagggatttaggtcttgtatccatccgtatcctatcctagctatatcatcattccgtcgtgatcctgggattcgtgtacggcacttctccaacatacataaatacattatatgcatactttcttgtatattgcccaatttttctcttcttttctttggtccctccctgccctacataattccacagtatcctcatcatcgatcgatctccttaatttggagtttgatagatagagttaggttgctcgacgggtggcagagtacttcccctgcctgaacaatgtgtaattagtgcagaaaagcaacgtactacgcatatccaatggaatacagtaaagcgtggtgtatatcttcaaggttcagcaaagacgataggcattagtatatctttactgatgcccccacatccagcggcgcacgtcaaagctagacatacatgcaaagatgcagtggtacactacacatactgcaaagacaacaaattaaagcaatagataggatggatggatacatgaatacggttggtctcggtttgccgaatgccaggctggtcacatacatgcgagaggatgtgaggtagagatgccacatggacaaaagtacgtgctcgcctacaaagctatgtccggggaggtcatctttatcggctagtctagctagctacgcgaagaagaagaatttagcccggaaagtgacggcccaccggccgcttcgatcgaccgggcgccgcgccgatcgatcgacggacgcattcggatgcagcgcacaactgcacaccacttcattttttttttctgtatgtagcacgtactgttgtctccaagcatgtacaggacagagttcacgtgcaggtgaagtgtagacctgggcacctggccgtagaacacaagaggacagagaagagacaaacagagttagctcctctggaagaagctacctcttaatccaagggtgtgtttagttccacgttaaaattagaagtttgaaaaaattaaaacgatgtaacgaaaaagttaaaaatttacgtgtatagaaaagttcgatgtgatgtttttagggttcaaactttgaattacacacggcccatgtcaattttgacggcatcgtaaaatcggttttggccgcgagccagccgtcctgcaaaatccgccgcgtccgcgcacgcccgcggccgtcggtttttctgtctgcctggtccaggagaaagcctgtctggctggctgcctgcctgcctgaatgcgttgataggggaagagatgagaacgagatggtggtgggcactggacagggtagcgagcctgtacatctgcatgcagagtagtagagtatttctcagcgtcttctctacgtccctggtcgctacgttactagtacgttaatcaatccgagttttggaatgtttcgcacttgccaaccaagtatgtcggaatgttgtggtggtagtacacagtagtacacgctgtgtgcttgtcctgtagctgtagtccgtgatgacaacttagttcgacagtacattattcatccaagttttcacctacagattataataaacttctactctcagttaaaagccctggcaaatcaaggccaaggacggcagagcttatctagtggagtactagtatatccactagttggtggcgacacgcatgacccgatgcgacgctgggtgtggatgactgctaggttgtgagttgtgactgatcgacatcgatcatgatccactgtcataagcttgcctaggactgatcttggatagatgaactccaacttgagatcatattgaagctgtgctgtgattgtgagatatatatgggcccagtaggcctgctgggctgtgctccacaaaacaggccaagacagagatgtaggttgggctcctggccgactgacctgattagactagctcaattagccgacactgatgatgacatttagggttggtttggtttgtggtctaaataggccttaccaaattttgtcagtgttaaattttggcacgttttggcatgactaattttggtaaggcaaagttgtgtttgtattgaagccaaaatagcctaagttcactattgaaatggtctattttcttatgcatgtcaaaatttggcttcaaactaaatagacactaaacactattgaaattgctaaatattggtaagcataatttagacctcaaaccaaaccagcccttagagcccttcaatccagagatgacgacggaagtaccagctaactgaaaattgtatatcttggagattaattagacagaccccaaccgatcgttttcaggctgcttgatcgtataactggcctaaacacgatcgatttcttttttcggatacgtaaggaacatacttttttctattaaaagaaataaaagttatttacatgtaaaaggaaaaacagcatgagactgatacagtcgatcatgctgggtgtgctgtagttacgtacacgatttgagcagtcagttagtgagacaccagcgctgaactcgttgctaattaagcattttggtatcttaagcttctatgtgtttttttaaacagaagagcagagctcctcccctttccattaaggaaaagcacatgttcagttcagcatcttaagcttccatgtagcagtggcatgccgaatttggaatggttttagtggcaacaggctagcatgataggcaattgtgcaaggattagttatagctgtggaagagcttaaacctttataaactctctccctggcttctcttcaactataaacacaatagtagtttgaaaatcatttgacaaggtatccaattgcacgaggccatttcaggaaggatttaactaacactagagccagttaaatccagactataacacggggcttgtactttctattgacatatttttttcaatcttgttttatatattgagtttggatttgatttttttttggttgtagagatgtcgtttactctgtgttgtcaatttttctcaaaactctttatgcctatttgtattgtatttgaggattaactgtgtgtctgttcgtaaaaaccggaaatgtaaattatttccattattaaaaagtatatatatttgagggataaaggtgcacgatgggatatcctagaggggtcaaaaccacttctaggaccaactgtggcctccaaccaaataatcttctataccataataacaaagaaatccacaaagtcaatagtgaaatggtagaaaaaagtcatgcattaaatatgcagagactttttcattccaacactagctcattctagttaatagatggagaatgactcctaacaacactataaatgtggtcgtgtgcatccccttgttgtagaggcaccacaggagaaacgatctttaataccggttataagaaccgagactagtaaatcaagactaaagatgtggaatgctaggattcgaactcaagatctcttagctctcatacgcgttaacatcctatctactacacacatctaacttggatggagatgctttctttttgaattaacactggagacatatttaatacgggttggtgttaccaaccggtactaaatatgcatctttagtaccggttggtaacatcaacctggactaaagatcctccagcattagtctcggttagtgttaccacccggtagtaaatacacatttttagtaaaagatatttttagagacttgagcttttagaatcggtactaaaacactaaaacatctttagtacttatttttaatcttgctaggatatttgtgttttgggtttaggataaaaaatcgcttctctcttggtgaggccgagttttattaaatccattattacaaaaacaacactaaattaaagtatactatatcatattgcaaatatgtccacctttcatggctgtgctgagccaacgaggtaagagtgattcaagatgcattttacacaacattcttcagaatgattcaagatgcatttaacacagcatttttccgcgttatttcaagcagtaccattactgacagtctgacactgcaagttgtgacattgtggctgtgtttagataagtttggattaaatttcagtacttttccattacatcaacctgtcatacacataacttttcagtcacatcatcttcaatttcaaccaaaatccaaactttgcgctgaactaaacacagcctgtatctacttgtatatcatgcatgcatcacgactcattccatggcaataattaatggaggactggatgtttctcgtggtctagctagtgacactatataattaattagtgtaacaataattaggttggattaaccatgatagatgatattttatatatattgtctccatctataaatataacagatttcgagttcgaatttatccatagatataacgaattctaacataccactttcataatccatccaaagcacaagtttactcacgaaaattgcatcataggtgtaatctttggagaatgcaatacgtacgctagggattgagatcctctgacagaacttccctctaacttggtagatgatatgtaggcctaagagtgatgggtccacatgttagtcacagtgaacagtaacgtcagaggatccctctctgtacgccaaatacccgacgctaacgaaattatcgagcgtccacagccactggttccccctctatctccctacacgcctactctctcactctatctcacacacaaaacatgctcccttct

SEQ ID NO: 17055 - DNA, 5119 bp, Oryza sativa
  unsure (1)..(5119): unsure at all n locations
aggccggtagccgactccttccgtcaattttcantatgaaaatttatttttgtaaaccttttaataaaaaaaattataaataaaaaaatttcatcttgctccgngggcaaaggtgcgtatagatggccaaacgggtggccgggcctggcggcccgacttacacaccgggtcatgccgtgccagcccacgggccgcacacacaatctaggcacggcccaacacgactcgggtcgtgccgggctggcccgaaggcatgatggcctatcgtgcttttccacagaataagtctaattttcctccctcctcctggactgtaacatacctagctaaaaaagtctatattttctccctcttctttgggctgtgacatattaatagctaataagtctattttaggtccctattctttggacagtgatattcatatgtctatttttagtccatatactttgtgtgccgggcctagcctaccggcctatcgtgccgggccagcccaacgtgtcggtggagaggcccaagcacggcccgatggttgggctgggctatcacgggcccgacccaagtcgtgacgtgccgtgcttgggtcgggtcaaaatgtcgtaccgtgggccgggccttcgggcctcgggcgttatggccatctataaaggtgcggggaaaagtacaccgaaggtccctcaacttgtcgtccggataaaaaatgtcctcgaaccgcaaaaccagatatgcgaggtccttcgatggttttgaaccggttttggtctatgtggtggctgagtcagcgtgggacccatgtgagccccacatgtcaggtgtccacgtcaccctctctctttcctatcttctctcccttcctcatctctctctctcacttctctgcaagctcgcgggggcaaggcgggagggcggcgccgcaacggccgccggcggaggcggcgtgcgagcgcggcggcttctccgctttcttcacctcctcgtcccgctcgggcgacgtgggctgagcatctgcggcagcaatgcggtcgcggcgccggcgttgcctgcggacgacgacatcgactccgccgccccgcgcgaggaggaggaggaggagacgggcaccgcgcgcgccgccggcgcgtcgtcatcgggcgggtcggggagcaggagcgggagctacccgccgttcaagcgggggagggacgagcttgttgacagccttagcaagtttgccgacgaaacccggccgtcgaagcggccggcggcgaagcaccggactcgcgccaccgaggtccataacctgtcggagtgggtaaaacctcaagaacaccaaccaaccattgatggatagatggtgttgcctcatttgcaacaaggtgaatgttacttgattttttctgttcttgctgcagagaagaagggatcggatcaaggtaaaatattttttgcgaaaaattgtgggaaattttgttattctgtttctgaaagggtttttgtctagagcaattatatggtctatgaggtaccaaaaatttagtgtaaaatttggtacctcatagtacttgggtacctaagaggtactaaatttacaatagaaaaaatgatacctcatggtatcttcttaaggactgtaaaattgctcttttgtctatgggagatgaactggaggatccctttgcatagataatcaagacaacaggaaaatgcttcatatgatgctacatgtatggaaatgacatgcaccggcaatatatgaagaatatagtggctgtgtggattcagcttgagccggcatagcagcagctgcacaagaacatcataacagtgacagtttcactcttcttttagctgatgttacagttatatgatgcctgagggacctgcatctggtgagtccttacaagaaaaattctaggaaccaaatgacagttttggttgctatgttgatttttcaactggataagcataaccatcggttcttcaagattgcacatggcctgaagcagaaagaaccttcaagaacttaggtagactgaaccatgtgcggagcgcggtggcttctccgcgaacgcccggcaccccaccaccgtgttccaccgggcgtacgcgtcgccggctccgctgacagggctgacgcgttcgtcggcgcgcgcgacgacacgagcgcgcccacgtcggccgagcgggacgaggaggcggagaaagtggagaagccggcgtgctcgcgcgccgncttcgncggggggcgtcgcggggcanccctcttacctcggcccgggcagcttgccgttgcanagaagtgagagagagagagattaggaagggagaagaaaggggaaagaagaagaagaggatgacgtggacacctaacatgtgggacccacgtggggcccacattaactcagccgccacgtagattaaaaccagggtaaaatcatcgaagaacatcgagtgaccggtttttgtaaagttaagaaaccccgtatatcttgttttatggttcgagatgttttttatcctgataacaagttgagggaccttcggtgtacttcttcctaaaggtgcgtatgactccttttttgctttgcagatgctctcttgttattgtttgttccctgtgatccatgtgttttgttgctaatatttgtatatagtagtgtgggtgatgttcataaatatatggatcagactatgcacttgtatatggtagcgggctgatgttctggtctagtagcgtctcgcagatctgaaaccttctgatgagttcatgtttttggggtttctgtttgggttgaaactgaatcgaagcattaattttctagccatgatgtaggattgaaatttttgctttttgttcagccaaaactagctgggtggcccgtgcaattgcgcggctagcacttaaacaaaatcatatatttttagtatgattttatttaaaatttattaaatagctatctcattttcttaagagtttgaaagaccaaaccttatcatctctgtgtttctaattatatagttttttaaaagtcacaccaattgctaccccttatgtcatctccttttttatttgcttgttcgatctaccactatttctattcattcttcttggaacctttaaaaattggatcttatagtttttagagtttttttttgtcacgttgggttttgtttttataatttctaggcgtcccgtcaaacgttgccattatactcctctatggtccgttcactatctcttctctttattgtcattgagattttaaaaatcgaacataattatcgtttgggttcatttttactttctaaaagtcctgtcaaaccgtcagcggctttgccattgtacttctctatggctcgcccgctgtctcccttctttattatcattgagattttaaaattaaacatgattatcattgtttttgttttactttttagaagttccgaacctttaaaaattgaaccttatagtttttagagtttattgtcttgttgggttttatttttaataatttttagaagtctcgtcacacgatgccactatgctcctctatggcccgtacgccgcttactctttattgtcattgtgattttaaaaatcgaacataactatcgttggaattcattttttatttcctagaagtcccgtcaaccgtcggcggctctgcaactatactcctgtacaccccgcccgctgcttctcctttttattatcattgagattttaaaaatcgaatatgattatcattggggtttttttttactttttagaagtcccgacaatcaccttgttcgtttgcttcacggccttcctaccgtccctccttttaatcgttattaggattctatttggtgttttattaacagtttttatatgttgtatcaaccgccaccactctactctactataggcctattacttaatttatctcgtcaggtcttttagatggtcttttctttcaatagtctttatttttatcataaattttatttaattataaattgaaaagttattttttgttttgtaattttataaaaatttttcctaaattttaattaatatcgtattgtgttcttttaatatttttattttttattttcaagagaaaagcccgtgcgctgcaacggatgacaactattttagtcttaattcactgtgagaattcgcttggatctatatatttctataaaatcataagctgcggttaggagtctgttcgtctaaagtcagcatgcgaatttttttatacgactcctatatttccaaaagcggacgaacttaagaatcaactcaaaggatatatattttttcaaaagcgaacaaatttataaaccgactcatacacggatgacataccaaaataccgacaaaagaacatcttaaatttttcataatagtagaggttttttcaaaaaaaaaagtagaagtagaagagaagagaagattacggacaaaaagtcattttcgaggcaatcgtacttttttttgaggaatcggtcgtttttattttttttatacggtagaagttttttttctctttttttattttttcttgccttttttctccacagatagtcggacttttttatggagtcggacgtttttttttaacatagaatttctttttctcattttttcttttttttccaccggaggagtcggtcgtttttttagatagaagttttttttttctgtttttttgataccggcaaaaacatcttcaatttttataataatatagatttcggttgtttcaaaattgtattcctacttgaactctcttttaatttatctaattttggatattattttattttttattctgaattttaattaatcacatattgggttcttatgtggattcttctttcaatattattttttttaattccgaatttcagctaattttaaattgtactcctatttgaactcttcttcttttttttctaattttggattttatttttatttttattcccaattttaattaatctcgtattgtgttcttatatggacttttcttctaatattccctatttttaattccgaattttagctattttaaaattgtattcctacttggactatccttttttttaattttggattttattttatttgtatttcgaattttgatta

SEQ ID NO: 17056 - DNA, 4295 bp, Oryza sativa
attatacaaatacacttgttcaacttgctccaagacagttattgacatgatacatcagtgaacgttgttagatcaagaggtatctatttcttctctacagattatatgtgaagtggcatggacgtcatgcaaacttggtaatgactactaactgaaaagataagcatattcacacagctgtgctcctgctaccgctttcatggctcaagtttctgttttttggtttgctgttacttcacactgtgcaaagtgcaaaagcaggaattgtttcaattcttaggaattgtttcaattcttctgttcagatatgcctgatcattgtgcaaactactattttgtcctgtgtttttgcggtgagcatttgtaagcatcttgtgttgtcctcttattttcagccaaacaaaacggatttgaggttttgtaagtatattgtgttggcctcttattttcagccaaacaaaacgggtattaagtccagatccagcaagctgggccatatgggggacacgtagacttattgggctaccgggctcttttgaaatgacaaaacgggcttttaaaaaattacctaacccaacaaaatgatcggagacaagtacaccacgcacatcatgctctacgcgcacgtgaggacaggcaggggatgagcgacacgtgggggtatcctgcggtagaaaattcggctgcaaactaaaattttttcagctggctgtcagctactccctccgctcaaaaagagacaacctaagtggagatttgacctcacctaaaacaacgaatctggacataaggttatctttggggggggggacggagggagtagacagtcccgaaattttcccctttttttctctgaaagaaaaaaagacggaaatttattcacattgcatgggagtaacaatgggcctgttcggctggctggtacagccactatacgcagccgttactactgcagctatagactcaacttactgtttgtaaagtaaagttaaatgcagccgaacaggcgcaatgtcgatagcaccgtaaaaacaacagtctgaaagactgaaacgcagactgtttctatggaaggttctggagatttcagaaagactcaagcaaaaatgaattttattttcataaattgacgaaatttaagtgaaaaagtaccggacgaagccgtgccaagccacagtgttcaaaacaagttgagctacgcaacaaaaacgagcgctcaaaagatctctctctgctctagaacgtttcaccaaagccattcgcatttggccacgtggtcgttttctcatctcaagataagccttcttctactacctaagcttcgagttctcttctccctcttcctcgctgcagcaatccaagacgaagctgagagaaagaagacgaatcgagagcaaaagctcaatctaagctcgcaagaaagctcgagtagcagccatggctttagcacccacgtctctccggtgctttctcaccggaaggccactgtgcagtgcgggcagcacggcggccgtgctcccggcgccgaagccgacgaggcggcggccatcggcgaggctctcgtgcagggcggccaatgaggcgccgtcgacgcggggtgatccttcggtgaagcttggcaagctggcgatggtcgcgctggccgccggagtgctcgcgctctcgcctgtcgacgatgccatggcggccaagtccggcgggagggtcggcgggcaggcgttccggtctgcgccacggtccgcgccacggccgtctggtccacggataaacaattcgaggtaataaacgatgattggttccatgtcaaatgaaaatttcatcacattcaccatggataaacaatgatttgttcaggctagttgttgtttctttcagtacgagatcgatcagattttgactgaatgttcacatcgtagtagtgttgattcatatcgatctctcaattcgttctcaactcgatcatgagcagctgaaagtctgaaccctcgaaagatcaaaattttcgtgatacgagtttctaatatctgaaggttgtatgctaatgttctgaatattcagtctggttgatttttaattttcagtacgaagatctgacttaactgaatgttacaattgtatgttttgctcatctcgatgatgaacagataaatgaaagtctgaaacctcgaaagataatggttttcttcatgatatatcaatttctgaaacctgaaggctgctgatgctctgaacattttgtgacgcattggcgcaggacgaacatctacatcaacccaccggtggcgccgcctctggtcggcggttacggctatggctacggctacggttggtcgccgttctcgttcttcgctcccggcccgagcgtggccgtcggtgtcggcggcggcttcgacacgctggtgctgttcatcgtgctcggaacgatcgttggcgctgtcaggcggtttctcaacaggaacgacgacgactacgatgattactgaattaattactgtgttgctgatactgttaggaacgatgtcatcagatcataccgtgtgtaatgtgatatagcgaggctattttttttcatgtcaattctaagggaacagatcggtaagctagaagtgaaatacattaattggtgcatgaggagcaacctgtatgtataattttgttcttgtggagtaaaacgagagtagatttgtatatctggagttaatcgatctgaaattgtctgaagaactgatggtttaatttgcaccagtgtttccctagtattgcagcgggcggtgcagcatgtcgtataattgtataaacatcacggcattcgtgtcagtttcaacaagccattagctaaaaccgtacgtagatcaattcacaaaattactgcccacctactaacaacaagcataagtgcagaagatatggggatttttttcacacaactagaaagataactcgcgcatcgtagattgtatttggaaaacttatatagatgggatatcaaccggatgatacctaccatgtttgaaaagcaatatttctcaataaattttctacatcgcattgcttagataatttttccaaactatttgctagcttataaaatatatgatatttaatacatccctataaataattatctatgatctcttcagtacatagctatatttaatttgtttagaaaccatttctaatttaaaagtaaggtgttttgtcttatttaattgaatgtttagtgtcatttttttaacaaatcaaaaaaaactattattattagtaaatgtgttttatttgtagaatcaagttagtcatccttttagttggttcttattgacgcaagttattacatacttagtatacactgctaccttagtgtggcttcttatatatgtaacaatatgtggaaaaactcatagtcctatggtatggtacagtatagatgtaaggccattaatatctaaacatttaaaaattgttatgaaaataaaacatgcaaaggttggtccaattttagtaaaaagtaagaactattttttttgaacttattagactttctccaaataattcaatttagtccttttggcatttggcattttacttctatcattatagatataatttaattattgtgcagttatatactccgtagaacgataaaatatatatcatttttttcataatttcataattgtttgaatgtcatggtaaagtaaaaaaaaatataaccccaaagtggcatatgaaaagttaaattacagtgaatatgggtttctaaatgtaaaacaatctaaagacatgaatggatcgcgtgatttagatgctatagttatttattttgtagtataagtttggcagcattgctcatagttatattcattttgcttttctgattgtaaatctaatttaaataatgaagttatgtacgattattattattattattattattattattattattattattattattattattaaaagtctaaaaataaaacccaaaatgacatttcttttcagagttgaattatagttaaatttgttcttcaatcgaaaatttagtcataagatataagcggatcaaaattagttatatgatttagattttataaaacataatttttgcttttctaactaataaaacatgaaaataggagaagtaacagggagaaaataggtcatatttttccttaaaaaaagtaacatacgtaagtacatacatgcctaggtgggcccaatgttaggaggtaactttttttctttaagataattataggggtaccgagctcgaatttcaattcaatgcccgg

SEQ ID NO: 17057 - DNA, 692 bp, Oryza sativa
  unsure (1)..(692): unsure at all n locations
tatcctaattaatgtatgacactttttatgattataagaatcaagaaaagaattggcgggaacaaatacaacaactgtgcgcgggggacttgtgaacatggacagtgagaatcgaagatcatcatggagaagaagaggaagaagaagaagagagacacagagaagaattcaccaatttaccctctctaccacccaaatgtgagctatactgctctacgttattagttgaccttggtgcagactcgccggatctcggcgtcggagccggcggccgtcttgacgccgacgcggccgagcttggtgatggcggcgacgaaggcgtcgaagaaggcggtctggttggcggcgaagtagttgacggtggcgcgcgagcggcggtcggcgaagagcacctggtcggaggcgaggaggcccttgagctgctgcagcgtctggaagtagccattgtcgaacttgttgggcgagacggcgtcgagcatggcgacggtggtcgggctgtagctgagcgggcacgtctgcctcatctgccgcaggaacgccaggttcatcggcgggctgtactggcgcgccgnccctttgacttgtacagncgncgcacgaacttgtcgcagtgcgtcacccctatcgtgtgccttctgcaccacattcgtacgactgataagcntacangcagacgatgaaaacagatttac

SEQ ID NO: 17058 - DNA, 1078 bp, Oryza sativa
atatgccccaagcttgattcccaatggaggtgggccatctccttctgccatcggctacaatgcccgaaagacctcagcacttctccgaggactcatcagagaaccagccgatgccggcgagaagcggagaaccagatcatcggctgcagatccttcagccccggctccgaagaagaaggctaagacaaagaaagctaagccagctgacgatctacccaccctagatccatccatcgaacaagctctggatgaagaagaaattgaggaagacatcgaccaagctgcagccgaaataagcgatactgaaaaaacaccatcggcttcacctaagcaggctcctccattcccttctgctccagctcaattggcaagggtaagcaactttctctgtccacttttgcagtcatctactttatagccgattcctcacaattttaataaatatagagaaagaaaattgtcgtgaggaagaaatcggttactccaacccctaaaccagctccaccagtaagatacttctatcatctcattaactgacttgggctgattatatctaacatttatccctttggcagcctcctcctcctccttcttcccctcttatgcaggcagaatcaggcggccgcactccatcggctgcaggcagtcatcatgttgaagaggaggaacaattagctgcacctactattttagtaagttttattaacataaacttgagatcggccaatcatatcttgatccttaatcatccatgatattgtctcttgcaggtcttagccgatctgttctcctttgacatcaaagattacctcgatgaaacagaagaagacaccaccagtaaagcaacagctctcctgtctgatgatgtgaagaaaacactcgaagacatctcccatcggctaggagaatcactagataacctggtgaccaactgtggctcgatccgggcaaggtttgcagatatccaagcctctcttccggacgaattagtcgatgctcttactccagctgcctacctcgagcagcatcaattcaaactggagaaagccaggcagaggttagccaatcgccgggaacg

SEQ ID NO: 17059 - DNA, 2408 bp, Oryza sativa
aaattctactacatttgtttttttatttaacgttggttagtttaaaatgaaacttttgaactaaccaatgtcatctaaataaaaatggagggagtaaaatttaatttttaagctgtggcagacaagccaatgatcagcacaatggcaagttgaattagccgcaagagcatttgttctgggcttctggccgaagttcacacacgcctatgatcagtagctctacgtaactgtaaagctgatttctgacgaagaaacggcccgtaataagagtgccacaagcccacaatgtacatatctgtagaacggccggtggcttgcattgcttcagtactccatgcggctttggcaagttagaatgagctgtgaattagtcaccgacataatctgctacttgcatatcactttaaccagactctccaattaattacaaagcacatggttactgtatatacagtagtactaagtgcagcttcagcttaaattaaccaaacagtttaagaccatcgaagcccagcacattctcaaccctcacgccaccctacactatatatacccatgtaaatgcgattgccaaacatcacgtcactttcacagatcatcatcctgatcaatcgaaacagaaactgtatctagctagctgcctatcttgatcgccagccaagcttttggaagactcacgcaacagctagctagctagcacgaagcagatagagtcgtcactgagcaagcaagcaagaagagtgatcgatcgatcgatcaatggcggcgagccttgctgggttggcattcctcgccgtcacgtcggccgcgctgctgtcgccgctcgccgtggttggccagctgaggacggactactactccaccatctgccccaacctggagaccatcgtccggagctccgtcaagcagtccatggccgcgtcaccgatctccgcgccggcgacgctcaggctcttcttccacgactgcgccgtcagggtacatctagagattgcaacagataatgatcgatcgaccgccatagatcgatgcaagcaatgtggtgatcagaatatcagatcagtagaagtaagcagtgatcactgcagtgtgtgatttcgattgcagggttgtgacgcgtcgatcatgatcgtgaactcgaacggcgacgacgagtggcggaactcagacaaccagtcgctgaagccggaggggttcacgacggtgctcaacgccaaggccgccgtcgacagcgatccacagtgccgctacaaggtgtcctgcgccgacatattggcgctcgccgcaagagaatccgtctaccaggttagcatagcaagaaattttacagcacttcgagataccaaaattttcagtttaaatttaagtgattttatagtttttaaggagataccatgttttctattttctactgtttttttagatgaaggcattacgcccagctttcactaaaaagcataagagttcatacattgaaaaaagaggaaaagcagtaaaaactagggaaactgttttaagcactcgggtggatgtccacccgtttcttgcatgtcatctaaatagttatggaaatttttttataaaattaacatgataggttaatatgtaatatatcatttcacaatactaagatatacggaaatttgcactaaaattttgttatcttttagtacttttaagaactgtagaatatatttgcaaattttcatatatcttataatattgaagatattgggagatactccctccatactcataaaggaagtcgtttaggacagcaacacggtctccaaaacataattttgactttttatttctataaaaatatttattgaaaagtgatatatgtatacttttatgaaagtatttttcaagacaaatctatacgtataatttttacattttgaaactcaacaacttaagagttattcatgatttatatttttagggtttgacttaaatattgtcctaaacgactttctttatgagtatggagggaacgactttctttatgagtattaagggagtaccaaattttacattaaaaaatattatacctccggacggtaaactcactttagcatagcagattaaatttgcacacatgggcatgcatgcatgatgggtaaaaaaattgatcgtgagatcgcgcgttcaacgctgtaactaatcctgcatggatgcatgcattggctggttggtgcagagcggagggcccaactaccaggtggagctggggagatacgacggcagggtgtcaaccagagacagcgtagtgctgccgcatgccaacttcaacctggaccagctcaacgctttcttcgccggcctcggcctctcccagactgacatgatcgctctctcaggtactccaaaaatgtctaatcaactcaactcatcgtcgtcat

SEQ ID NO: 17060 - DNA, 2092 bp, Oryza sativa
ctgtctggggactcgatatcctgggaccgtttaggcgggccccgggcgggtttgagtatctgtatgtcgcgatcgacaggttcactaagtggcccgaggcttatccggtcgtcaagatcgataagcactccgcacttaaattcattaagggcatcacggcccggtttggagtgcctaaccgtattattacggataatggcacccaattcactagtgaactcttcgacgactactgcgaagacatgggcatcaagctctgcttcgcctcacctgcccaccccagaagcaatggccaagtggagcgcgccaatgcggaaatcctcaaaggccttaaaaccaagaccttcaacatactcaagaagcacggcgattcatggatcgaggagttgccagcggtgctctgggcaaaccgaactacaccaagccgagcaaccggggaaacgcctttcttcctcgtctacggcgcggaagcggttctcccatccgagctcaccctgaggtctcctcgggctaccatgtattgcgaggctgatcaaaatcagcttcgcagagatgacctcgactacttggaagagcgaaggcggcgcgcggccctccgagccgcgcgctaccagcagagcctgcggcgctaccatcagcgccacgtccgggcccgatcactctgcgtcgacgacctcgtcctacgccgcgtccaaacgcgtgctggattgagcaagctttcaccaatgtgggagggtccgtatcgagtggtcggcgtcccccggccgggctccatacggctggccacgggcgacggcactgagctgcctaacccgtggaacatcgaacaccttcgtcgcttctacccctgagggggggtcgggtgtcaggtttcgggctcgggccaaccccgcacccccctcgggcgtgcagggttggccgggggctacaacatatgcatattcttatttctcttatatctgaatttctataaaagcagtttcaatttcctaaaggctgtatctgtgttggtttttccttttgaagaatcttgacttgaaataggtcactcgtgctcaatcctgccctcgggggctcgggtcggctaaaatcgccaaacggggcccagaaccgagccgtgccccgaggcgtggtgaactcccagggggaatcggcaaaaacccacaatcgggtcacccataaccctcggtcaccacgttcccggcctggccagtctcgacatgtggatctccccaggcactagccccgacccgcgccttttgaggaccagaacctgggcacaagcccttattcaagctaagacacaaaaggaccacggcacagatcatcctcatctcatactcacagcaagatgaaattaacacaaaaatttcttcatttttgattacagattaagttgatctatacaaaaaagaggcccgaaggccttagaagaaagaaaagaagaaaaaactgaagaatggcgggggtctgggggctcaatccgatgcgcccggatcgccggcctcgacgtcactgtcgtctgcaccaccggcattgccctcctcgtcggagttgggggcgaacgcaagccgaggggccgagccctcgaagctgtcgacgatatggtcggcggcatcccggacctgcgcgcgcgcgcggtcctcggtcccaggagggaactcatccagcgccatccatggagagaaattggggtccctggcctggtaactcgccaggacgagctccaccgctccttgggcgaggtccctcgaggatgacttaattgtcttctcgagctcctcggggagccgttggagagccccggccatcttcgagaggcgctgggcgaggcctccctggttggcggcgtactttacggtccgccctctccagaggcccacttgccgaccggcgcaatctaggcgggagacggcgtcccaaagcatgccgggccctacctcgcctgccaagcggagggcttcgacctccccggcggacgagtccagcgcgccctgcagatcggcgatggtgcgttcggcagctgcgaggcgggcggataagtcgctttcgcccgtggccgccccgccgctgcgcgccctcgcgtccagct

SEQ ID NO: 17061 - DNA, 1079 bp, Oryza sativa
  unsure (1)..(1079): unsure at all n locations
agacagtttgccgacaatttgttgngcagggcctcggcccctttaaaggctggcttccgttccgttaagcgggtcctcccgaagcggaagcgtgaactctttttggcgcaagaagcctcgtgcgccaccagcgttgcttcccgaatggtgacgccgccctcgcggtccgccagatccctctccacgacgcaggcgcgcttttcaagcgccatggcgcgcgcctcaagggcctcttcgcgccgccggaacaccgtttcggtctccgccgccccgctgttctcgggcagcggcagcgtcaagcaccccttgggcggcgtcgagctttttccctagctccgcctcccagctcccgtattaaggcggagggtgtcctgcgcctcgttcatcatggtggtggcaatgagggcagccccccgctcctcttccacttcattggcgatctccgccagcaccttcttacgagtttcaagctccgagacgtgccggcggtgagccttagggcccacctccaccatggcctccaccgagcgtcgccccttttcgacacgcgcccacgcggcgtcgagctccgcccgctctgcctgcaggacctccacctgggcacttaacccatccaacaccgtggtgtttgcggcggccaaggcctgcagaaggggctttgcgttcagtagggcgatagaaggcgtggggaagagccgccttggagaggatgccacgcggctcgggccgccgatggaagtgccggactcggggatgtccccctgacccggttggtcctgagcgtcgcccgagggagtgggcccaagcgacgcgcccgcggcctcgtcgcgagctgcctcggaagtcgccatcgcctcgtcctggcgaaatccggcctcctcccgagcggtttcctcggcctggcgagcccgggcggcctcctgggcggcctcctcagcttcccgtaggcgatccgcggcctctcgccggtcagattcccgcctgagggcctctgcggccgccggatcctcggcctcagactggccggacttggaatggcgggagggacgcgacgggatctcgctgaaacaaaagaaaaa

SEQ ID NO: 17062 - DNA, 1001 bp, Oryza sativa
ctgggagtataaggagaacgaggtaattgagggtgcaagatatgctcataaggatgagatgaaggaggcggggaagcattgggcagtttccttgcagagagagtttagggtggtcaagtcaacaaattatgtgtatgaagtgaggtgcatgaaggaagattgtccgtggcgtgtccatgcatataagggtaaatggaatgattattggaaagttagcattgtgaccgagcacaagtgctacttacaaggggtggagaagtatcaccgaaacatcacttcagcttttgtggcaagtgagatgtacagcagtgttgttggtaacattggctttgaaccaaaatcaattattaggcacatcgagaacaaattcaagtacaccataagctatgcaaaggcctggagagccaaacaaaagatcattgagatgaggtatggcacatttgaagcttcttatgataatttgcctcgtttgttagccaccattgcccagaggaataataatacgtactatgacctacatacatttacatcggttgatgatcgaacaaagagtgtgctgcaaagagcctttttctcattgggtgcttgcatcaatgcttttgtgcattgtcgacttgttctatgcatagatggaacttttatgacaggtaaataccgaggtcagatattgacagcaattaggtgtgatgggaacaaccaggttctacctatggcttttgcatttgtagagagtgagaacactgaaagctggtactggttcctagagagagtgcacaatgcagtggtgcgtatgaggcccaacgtttgccttatacatgatcgtcatgcgggtatgttgcgggctattgactacttgcagaacggttgggatgagaagggacttccagctaagtggcctgatgttcggagtcggtggtgcatgcgtcacatgggtgcaaatttctacaagcaattcaagaacaagcatcttatggagctctttaagaggctctgtgcacaga

SEQ ID NO: 17063 - DNA, 5322 bp, Oryza sativa
ttagggaggtttaccctgttcctggtcgacaccctgccgtcgaacctggcgagctccaccgcgtagtccggtcctccactctgcatcatgcagccaacccatcaatggccattcgtgcgtgttcgaatataaactaaattgccagttttctcttatgagctaaaacatttgagttaaactggtcggtgcatgcaactcgatacagataagtgagtgtgagttaccaggaagacggagtctctagtggcgagggccaagatgtcggcgcaggacaccctgttccggcattgggggtcgctgtcgacgccggccttgggggctatcaccgtcgtgaacccctccggcttcagcgtctggtcgtcggggttcctccactcgtcgtcgccgttcgggttgatgatcatgaccgacgcgtcgcacccgcggacggcgcagtcgtggaagaagagcctcagcgtcgccggcgccgcgatcggcgactgctgcatcgacctctgcacggacccgcgcacgatgttctcgaggttcgggcagatgctggcgtagtagttctgcttcagctgcgccaccgccaatggcgacgagatcgcccccgccagcgcgaggacgacgacgaaatggaagctcctcatcctgtcgatgtttttctcttcactacttgagcttaaacaagcttgaaatgtaataaattgtgtttgagctcgaggtggttttgcaagcgatgggtgagtggcgtttatatagaagagtaagggcgtgtgtcgtcctcgctctgagagcttctgatccatttgtttaattagggttttgcctcgttgtgagtagactcagaaggtgataatgcaaatgatcatttgtttaactgaggtttaactggtcaatctgcaactggtagttaatggccatgattaatcacgcacagctaagctcaaaacctgatttcgagatgggcaaaactgtgggtcctggctttctgctctattatatatactctctgcatttctgcatatactaatccagctctgatcagatgaacattcctacagatcttaatctcttttgtttttttgtgaatcaacattcctacggatctgaatgtctctgatgaactgagatccgggtatgatacacttcttcggtgtacaaacattattttttttgtaggattcttttttttttttggaaatttttttgtgagatctgtccctctgaatattgatcatactactactgtaattccgtaacaaaaacaaaatgatgatattttgtttctctcaactttggatcgatggaacagcatttctgaattccacccttaaaacaaacatttataaattcatctgttctgcattccagaaagcagcttccattatattgtaccttcacaaaagaaattgaagtagcttccgttgaagaatatagccatgcatgattgactagcacagagtttgaaaacccattgcatactcgttctgtaacgtgtacctccatgatttgctttggtgacgaggggcttataagtgcagtttttttttttttttgaaaactataagttcaatcgcaatctgtgggtagacctgacctggtacatatcgccacacgcaggtgtcaacattaagacgaacacatcacaaaatgggtgcaaaactgtgagctgcaggacgtcacactgggcactgaactcgtccataatatattttttttacttttactggaaacttttaaggtgcactcaagttaatttgagccgttcatctttgatcggacggtttctaatgaatgtgacgcgatgcatttgttcgttggatttaaggacatgcacacacggaagttcggtagagcgtattattttttttaagggaagggtattttttacccagtctctatgttcaatcatagtgtattttttttaaagagaagattattttttacccagtctctatattcaatcggatatatgcaaccattttaatttagaaacctagcctatcaaacatgaaacttagcttttaaataatccaatctgaaattcgctcttatgtagatttgaactcaggaccttaatgtgttatttaggtcactgcaactattaggctacatgccctttcactggtatagtgtatattttgtagagtagcctatgttcatgagtttcttttgttaggaaagctgtatgtacatttgtttttcttacaaaacgtttacaaacgatgatgtcgtacaccgtacactactaatgggtcttgattttctatgactcccaacaaactacatcaaacggttgataagtttctttgtgacaagaatttctattaagtacttgtggcaatgctctttattattatttcgactttggagttaatattaagagctagatcacctagtgtatatactagtgttaatttttgctacaacttggcacttattcctcttgtacatcacggtgaatggtaggtgacagttgagttaatacattgcaaataccaatctttaaaagtaaagtacagaaaatttgccaatcaattaagagaagaataattaatggtacagtactggtcacactcgcgggcaagtacagtaaaaccccccaagttcgagtgtttagatttggtcatagatccaggttcgttatgaacttgcgctttcgatcatgaccctgctgtcctgcatgctactactactagtatagtggtatttcttccttcataacctccgtatcaaatgtgatggaatgtcaatgaaatgctagctaaaccaaggccttgtttggaagattagcctaggactaatgttgagagctaatgttaagtcatgaattggtaggctaaacataagcttagggtggtatgtttgaatccatgggctaattcaaggctaaaaggtggagagagagtagaaaaagaggagagagaaggagagagagagagagagctgttttttgatagtcctcacacaaaattagcctcattagcacctcttggaggggctaatgttttgaggggggctaattcacattagctcaaaattagcccacctgtttggattcttgagggctaatttgaggctaaaaggtgagggctaaacattagcccatggaaccaaacagggcccagagcagaactacggctgtgtttgcaacctcttgttcccaacccactctctctctcattttctgcgcgcacgtttttcaaactgctaaacagtatgttttttttacaaaaagtttctatacgaaagttgcttaaaaaatcaaattgatccatttttttaaaaaatagctaatacttaattaatcacgtgctaatggactgctccattttccgtacggagagaaaaagtttccatctgagacatgtgaacacagcggtacattattttcttcaactctaaactacaacaccctcgttttttcgtaaatacgcgcgcgtgtgtttttctaaatctttttatacaaaagtttctttaaaaattacttgaaaatatttttaaaatctgtaataattattacttaattaattatacgccaatgaattatatcgttttatgtatcaccaaaaagctaaattgaattgcagtttcaaacgggcctaaggcaattgggctggaaagtctctcgctttgcatgcactgtttacaaactattaaatagtgcgtttgaaaaaataatctataggtctataggaatgattcttattaatccacttttcaagtgtgtgataattaatatttgattaattatgtgctaatggctcatctcattttgtatatcttttcaatttgtctttttctcttctcaccaacacacccaaagtcgttgtaccgctgtcccgagctatgcagagcaagtattttagccagaagacttcattaataagtgagtcacccccattcttgctaatcgtgctcctgttcatctcatatgggacaaactcattaattctttgggatgcaaatggtgtgcatcttaattaatactttactcttttcctctgcgaggattattactttattcttcgccattctactaaccatcctagcttgtcccttaaaaaactcctaccctttcttataaaaattctcctatagctagtcttcgttttaacaaagtgcatgtaacctgcatctagaaacaggtgcgttaaaaactaagataatgccgcatctatgtcaggtcaactctgccatttgttgcaacacaaattttgcaagtgctcacttgcaatataataagctaacgtctacgtgcatacgcacgcgagcatggacattggctaagtgccaggccaacacggggaaaattcccacacgcagtgacgtgatttttcggcgagggatcgatcgatctgtttgatatctgacgccttcaccatcctatttgtgcatgtgcggcggtgtctcggcgaagaaacacggttcagatgatctcgttttctataaattataaggaaacgaaacgcttgcttcagctgtgtgacaaactactgacgaaatggtcaagggttcactgagaaaacaaggtagctagctagctatgctgagttactaggaataaattataattcctcgacgggaatatccctcgtacatattttctcaatcaaattcaatgaaaatagttaagaaaaaatttagaaaaaattacatgtatcactccacaaaagtcaggttcaaattatcttgatttacacaatgagaaaagaaaaaaaaagaagataaacctaggtttgaatagtattgttcaatgatggatttatctttttttatttcttgacatgtgagttcagtttataatcgatattttgtggattgatatgtgtatattgtatggaggttgtcaatttttttgagactttatataacttttgaacacacgagagattaaaattattaaattaaggtacaattttcccagcgttaccaaatatttgtaccagtgtgtgcgcacgtctgataggatggtgatgaaatgatggtgaaattcacgtacaccatgttgccaattttgcatggttttatatgcagatgcaacatgcgaggaaacatggcattggttgctgcatgtttccccctagttacagaaccaattacatctaagatgtgtgcaaccaggccatatgcatgcctattttgaccaaagttattttccaaggctatgtgatctagatctatgaaaatgccactagctaagtaaatttgttattaaaaaaataaaagtattgagaagaactttttttttctgatatcaatctcccctatagcacatcaattatctgccgtatgtagccgtgcgatccaaaagatcgttcttgctttaaattcacc

SEQ ID NO: 17064 - DNA, 751 bp, Oryza sativa
  unsure (1)..(751): unsure at all n locations
cgacctagntnnnnnttaccccnnntnnntcgntnnnnnnangnnanngnnnngttaaggaaacggtcgggcgtgacgccactcctaagtcctggtgacaggtgggaccggtctccacaattgggcagaaacccaacggtcacaaaccacgcacatcggcaatggtaactcggctgtcaacaatgagcggtctcttcaagactgccacattacttgagtagcacacgaatctggacatggcgattcgcttcgtctgaagatatggtaacgtcgcttcggtcggcgagcgtaattaacgcgcgcacgatatgatctatctcgactgccacaaccgcatacccacctcatgcgccgcaagcgggctaatgggattagtggaagcgtgggcgcgagaaacgagggggcgaaatagcgggcgccagaagcgaggagccgcgcacagcgttggcaagagtataaaggcacagaggaagggatctgtttccttcctttcgccattattccccttgtcttcgccgcttgcaccctaactccttctttcctgtgccctaccttcgacacacgcgctcgctcttaatcttctcttcctccggcgccatggcacggggttccgctctgctcgatggtagcgtgctgccgccttcccggatcgtgagcgagaggcaggctgggctgtcgcgccgcttcatgccggaatctgccaccggccgggagatagtcacgctggcgcgagggacccctcgccccagat

SEQ ID NO: 17065 - DNA, 1741 bp, Oryza sativa
gacgctcaagatgggcatcgagacgcgcctccgcgacaagatccccgagatcctcgccgtcgagcagatcgtcgacaccgagaccggcctcgagctcaaccacgacaacgtcgacaaggtcactgaaatgctccagtaatcctgcatttccaaagttcattagacagcaagttcatgttccaatttcagttcagacaaattcagtagcttactcctgtgaactatcacactgtaattctgaaggttttttttttgggtgttgcaggtgctggatgagatcagaccatacctttccggcaccggaggtggaagccttgatcttgttcagattgatgaatccgtcgtcaaagttcggttaactggacctgcagcgggtgtaatgacagtacgtgtagctgtaacacaaaaactgagggaaaagataccatccatcctggctgttcagttgacagagtagaaacatgagttcagttatgcagcaactcaagagaaaacaaaactttgattttcagtgattttgtggtattcagtctcagtcttgtggttttgaatcaaaactgaagtactgaacgtctgaacctatcataccatctttaaatgcaagtgttctgactaggaaaaaccaaaataaatcagaagtctcttgtctgtaagatataatccaacaaaacattcagcatctattaattcaatgaagagaacaacaacccattttacatcaggttatcagagaattgtcagacttccagtgcatttccttggcaatgaggcacaccagggtcttcctgaacccactgttccactatttccgccttcagcttcactaggaatagctgctagtgatctcatggggtaaattatcggcaggaatagtcatgcattagacattagtgcatgacaagtactgttaattcgagttacttttcgatattcggttccagtcgtatacaccgaagtactgagatgatcagtaccaatctttatgcagaagaattctaaccaaaaaaaaaaaggaaaagaaaaaagaccacagcactttgtatgtcagaaagataaataattcaataaaactttaaaccaatgttacttcattgaatagatatgcgttttacatctgtgtatcatagaattgtcggattttcagtgcatttccttggcaagggcaaatgttctgataaaactagaaacatcagcctcttcagtggaacctggcaccacaaaattcctattagggtagtaccaaagctcttcataatttcaaggttagccatatctatgcttctcaaattgaccacaggccaactccttatccccattgttttccttgctgatacgagtttagtcattgcaatatttcaccctttaaaggccttgacatcacagttcatcaaacaattgtattggccttattaagaaattgaggcttgcggtttttatgcaatcaaatttcacaggaaacaattaaaaatgtttccttaaaaataaccaatcatggcttcaggcagcctcttcatcacattgatgttcatccaattgggctgccttcatcatttgcctaatctcctcaagcttttcgaattcccgcttccgcttcaaaaacccttccaaaaccctaaaagctcgttctgtaggagtcatccccatctcaatcatctccctaaaacacctgtatgcttccaaaaccacacctctgcagcataaaccagtgaccagaacatccaatgcatgccggtgaggcaca

SEQ ID NO: 17066 - DNA, 1141 bp, Oryza sativa
tatatcctcgaacctgaaatcggctggcagttcgaaatccattgagtcggcatagaagaaccaaactcgggcatttttttggaatccgtcataaaagctgaagaaccagtccttcagaagttcagccgataattttgctcctgcatcagctggtgtagatgcatactctccgtatgacatacatctgcgatgggtgcgttcttctccatcatcttctacaatcggctccaaccttggaaattcagcttctgtcacagatggccgattgaaaaccttcatgactaccaggttcagccaggattgaaagagccaccatgatccacctgttccaaccactgagccgataattattttggccgatgcgctgtttaacatctggtatagatagccgagaaggattttgcctaagggaaattgtttcttcgttactagggcctcggctaagaaccgccagttggttgtaggaccgcagcttgatccgcagaaaaggaatttttccaaccacatcagcaaaaaagctacgtgttctttaggagtgactggccctttgcccatatatgctgtgatatatcctgaccaacccccaatgctcttagttttgaactcaaaagtgttcttggtgtttaggctcatggggttagccgatgaggttacatctaggccagtgagcatgataatatccagcagcgttggggtcatcggcccttgattgaaaagaaaggcattgagagtgtcggaccagaaataagttgcagccgccaacaggggttcatctttggccgaatttgctactgtgagggctagggcttggctgattccgatctcatcccaatgggcctgcttgctagccgatatccgcttataccatacaggccagcttttctccagagaaggccaggatttgaaggtgtttttccaatggcttgtgtttggattggccgacctaaaaggagttctattggtttcggctatgataaattcagtagggtctagattgccgattggaccgagaaagtattgttggtcatgcaacagactgggaactgcaacaagattggaaagatgctacaagaatagagaaggagaaaacgggataaggcgagcgaaaaccgatctgatgaacggaaaagggatctagccg

SEQ ID NO: 17067 - DNA, 3778 bp, Oryza sativa
  unsure (1)..(3778): unsure at all n locations
gccgtgnntttgaatgcaatcggctcgacccgattatccgggtactccctctggcccaaaaaaagtcaaaccctagatttccgtgccaacgttttactgtccggcttatataattttttttataattagcatttttattattggtagataataaaaaatgattaatactttatgcgtgacttatctttttaattttttttatattttttttaaatagaacagacggtcaaacgttggacacggaaatcagggtttgtttttttttgggacggagggagtacactgttagctctggcagccagttggggcgcctgaatgacggtactgttaagaatggaaggtatcacatcaatggagctgacaagagctagcgtgccattcatctgccgacgctgttcttgtacccaaaacggcactgtttaattcagccttttcgtcggcttgctccgattcagtagctcatacaataatgtagggatttccggtgtattgggaaacatccttcaatagttcaatttcactgttttaatccattttctaaaaaaaaagggttcaatttcacagcatgacgtcttctatatcgaaaatgttgttccgtatactctctgtgagtctgtgtgcaaggtacgggcaaaagccgcatgtctatgctccttataagcttattgtgttatttttccggcccaaagcatcgagcccaaaatagataacagggccatattctgggtattctgccggcccacatgaattctttttattgaaaccaaaaggaataagttcactttaggtcccttaatttgtcgcccagttcgattttcgtcctcagtccacaaaaccggatacaacgcatcccccaacttaccaaaaccgtgcagacgagatccctcggcagtattgtgcccggttttggatgacgtggcgcctacgtagctggtttgactaagtctccgtcctacgtggcattggcgtggcgcttacgtggcaattgatcccaaaaataatagaaaactgtaggacccacgtgtcaattacacataaaataataaaaaaggtggggccatgttgcggcggtcgcctccagtagctggctgggcgcgaagcgagttgcggcggcgttcccaccgcagctcctcggccttccgcggctgctgcggcgtcggcgacaaggaggaggaggcaacccgtcagttagtagcacaccccgagagttcaatctaagcggccgtggcatggagaagggcacattgatgcagcacacattaccttggagtggcgatagggcacgccggaggaggaagcggggccggaggtggaggaggaggagacgtggagcgcgacgacgagcagcgttgcatcggcggtgatggtggcgcctatcgcggcgagcgagagcagccaccaccgcaccgtcgcccaccgccccgttgcagcggcgcccctcacctttcgccgcagtggcaatggcgtcgcatccgccctgtcatggctaccacacgggaggtaggaaggtcgatccaggcacgggggtcgctccgtgtctcaccgatggggatcgatcctcgccggcctcgtcgtcacggctgtctacgccatctccaccgtgtgatctcgctccggcttgacgatgacgaccccggcaagcctatcactgtcacgcggtgccgcacagtagtaggaggacgatgcccacgaccagcttcgtctccaagtctgaatttttctcctttccttttcttcaactgaagaaactgttgatgtttgattaatctgcagcttgaatggagaatgcatgcgtgcataggccgggtatttgtagccattgattcgggcaatttcgcttggaagcaaaggctccgaaagtgagaacattgagtgtttgacgaatcatgcgaggaggaatgggaagatgcggtgcatgaaaacccccttcttcgccaacggcgcctttggcggtgacgcggggtcgggctttcaggcggcggccatcgcggcgggtgcggacgggaaggtcgcggtcgacgggcggcggcgaggcgactgcttctgcgagcctaaaatctcccccccaaccacgccgctggtctcctccaagaagatgttcggacccgccggcgcgccgaccacccccgccaccccggcccccgccgcggcgctgttaacgaccaaatttggtaaattctatcactattggcatcggagatgaagatcagatcgaagtggaatccaagatgaagatcgttgcggagacagagtaaaaatcggctgcagtctaaatcggctaaggtcgggatcgacagagttcgagttggacggggctagccgatacagccgattccgataatatgacccggtgaacgtcatcgggttcaagttgatgtgcttcaaggtgattgccatgcttggatagagtcctgggaaggcaattatatttattaattaggatattctatgtaatttccttagagatatgtttgggcaaaagtctgccgtaaagacttatgatatcttagagtttgttagagataatagtcgtgtccgttatggacgtatcttgtaattctcgggtataaatagacccgagccctatgtaaaaaagagacaacacatccaatacaatctcggcgcatcgccacccttttttgctttacttttatttcaacgagtttgtgctctcgggttgagctgcatcggtttcgatcttcaacaagaggtaaaacttgtcgtgacgacttatgttctcaggattagtgcttccatctttatgacactctaatcttgtatatataattcgtcgagttatcatatatctcacatagtcttcgataatatctttatctaacctataatcggctaacatctgctaatggaaggcagccgattaggttagacaatgacgttaacttagattatgtgatatatctaccactctatgaaacttccagcggcttgattgtctagatattgttcttcttttcatacttaatgctgcatcagttgagtttgatctattaagtcgtgcttagaattgcaatctttagcctgctttctggttgccgataagggtagtatcggagtttcagccgatcttacctgatttaactacttttattctatatgcttgattgacacgttaaatctgccctttatgttaagattttattgcatctaagtatattaagcttatgtttggtatattctacttgctttaatatcttagtatagagtggtatcggagtattagccgatacatgctagatctacctgatcagctatgttatgaatgtatataatcctactattaatatatatttcgatctaagtgatttatactatctcggcaaggtgaccgatatatcccaatcacttgatttaagtatataccgatataaggattatatatcattaatgtatacagttgatcgagtagatttagttctgaattgcttattgatatttgccgatcgatgtacgcatgacatcggcttgaaataaatgatatgtcatcggcatctagtcgatcggctatcatttataggattaattgcggtttctttgttctatctcttgttgattgcaggatcaaatcaactggcacgctcatacatctgaaggcgagctttggacctgcactggagttaagcagatctcccaggcctcgtgttttctgtcaacacacttttggcacgcccggtgggacccattaggagtcagaaattaatcttcctcatggccgagaagctgccaccgtcgccatcctcggctagcccaggtactgtta

SEQ ID NO: 17068 - DNA, 2062 bp, Oryza sativa
aacaagagaacagttcttcaagtcattcacacagactcgcaaggcaacattgttcaaaagtacaaggtaaaggtggttcccgatgagcctgagaccagtacctctaaggagagagaagaaaaaagagttttagatggctcagctcaagagaatcagggtgacggctctcagggggtacatgcagttcaaggtgatggtgctcatgagccacaaagaggaaatcttaatcagaatggtgagacaacacaagattttttcaacaatttccaagatcgagtggactacgccgtacacaatgctctgatcaatcaatctagagtgttagtcaacaccttgtctaacatgatgaagacgatagccgatggatcaatagtcgagcatcaagctgcaggcccggtctacttgcagggaggtgttttcccgaattatcaacctctgatcactgatgttcagccgcctactcaagcagttctttcgagtgcaccatcggctcagccgatggcaccgccattgacttctttgcctgctccatcagcgtcgacactaggccagccgaataatcctcggctattgatgagggagcagccacagcatagcgggcagacggtaaatcggccaacacaggatcaggtgactgctatgtttctacccctccaatctactgtcaattcgattcagcaggcgccgccaaggcaacaggttgtgcagccgattcaacagactccaccaaggcagcaggttgtgcagccagttcagccaacacctccagaacaacaaactgtacagccgattctgcagcaggctttgatgaatcaatcggctgggcaatcggctgggcacgtcctgaatcaggttgttccagaacatttggttcaccatatacagccagatggtacggtgatgcctcagattatgccggagcatttggtgcaaagtatgccggaacatttggtgtaaagtattcagccaaattaccagaattgccaagggggcaatataaattatcaatatcagcctccttcccctcaagttcagtatcagcagggagggctaacccaacctcagtttgcttctcaatataatcagtttgaaccaatacagcaacagtcgcaaggagtagctcaacaacgaccatgggccgatgtaattgccgatgtaatgagagaacaatttgggcttaagccgagagatactggaaaattgtatcggcaaccttaccctgagtggtttgagaaagtccctcttcccaaccgatttaaaatcccagacttctccaaattttcgggacaagatggtgtgtcaacttataaacacattagccgatttttagctcagtgcggcgaagcatcggctgtagacgctctcagagttagattatttcagttgtccttgtctggattggcttttacatggttttcttctttgccgtatggatcagtcaatagttgggccgatttggagaagcagtttcatagctatttctacagtggagttcatgagatgaaattatccgacttgacggcaattaagcaaaggcatgatgaacctgttcatgagtatattcagaggttcagggagatgaggaacaagtgctttagcttaagtttgactgatgcccagttagccgatttggcttttcaaggcatgattcctctgattagggagaaattctcatctgaagattttgatagcctgtcgcatctcgtgcagaaggtaacattgcatgaacaaaggtttgcagaggccaggagaagctctaagagggttaatcatgtctgcccttacgtgtatggatcggatgatgacgacgatgactccgaaatagctgcagccgaatgggtaaggagtaaaaaggttataccttgtcagtgggtaaagaattctggaaaagaggagaaatatgattttgatattaccaaagctgacaagatttttgatctgctactccgggagaagcaaattcaactccccgctggtcatgtaattccatcggccaaggaactaggcaaaaggaggtattgcaaatggcataattctggatctcattctactaatgattgca

SEQ ID NO: 17069 - DNA, 3955 bp, Oryza sativa
cttctctgaatcctatacaaaacagttttggcattatgatgtaccacttgttctggccggccattagctctctactttatcgtcaattttggcttaacaaagaagatcacacgcgtaccacaggtagcaatggatctttctgtttggcaactattacaaagcgggtgcactttgcttactcctgtttctttactttgcctgttattttttgggaaggagagagcacgcctgaattgctgatttggcccaacatttgtccctgactgccactaatttgcatgatctacctaccccatatttggtttcatttttatgtcgtctcatttacagctctcataccaactcacaaatgccttgatcaacttgactcctgttcctgttgatgtcatctcattgccttcgctgctgatttgctttgaactagaagaatatgtgttaggcagtcattccaacagttgaaaagttcaaatcgagatgttgccaatatttaagaaccggtttgcagtttgcagttggtacttcgtagtactaatttttttctgtttcagagtcagaaaaatggaagaaaaaaggagagaaaagagttaagtactctacatcaccagatcagcagttgtccatcaattgagcacacacccctgaagttgaaaattccaagtgagaaagaaaccagcattggtaccatatgaaacactattatttattctgacaagcatagtttaccatgcatggacaaatagattcttaaggaaacattaagggggagattaggatctgtgcaacagtgcaagttatctgtttcacttgagagagaagtagcaactcatctcgtgttaactcctacctaattgcctttccacccaagattaacaggagatatatcccattccctgcatctccaatgaacagtacgatggattagacacaatcaactactactcggaattacacaaatgttcctgaacaagagtagtagtattatatttcacaccctcgcttagtacccatttcttgtggtttaaaagtcactgtagttcaactgctactccccataggattgcttatgttatgtaaaaagagaccatactatgtttaagtgagaaagctgtaagctaagtcgggttacattgctaattcttatttcactggccttaatatataataatctagcattagataaaacacgaaaatctattcaaattcatcgtactaaaatatgtacggatgtgtcctatttagttctagctctaagctatatctaaattattttatgacggagaaagtactaatataaggtgagttctaaatggtagacatccttttcttgctatctctctcaacaatttcttaaggaccaatacattctctgctcgaaattgattcttggataatgatggaccgacatgcaaggccctccaaaacagcgaaaatgacggataaatatgaaagctaaaaccaaattggctctaaaaaattatctcactttcccctctaatcctgctgggattaggagtttggaaggattaaaaaaaaatgcagaaagctccttctagctcctgctgctttgttgtcttcagatggaaacccgcggcgtgagaaagcggcagctgcgccgaaccttccacggcggcggggggcgtttaacacgtggcgccgacgtggacgagtcccacgccgcgcacgaatctcgacgcggcgccaacggccggatctgccttcgtgggggtggacacgtgcgggggatcagcgcgccacgtgtgaagacggggctccgttacgtggtaaacgggtcgggtcacggtgggtagggacccgttaacggcacggaggctgaaataaatcacttgggatctgaccaaatcgtcgtctccatttccgcctcgcgaggaagaagagagagagagagggcaaaggtcgtcgccgccgccgccgccgccttcgccgccgtttggtctcgtcgccttccggaccacccgcactagcccttctccctcctcgcgcgcgcacgcgccacacggccgacgacgacgagcaggtttggagggccgacgccgacgcggccggcctccttacgggtcccgtcgtctctgcggcggctgcgccgatatccatctcacgagcagagcaggagtagggagcaggagcaggggaggggggcgccgtcgtcgggctgagtcccggtgagcatccgcatcctctctttctctcattcatctctccgtgactctgtcccaccacccacttttgtcttgaatttttgcttgcgtgcgttaaccctagctgcttcgcttctagatctgggagaagtttttttctcttaatttcagagccttaaccttaatacaagtaacagtttgtttcccccaaaaaaatttttggggttcaactgaattgaacctccattttatggtgttatgatcagctaaattccgagtcataatatggcaatcgatgctgctatacaatttttggtcagtataactgtgtcattctgtgataattttaattggctggatgatataagtcgcaaggcaattggcactttttttcactgttcctcattgtgggaaacaaaaataatattattataacaagtatacgcgtcacttttttttccctttttgataagctaaaaaagaaagaaagaaatgaaattgtggagacagaccttgtagcaatagcaatgcaatgcaattttagaaattcagaagagggaatgtaactatggctctcatgcatggagtggagtaaaatgttgacaataactaacagtaggtgtgaaggtgatataaccttcttcacattttctcacctcaactgtatcacttctagatacgctgctttcatgtatgtctaggtttccattcttattattttgcggaaacattagttctgtggtgttgttggtttcctaacctttaaaaacttgtggttgcagaactttagcacaagttgtactagagaagatatacatctccttgtgctgtactctgttttggtatggaggaagattctggtagatcaatatcaacaactggttttcttagaagaggctctagtgtctccttaaaagatcaaggcaatgaggagaggccaaacaagacaaaactcaacccaatgaatgccaggtgggctgacagtaaggagaagccaagatatttacgtgagccatttcgttcatcaggcactaaggctgcatgtccaagctcttcaaaagctcccgtcagaaaatatttcgaggaaaaacaaggacggacatttttaggagaggcagataatgcagaaagtagtagcagaagaactgaggccaaccgtctgcagtgtagcaagaaagctgttgttgaggaggatgtgcatccatatggtcagcaggatgagccagaagatttgttgtccacatcaactactgaagatcagcctgcagaacttgatcctgaactattagattcttctgtttcttcaggggtgtctgcacatgcaattggttctgtagtcagaaatgctgctttgagatctaaatcacgtcagcagaagggtaaagaagaattgtgtcagattagacctcaaactgcttctgcttttgttaatcggtccactatacctcgaaattctaccaatggtgtgaaatcatcaaatgctgctggccctggggtacagagacgtactctaaaaaaccttggctgcacatcaatatctgatgttttgccttctggctgttcttcagctaattctattcataataagagggctgaggttatgagaaacagggcatttgacggagagagttcttctagaccaaggggcttaaatggacactctagtttaggccattcacctgccatgtattctggtatcactggtcctagagtcagaactgctgaacaatcagcttctcagcaaacacggactagtagcagaagtattcaggagtctgcagattcttcaaggattaagg

SEQ ID NO: 17070 - DNA, 2134 bp, Oryza sativa
cgcttcataaggtgccatttgtatgctggcttgatagctgttgttgtaggagaactcggcataggggagactcttatcccaggtcttcccgaaatccaggacacatgcgcgaagcatatcttctaggatctgatttagacgctcggtctgcccatctgtctgcgggtgatatgcggtgctgaagtttaatcgggtacccagctcttcttggagcttcttccaaaagtgagaggtgaattggcttcccctatcagatatgattttcttaggaacgccatggagacttacgatcctagcgaagtagagttcggctagtttgttccctccataggtggtcttcacaggaatgaatcgagctaccttggttaatcgatccacaactacccatatagaatcatatccaccttgggtttttggaagtccggtgatgaaatccatcccaatttcatcccatttccattcaggtacttggagaggttggagaagtccggccggtcgttggtgctctgccttgacacgctggcacacatcacaaagggccacgaactctgcaatttcccgcttcatactaacccaccagtatttctccctcaagtctaagtacatcttcgtgctgccagggtggatggaataaggactttcgtgagcttcctgaagtatcaactgtttaagttctctgttatctggaacgcatactcgatttccgttccatagggttccgtgttcatcctctgtgaaaccagcggctttaccctgtttcatattcttgaggagtccatgcatgtctggatcattcttctgagcctcgcggatttgatcgagcaaggtgggcttggcttccagcgcagccaagaatccgcgactaactatgcttaggttcagggcttccatctgttgattaagttcgggtggaatgccacggacgttaagagtgttgcaatggctttttcgacttagagcgtcggcaaccacgttggccttaccaggatgatagtgaattcccacatcataatccttgatgagttctaaccatctcctttgtcgaagattcaggtccgactgagtgaagatgtatttcaaactcttatgatcagtatatatttcacagcgattcccaatgagatagtgccgccagatttttagagcatgaaccaccgcggctaactccaaatcatgggtagggtagttgccttcatgaggccgtagctggcgtgaggcataggccaccacatgaccatcctgcatgagcacgcaccccaatccttggcgcgaagcatcacaatacaccatgaagtccttgtgagtatccggcaagattaacaccggcgaggaaaccagcttttctttgagagtttggaacgccttctcgcattgcgggctccacacaaatttctcttctttcttcaacaattgtgtcatgggtcgagcgattttggagaagttctcgatgaatctccggtagtatcctgccaaacctaataaactgcgaacttgagtgactgtcttgggttgcttccaatcggtgacggcggtcactgtttcggggtccacagcaactcctttagcagatatcacgtgccctaagaatttgacttcggacaaccagaactcacacttgctaagtttggcatacaattgatgttcccgcagctttcccaataccagacggagatggtgctgatggtcttcctctgattgtgagtatatcagaatgtcatcaatgaaaaccaccacaaacttatccaagtattccatgaacactttgttcattaagttcatgaagaaggcaggagcattggttaaaccgaacgacatcaccgtgaattcatacagtccgtatcgcgtggtgaatgcggtcttcggaatatcttcttcgcgaatacgtaattggtgatatccggaacgaagatcaatcttggagaatacagtggcacctttaagctgatcgaacagatcatcgatccggggaagagggtacttgtttttgatggtaacttcattgagagctctgtagtcaacgcacatcctcttcgtcttgtctttcttctccacaaaaatcacaggagcaccccagggggaagtactcggacgtatataccccttttctttcagctcttccaactgtttcttaact

SEQ ID NO: 17071 - DNA, 3375 bp, Oryza sativa
  unsure (1)..(3375): unsure at all n locations
gctggcnnatgagacctgcataacctcatgctgcatgccgcagtagactctgaggatccccgcgtcggttggcttggcatggcaggtcgacaggtttgcagcctctatgggccatggggatgcgtcgatggcttcaccgggagcaagttgccatggcgcagctatcattggagtgtacttgcacagtgccgccgcgtccagatccacggagatgcaacgtgggcgatgtcccgagcagtagcatataaattcgtactgttcttcttatttcctctctcagttttaacgcaggttcacctgtacagtacgaatggccatggaagctgtactacgcggtaacagtaaaagcatttcacagtgagcaattcgctgatgtgcgtttcggagtttcagattctgaaattatgaatggggcgggcaagtatatggtggatgctgtagtattaatcgaactcgatctggagcagtgtactgtacttacgtagataatgaacttggattaatttacgccataaaattccacagaaataactcgcgaatgaagtactggtcctgctgcctgctgatgagcctgaatgccgcacgggcaacctccggaaaattaaaaattttcaggagcaaacattcaaatttcgctgagatcactagccagagcctcacgtgtcccgaacttggatgatccagtccagagcccccacctctttccgtgctgcctcgcaaagcatcgacgtgccacctaccccatccggaacagtaattcctcactgccatgtgggacccacgccgtgtcatgacagccatgtcagcgactgaactggtaatcacctcgcgtgtgcgtctgtgcgctcatccttttttttttcctcctcctcccacgagcattcattccctcgcaacgcgcgcacgaattttatttttatttgaaaaattcccgatattgcccttgagctgtcagcattagtaggctatttaatgacggacaaaacagtaatctcgcgtcctaacgttcttaaatgcgcattactagctcgaaacaggggtctctgctccccagcccatgctgctccctttgcccttttctttcgggaaaaaagggaaaaaaaatactccattcatctactgacacatgggcccacatccccacaactaaactgtcagtggctcagtgccacccgtagtgtactgccactccgcgacaacccgcacggcgtcgaactggttatcctcaccggcggagcagcgcagcggcgagtggccccacccttctcccgctgccactgccactgggccccaccgcccggaagatccggtcaccaccgcagagcgctagtctccaccgctattattaccccctaccgcttggttacaaatcacactcgtggttgtctcgtgtagtggaggtggagtacatctaaaatccctcgtcttgtcgctgctaagcttgccgccgatggagccgtcgcggcggctgctgctgtccgactacgacggcgcgatcgtgtcgccgctgccgtcgccgccgccgtcgtcggccacgccgttcaggccgggcgtcgcggtggtcgtgggcatcctgacgagcgtgttctccatcacgttcctgctgctgctgtacgcgaagcactgcaagcggaacgccgcggagtcgtcgggcccgtacgggagcggcggcgcgttcgggtcgtccggtgggggcggggcgggcgaccggcggaactccggcgtcgaccgcgccgtggtggagtcgctgccggtgttccggttcggcgcgctccgtgggcagaaggctgggctcgagtgcgcggtgtgcctcggccggttcgagccgacggaggcgctccggctgctgccgaaatgccgccatgggttccacgtcgagtgcgtggatacgtggctggacgcgcactcgacgtgcccgctgtgccgctcccgcgtcgaccccgaggacgtcctgctcctcccggagccgccaaagccgtccaccacggggccccctgatccgccggagacgaaggtggcggcggcggcggcggctgctacggccaaggacaaggaggcgagcttagctcctgctgctcctgctccgtctccagcgtttagaggcttcttctccggccggcactcgacggggtcggtacgggcgccagggagggttggccctgcctcacgccggtcggccgatctcgtcgaaggcgacggcggtgcggtggtgggatgcttcgaggccgccaaggttcgcaaggacagggtgctgttgatggagccggcggccgcggtggcggagcctgacccggaagcctacgaccggcggttcgggcaccgcatcctggtgagcaccgccggtggctgcgaggacgagacggcaccggcggcgaagcagcggtggagcgaggtgcgaccatccgatctgatgttcgtccggtcggagatgctggtgacggaggccggccggtactcctgctccgccgccgtccactccggcaacggcaggagcgtaatcagcgcgaggagcctatcggagctcgccggcgtgagccggctccctcccatccgcgccagcggcgagccacgagccggcgcgcgtcggtggccgggctcgagctggtgggcccggggcccgcccgcccttaacggccctagcacctaggccgctgttccgcggggcccacttcgcagcccggaaaaaggctcccaattttttctctccccatactgcccccgccacttccacgtaaaccacggcaccctatgcccgaacccgtggctcacgtgatgggcaccatggtaattacacgcagctggggcacaagactgcaagatgagtccatgccatgcccgcctcgggagccgcgccgctagagagagataagatggtggtggtgatggtatgttgctttccgcggggatctcggggcaaaggggctggtttcttcctgaattcgggcggcctggatcgatcggctacggcccgcatatggcgccggcgaaggcgtcgtaacccaatgcggccgggatcttctgcggggccgcgcgctgacaagggcttttggcgcgtcgcgtcggccgggtcgggggacgagggaaccaggcaaccagcccatgcttcacaagagagaaaaagaaaaaaaaagctggtcgtatgcgtgtaaaattcttgtctgcgtaagaggaaaagcgctgcaactttttggtgtaacctgttgcaaagcatctaccgggcaatggctcagttagtaaagcagctgaagcccatctcgcatttctcatctactatcctcttggctttttttgtgcgtcgtgttgctagactcgggttcgttttgcattctatcgtagtggcagtagtactatcagtggcacatggtggaggagcaa

SEQ ID NO: 17072 - DNA, 1202 bp, Oryza sativa
  unsure (1)..(1202): unsure at all n locations
caacaagcgtcgcaatatggtaatggattnggaaagggctaattctatagataaatcattactctaacctataancaaagtttaatataatctccaactcaacccaacccaacacccccccgggnatttgaattcgaatactacaaccccgcagccngcagggcgactatagaggatccccgacgtggacggcgtctgggaaaaaggggcggcggcggcggcggggcccaatatacgggtgcgggggctgacaccgcggtcggaggcgaaaggcgaagagatcctccggggcgtcgacctggacgtgccgcgcggggtggtcgtcggcgtcatcggccccagcggcagcggcaagtccacgctgctccgcgcgctcaaccgcctttgggagcccgcgccgggcgccgtgctcctcgacggcgtcgacatttgcggcatcgacgtcctcgcgctccgccgaaaggtcggcatgctcttccagctccccgccatgttcgacggtaagtacgtacgcccgccgctgtccacacacactgcacatacgcacggtgatccgatcctggaagaaactgtacatggattccatgaatgcggtaccttttccaaatttaaatgttcttctctgcaaaaagatgcttttccttcaaaaataaacaagaacttgatttgagattaccaagatcctgtccaaaaaaaaaaacagtaacgagtaagttttagacgatcaacagacaactaggtttggcatttttcatatgaataattaactattcgccactcttacgattgattagcctagttgtgtcaataataagttataataagggggaaataatgataaaatgtaccaatgtcgcagtcaaaacctaacaaatgaaagccgagttatagcatttgataaacagataaaaccaagttgagcacttttttgccctcgtcttgtttcctagaaatgggtgataagtttttttctacctaagaaaccgcatcaattttcaacttgcagtgaacttttacactagaggacgggtacttttagttgaaagaggtttttacgctaaggccaaatacatgagagcttttgctagttgtaacttcttctagacttcatagctcccttaaatagttcagattctaacctaaattctgataattgatactcctcagtttgccagaatatttcaacctaggatgagacgact

SEQ ID NO: 17073 - DNA, 570 bp, Oryza sativa
attaggattgagtcgactagacgttagacataacaagcaatcatgaggcaagaaagttgtagcccactagtctagctcgcgagccttagccacttcacatcaatctagggccactcacagcgcgccaccaagttttatcgttcttcacatgccacgtagatcaagaacagtataagctgcatgctccacagtgcaagttacatatagcgggttaggtctatatccagctttagctaatatattgacgtgtaatcattttaggtgttaaaaaaaatagttatccatctttagggttgagtgacgcaagaatttggccagagaatcaattgtctccctcctagacaagtccaatggcgactctgttcatcatttggccagaggtgtcgtaatcaacatgcccgtacctaacggcatcatgtcggagtactaaagagcccagctacgattcatctacggacgtcgtccttactaatcccgaactcgatcaatcaaaacgtaacctttcaggtattgaaaacttaccactactccagtaaatcacagcgtgtaatccgctgtcacaaaacacaa

SEQ ID NO: 17074 - DNA, 624 bp, Oryza sativa
atcggtggagctctgtcactgtgccttgtgcatgcgtttacattgtgcgcggacatgcgtggtggcgcctctctccggttaaggtggccgggggctctcgtcgccgtcgtagctgcggcagtaacgccggcgccgccggcggggcatggcgaccacaatttccaccgggactttgacgccgtgtgggggaagggcaatgcgaggttccgggacggcgggcggatggtggagctgacgctggacgagcagacgggggcgcggctgcagtccaaggagcggttcttgtttgggaggttcgatctcgagatcaagctcgtcaggggagagtctgcagggaccatcacttccttctatgtaagttggggcagtcttctgatcgatcttggcttgatttgttcgatttttccccctagtttgtgtgaaatcctaagaattgttcatcccgttaaagtagctcggattgttagtagtagacgacagaggaacaccaggggaattccacgagttgacacttgtcattcttgggatgagctttactttatggggcagaaaataataagaagaagattgtcatcccagattaacaagtttggtcctcgattagcagatgggatggttgagcgc

SEQ ID NO: 17075 - DNA, 5905 bp, Oryza sativa
  unsure (1)..(5905): unsure at all n locations
cgggcggttgatcactggtacccgccacctggcaaccccaacctagggattggctttgcctcctccgatcacatggtagcaccgccaccttctccttcacgccgcgccctgcgtttgcccaagcggtgccacgcaggggtcaccttcttgtgccgctcctaccagccaccaccggcgtctctcgttgtggctccggggaatcagttcagccaccttcatcgcacgtgtcgcccccggcatgccgtgggccggtaccggccatccatttgcgttgctgtgtagacaaaggtgcggaaggaggagggaaaagcgcggtgggaggaacatacaagtcataaatcagaatacaatacaagatatgcatgatacttcatccggcccctaatataagggattttaacattttgcttgcactgtttgactattcgtcttattcagaaaatttgtgcaaatataaaaaacgaaaagttatgcttaaaatactttgggtaatcaagtaagtcacaaataaaataaataataattttaaattattttaaataagacgaatggtcaaacagtgtaagtaaaatgttaaaatctcttgtattagaggacggggggagtaacacatgaacttaccagtcaatcaacgtctgcactctgcagtctggacttgcaagttgaaatagtactatcatattgtactactgctcattgcccaactgatgaaaaaattgcataaataagtaaccgctgatctgacttgcttaaccggtgcaagcagtcgttcaccaccaagaactggttgtaatagtagccgtcgtactccgcctgccgctcggatgtcctgctcctgcaccgggagccgcccggcacggacccacggatccaacaccgtcttcaccttcgggttgacgccgccggcgtcatggaagacgagacgtatggctggagctgccacaatgcgacgaacaaatgtgaggaaggcgagcgagagcacgagaacgacttgatgttgacgcacgggactgacgaacactctgccgcccgcgtctttcatagctacttataccctgctgcgcgcccgatcgactcccttgccgccaggcgccgcccagcacgaccagtggcggagccagaaaatttccacgtctaagactgagctaatgagatctcaaatattttcataaattatatagcattttttaagattataatgggtattatggagctaggcatggggcccaagccctagctgccccatgcctgattccgcccctgagcacgacgaaccatgaggcaaggcagatcggcgggcagagaaggcaaggtatatatcaagactcaagaggacgcgaaggatgtggatggtgatgatgggagaggcggaaggggacgggagcgaaagggtgataagagtatgagaccgttggtgttgcgcgtgaactaaaacccattgttttcatttttatcctcatccctgacatgtgggccccataagctgactcagaatcaaatatgtcatgtgggacaaaactaccttcaaaaccgttcaggagtcaatttgcaacggttttgagagttgggggatgggttatacccggttttacggttgaaggatgtgattcaaccaaggatgtgaattgagggatagaaattgactaattactactggaaatataatacgaactgggcctagtgcgccagaatctggattcgagttacgggctgtggcctatgattcggcagctttggaagcccatcgcatctcatactgttgttgctgttagtttcagaaaaagaaatgtgactcccatacaaaatgaaattttgagcaaattcaaaatttcgaaaaaaataaaaaataatcatggacgtagtgcttgatttgcagtgtactatggtgaataaatttattgaaaaagagtaagataaattcaaatttgagagcaaaattaaaagtcaattaggaaataggaaaatgaaataatgaaatgggcctaagtttgcactggtcatgcggccctttaaggcccatgtggagaaaatatctcatggtattctcatctctctaattttctgttattatccctaaactctacacacatttaagtatttctccaatttaattttaacattttttttcattttgttcttctttcggccaaacatctcgcggttaccacgcaaatactacagtaatcgcctcaaaccgcgcggtaaccgtaccaaaactataataccgcagttttttttgaattcaaatttttgaaaccgaaatttacaatgtttttcacggttattgcgcggttaccgcggggggtcggtaaccaccccaaaaaaagggtaaggggaaccgtggtaccacatccccgtttgtaaatgttttgaaagaaaaaaaaagtatatatagctttcctaatcctaacaaaagaaactcatgaacataggccactctacaaaatacactctaccgaacttccgtgtgtgcatgtccttaaatccaacgaacaagtacatcgcatcacattcattaaaaccgtccgatcaaagatgagcggctcaaattaatttgagtacacctaaaaagtttccagtaaaagtaaaaaaaaaatacatcagagaaaaaaaatatgcttccttttgttgctcgaggcatagcatagtactgtatatttgtacacattttgtatgggagtcacatttctttttctgaaactaacagcaacaacagtatgagatgggcttccaaagctgccgaataaataggccacagcccgtaactcgaatccgatttctggcccactaggcccagttcgtattatatttccagtacgtgtcagtgtgtcaggactaacgaattgaaaagatggaaacaaaacagcgacgacgaaatcgatcgtggcaaactgcacgccaagtcaagtcaaacacaaattaatcaaacaaatcacttttacatcgttgtatattacaacttattcggatcgttgacaaaaacaacttaaattttgaacacacaataatgtacgactactaccgtttcttttttttccaaatccaaaaggaaagattgccatccatcgcccaattgccctccaagaacatgcaccctgcacaagtgcagaggcctgcatccccctcgaggtagatcacgtccgtcgcacgtgtgcaacgcatcgtgtgccatgtcatcagttggggaacctgcagtcgcggcggatctcgccgccggtggccggcgacttgacgccgaccctgccgagcttggtcatggcggcgacgaagtcgttgaagaaggcgccctggttggcggcgtagcggtcgacgaggccgcgggacctcgggtcggagtagagcgtctggtcggagccgaggaggccgcggccggcgcggaggttctggtagaaggcgttgtcgaaccggagcggcgtcgcggcgtcgaggaacgcgaagccgctggagccgcagctgccgcgcagcatcgccgcgaagttggggtccatggtcgggtcgccggcgagcctgtagccgaagaagctgcacgacgccgccccgatggtgtgaccccctgaaaaacaaattcgacaagacatcgttgtcacatcacacgcgtcgccgccgccgccattgctgtgcatgtagctgctgccatggcaacgtaccggagagggcgaccatgtcggtggggctgaggccgaggctgccgaagtagccggtgagctggtcgaggttgaagttgccatgaggcaggttgacgctgttcctggtcgacaccctgccgtcgaacctgccgagctccaccgcgtagttcggccctccactctgcatcatgcagccaagccatcaatggccattcttttttcacgaacgcgcaaaaagattgcacgtcaatatattggaaggagaagagttttttttctacacaacgtaattggtcagacagacctatgttaaaagaagaaagaaaaagcaaaacaaaaactgtagctaggaaaaagaaaaactactgtggcagctaaacggaactccaatcagcggaaaggagggcagagccacactacactaccaacaaacccctcaaaatagcaacatcagcggaagaccacatacggccctccgagagaatgaattccagaaccatttgtgcgtgttggaatataaagtgaattattcgttttttctcatcaacttaggcttttagattgtaactcgataccgcgcaaaaatgggccggtaaggtagggtagatacaggcaagtgagtgtgagttaccaggaagatggagtctctggtggcgagggccaagatgtcggcgcaggacaccctgttccggcactgggggtcgctgtcgacggcggccttggcggctatcaccgtcgtgaacccctccggcttcagcgtctggtcgtcggggttcctccactcgtcgtcgccgttcgggttgatgatcatgatcgacgcgtcgcacccgcggacggcgcagtcgtggaagaagagcctcagcgtcgccggcgccgcgatcggcgactgctgcatcgacctctgcacggacccgcgcacgatgttctcgaggttcgggcagatcttggcgtagtagttcttcctcaggttcgccgccaccaatggcgacgagatcgccatcgccagcgcgaggacgacgaggaaatggaagctcctcatcctgtcgctgttttttttttccttcactacttgaacttaaacaagcttgaaatgttatataaactgtatttgagctcgaggtggttttgcaagcgatcggtgagtggcgtttatataggagagtgatggcgtgtgtcgtcctcgctctgagagcttctgatccatttgtttagggttttgcctcgttgtgcgtagactcagaaggtgataatgcaaatgatcatttgtttaactgaggtttaactggtcaatttggaactggtagttgatggccatgattaatcacacacagctaagctcaaaacctgatttcgagatgggcaaaactgtgggtcctggctttctgctctattatcgtactctctgcatttctgcatatactagtccagctctgatcagatgaacattcctacagatctttatctcttttgttttttgggaatcaacattcctacagatctgaatgtctctgatgaactgagatccgggtatgatacacttcttcggtgtacaaacattattcttttgtaggattcttttttttttggaaatttttttgtgagatctgtccctctgaatattgatcatagtactgtaattccgtaacaaaaacaaaatgatgatattttgtttctctcaactttggatcgatggaacagcatatctgaattccaccgttaaaacaaacatttctaaattcctctgttctgcattccagaaagcagcttccattatattgtaccttcacaaaagaaattcaagtagcttccgttgaagaatatagccatgagcccatgattgactagcacagagtttgaaaacccgttgcatactcgttctgtaacgtgtgcctccatgatttgctttggtgacgagggggcttataactgcagtttttgtttattttttgaaaactataagttcaatcgcaatgtgtgggtagacctgacctggtacatatcgccacacgcaggtcggcaggtgccaacattaagacgaacaccgcacaaaatgggtgccaaactgtgagcttaaggacgtcacactgggcaccgaactcgtccataatatatatagtatcctgctgaatttttttttgttttttcagctgaattcctagccactagatcgctccatgattcatgcaactattaccgggcccgcaacttgatttgggtttggatgaggacggatttgggtttgggtnccgagctcgaatatcaaatatcatngccacacg

SEQ ID NO: 17076 - DNA, 2297 bp, Oryza sativa
  unsure (1)..(2297): unsure at all n locations
ggcatgaagacgatgggcttcttttatgatttcaagcgcttttcttttgtgtgcgtgttctcttccggggtggtcagggaggcggcttatgtggccgtcgctgatgagagttctacggcagttggcttggtggatcaagtagtaagcttggcggcttccgtggcggctggtaaggcattcacactggttcttgctggatttttttttatttttaattttttttattaaaagttttacaaaaataattttccattttgaaaattgacggaagtagtcgcctaccgccctctgggaaggcgatttttaaaaatcgccctcccagagggcggcgaaaatgacgtggcagacggccgttcgctctcgggcgacggccgtcaacgaaatttgcaggcggcccccttgccgccctccgcgagggcgattttgtactgtgcggggggccgcctgcaaatgggcggcgagggggggcatggaattttgcaggcggcccccttgccgccctccgcgagggcgattttgtactgtgcggggggccgcctgcaaatgggcggcgagggggcatggaattttgcaggcggcccccttgccgccctggggagggcgattttgtactgtgctctatatttttgtataaatatcaataggtatcaaatctttttatattgaaaactatacaagattaaaatctccaagactggtaaaatataattttattattttttagggcatatttggattgtcaccggacaaatattttgttaccgtacaaatattttattaatttttagggcatatttggattgttagtgccaaatttttcttcacgaccaaatatttggtaaggtaaaattgcatttgatcatatttagtttgctgccaaaatgtaaaattgtagtgaagaatgttctacataatctcaaatatagattacgtattaccaatgaataggcttccattttcgtgtgttgtgtgctagtgggaaagaagatatgaagaggttgccttcagattgtcaattatatagcgtcgttttcactgcaatatatgtgaactcaatgagatacattattcattagatgtgacaagacgatcacgcgtgggcgtgattcactttatgtaaacaggcagcgccgaaagttgatagtgataactcgagctgccgcttttcatgtgtgctgttgtggactgtgcgcgctactggatctgacactaccgtgcagcgccgaaagtgtgttgtcgtgagcataagttgttctagcaccatatgaatgaaaagaactatgtagacgagacaaacacaagtagtactgcagtagtaatagcaaaagtagtactgctttacaagtttgtaagccaaaagaaacggtcacataaggactgaagaggtagaacactactgacgaggccttttacccctgtcccttctaccctgcgccctaatgtgcccgtgggagtacgtgagtcggtccggggtatggcacggcaacccgtcctgcctgtacaggtgtgacctctggctgctcctgagtgtgcgcctctggagctcctccaagctgagaagagcctaatacgtcgtggtggtctgcaccgtgcaagtcgtcgtcgtagaactggctagtaggaccagtcctaccggcgtgagacgaaaaggccccagtaccgaagatcccggctgcaaatcctgctggacaaggaccatcagtttcgtacaggtatttaacagtattaataaaaagtaaagtaccgtgtgggcgagggatcgacgctccgtgagagtaagagctggcgaacgcgcccaaagaggtggcgaacgcccctgcggagctcgtggaagcgccggtcgtgcctgcgaacgcgctcgaaggcagacgaggtcctgcgatgaggaaacgtgcagttaaaacatggtgacataatcgtgcaaaagctgaaacaaaaatgaactaatatctgggctgaactgtaccgtgcgaaaccggtgctgtaggtcgcactgatccgaagctaggggcgctcgaaggcaaacgaggtcctgcgaggatgaatgatcaagttacgacggggtgatgttttcgtacaaaaacagaaacaaaacttaaaaaacctctgggctgagcagtaccgtgcgaaataggtgccgtaggtcgaggtcctgctccgtcggtaggcgagcgagaccgtggttgtaccggaccagctggaggtacgacgtccacggcgctgcgacaggagaagacgcgcatgaccgcacgcatcttctcctgcggcgnggtgcaatcgaaattcaaaaccgcgcg

SEQ ID NO: 17077 - DNA, 997 bp, Oryza sativa
  unsure (1)..(997): unsure at all n locations
atcaagtagttgtcctatattatgcaagataaatgaaataattgtaagaagtaatacaaattggacgtaccgccacgaagtagtctcggtcacggtgcgtgggatacgcgtccgtgacagcggcaacgtgcggctctggggcgtctggagtgaaggtcacacgcgcacgagtgcgaggaaggtaccagcgaaggtagtcacggtagttctcctccgtgtgtgggaagagctcgttgatcacctcctctgtagctaacacccagtcgtcaacgtactgctgtacacgtggagcccaaagtgcgcctgctagctgtccccgtcgagtcaacctgtgaagagaggtaaattatatggctcgatgaagtaattatcataaaaatttagaaatgaacaatccgaactcacgagtggtcggcagggaggacggtcggctgcacgttgcccggaaacacctgcctaagtccgaactgtctcatcacacgctgcgggcagtgaggctcaacgaaaatgtcgaacaccatcggcaggatggtgagccagtaagcctggtcgcgtgtgcacaaggacgaaagttctagcggtgctctcgcagcgacggcctcttctgtgtacggctcccagatgacgtcgctcggctggagacggtcaaactcgaacacgaagtccgggtaaccacgtctcacctggacgtgagcgtaacgacgctgcaataaacatgatcggaattagacatgttatgtgaagaaaaaaaaaaagacgactgataaacttataacgcagcgaagttgcactaaccccacgtcgacaccagtaagtccccatcgtgggacggtcttttggccactgcgcgttgcgaccaaccccgtagggtgcgctgtccaccactggtcgacctatggcaaacctctcggctgcccaaagcggggatcctctaaagtcgacctgcgggcaaacaagcatgtggttattcaaatntacaaaggnntcaaaagcagat

SEQ ID NO: 17078 - DNA, 3271 bp, Oryza sativa
cgattttaaattaaaatttaaatgaagaaattcgcaaatatccatttaaagagcatataaacttcaaatggccatatcttggccatttgaactcggaattggaccgttcaagtctctaatttttccttaagaagtcaagaacccatttttgtgctttgtttctgcttgttatatggagtttagtagagtaaaagccttttcttttccgttggtcgtgtagacgctgcagcttcggaagatccgctcttcgtggaagttgaagccggcgtttgggaaagcgagcaaggcaagtcacatcatctttgaacatattgaatcccagtttgtaaaattatgttgatttaaattattgcattatcgctttatttaaattcccgcgttatcactgttttatttagccatgcctatttacctttgttatgaccttattattgttatcgttattatttctttgttcaccctagattaaacaaaaccccaactagtggacactctactcatggtgccactagtacaattataggtagatgcttcgcttttaattaggtaacattaggcggttttacaactctagactttgggaatattcatatcacctggacactgtggaattgttggagtattgtggaattggattcacactgccccctctattcaaaatccccaaaaatggtttaggctgggctcggggtgcatggttttgatagtagcacctcggccatataaggaccggtcttcgggcctctgttgcaaagcactaccgtacttccacatgtctagtgggtaaggcttagtttgtggctcagtctagttataaacaaaagtacacggatggaggtggatgaagtcgggggtcgatggacattctccagggcaaatgacggctacacgagctgcggcccggtagtcgagatgtcatggcacagggccggtgtcctgctgctaggggctcagtcctgcctgcctgtcccgggggttccggccgtaggtgggattgggtcggtactcttgtctatggctaggatgggttggaaactatgtcacgtcttccgtctgtataccgtggtggtatgtggcacgtggttacacgtgaggaagatgtgtcttgtgggtaaagatgtacacctctgatcagagtaaaatctattcgaatagccgcgccctcggttatgggcaagccgagcaatgtacccaagttagtgttttaattcttaaaacctgcttaacaactaaaatgtggaatggttggcctgggttggcttgggacgagctgggacccagggtcgggttgccagttcggtctgaatcatcgtaggccttgggttaagacaggttcgtgtgggttcacggccttgattaataatattgtatagctctaggatcgtatttacaaaatagcttgagcaactaagtgccttttaatgctgtttactgcaaaccctaaccccctatattatgactcccttgtactcccttgcatttattctgcacttgtgggtgtgtcttgttgagtacggtggttgtactcagtcttgctcaatttttcccaaacccagaagaggagttcctggaagatgaaggctttggtgtctagctcgtacctgccgtcaagcgcctgtggtcgtcaccctagtcttccgctgtttttcgtttgtcttcatgtgtgctgggccttcgccgcccatgtaataaattaattatttacgcttccgcttgttaaactctgtattgtatcaacttttggtgtaccttgcctcctgggacaaggaataatacacgcacgtaaggaacgcccgttgggttttttcggtcgtgacaagatgcaaagccgatatgcttgaacctgtcaaggctgaaatcaaacgtttgtatgatgctggttttattcgtccttgccgatatgctgaaagggtttctagtgtagttcctgttatcaagaaaaatggtaaggtgagggtttgcattgatttcagggatttgaataaagctaccctgaaggatgaatatccgatgccaatggccgatcagttggttgatgctgcttcaggacataagatactaagttttatggatgggaacgcgggatataatcaaatctttatggccgaagaagatatggataagacggccttcagattatcctggtgcattcgggcttgtttgaatgggttgtaatgactttcggctcaaagagcgctggaggtaggtaccagaggctattgaattatatatatcatgatctgatcggatggttggttgaggtcaatattgatgatgtggttgttaaatccaaagaaatagaggaccacatagccgatttgagaaaggttttcgagaggactaggaaatatggtttgaagatgaatccgacaaaatgtgcttttggtgtatcggctggccagttcttgggatttcttgttcatgaaagggggattgaaatacctcagaggagtatcaatgcgatcaaaaagattaagcctccgggaaacaagacagagttgcaggagatgatcggcaaaattaattttgttcgaaggtttatttctaatttgtctggaaaactggaaccttttacaccattgttaagattgagagccgatcagcaattcacttagggggcagaacaacagaaagctttggataatattaaagaatatttaagttctcctccagtattgatccctccataaaaagggattcctttccgattatatttgtcggccggtgataagtcaatcggctcggtcttgattcaggagcttgaaggaaaagagagggttgtgttttatttaagccgtcggctcttggatgcagaaacaaggtattctcctgtggagaaattgtgtttgtgtttatatttctcttgtactaagttgaggcattacttgttgtccaatgagtgcactgtggtgtgtaaagccgatgtgattaagtacatgctatcggctccgattttaaaatgaagagttggcaagtggatattttctttaatggagtttgatcttcggcatgaatcaccaaaggcgattaagggacaggctgtagccgattttattgtgggtcatcgtgatgattcaatcggcttggttgacattatgccttgggtattattctttgatgaatctgtatgcagtcatggttatggtatcggcttggttataattgcgccttgggggcaagttttgaatttgcctatgctattaaacaccgtgtgactaataatcaggctgagtatgaggcagtgttaaaagggttacagttgcttcaggaa

SEQ ID NO: 17079 - DNA, 1186 bp, Oryza sativa
  unsure (1)..(1186): unsure at all n locations
cgtggattgatanatctctatgctcgtttgcctgcaggtcgactctagaggatccccaaatatctttaaatgctgtttactgcaaccctaacccctttatggtataactcctttgtactcccttgcatttattctgcatttgtgggtgtgtcttgttgagtacggtggttgtactcagtcttgctcaatttttcccaaccccagaagaggaattccaggaggatgaaggcttcggtgtctagctcgtgcctgccgtcaagcgcctgtggtcgtcgccctagtcttccgctgtttctcgtttgtctctgtgtgtgctgggccttcgttgcccatgtaataagttatctaattacgcttccgcttgttaaactctgaattgtatcaacttttggtgtaccttgcctcctgggacaaggattaatgcacgcacgtaaggaatgcccgttgggttatttccggtcgtgacaagggtggattaatcataccgatcatatcaattccccaacctctaaaaggccacggtttaataataggattcatagccgatgctggcgccctttggatcgctccaaacttctgacaatcttgacaacctttataatatctgaaacaatcctccagcattgtcggccaaaaatatccagcacgtcggagcaaccacctcattttatgagccgactgatgtgtaccacatatcccttcataaacttcgccgattgcaacttttgcctgatcggcactcaaacatttaagcaacactccatcaatcgtccgataatagaagtcatcatccaataaagtatatttcaaagctttataacgcaatttccgcgaagccgattgagatgtattctgtaaatactgaaacacatcatatctccaatcatcggctgtaattgtagcaatctatatttcgatatcttttatcattggcttatgacggagcgtggggctcctcaccgggagaccgcgcaggcccccttttgcgggttcggccggggactcagggagagattctaagctctctgtatgtggaaggctcgcgagacaggaaacacacaagacacgggcgatgtatacaggttcgggccgctgagaagcgtaataccctactcctgtgttttgggagatctgtgtatgaaggagctcnnagttcgggtncggagtcgaaagcaatcaagcccac

SEQ ID NO: 17080 - DNA, 726 bp, Oryza sativa
  unsure (1)..(726): unsure at all n locations
agaggggtnatctagtggtcctgctaattcagattttgttttacacacccatctgtgtngatccagagcatagaatattatagtatgaattgagacatattcttttttgttaattgtgagatgtagcttggctggatctggagaatggtacgcgattttagaaatttagagaacaatattgtagagaatgtaacttaaggcgtagtacagaaatgcgaggttaacgcagttattgttttcatcaagcacaatgtcaagtaaggtcacatttcagatagttcacggtgaaggaaatattagatttggtccagatggtgttgatctgtcagattttgtaatgacatctaagggcatcgataggcctgcggagagaacatttcagtcaatttatagttggttggtgagaggatttagaatagaccaagaagtctacacaatgtcagtgtcagttgtagtgagtcgtgcaacaaaaggttatttttggggactaatgccgatggacagcactaatgcttggaaacggtatgtggaaatggcttttgaacggtcatggcccctggtaatatttgtgtcggtacaagagaaaaatataaatgtttcaatgcaacccgaagatgtagagggtcctatcaagtgcagggaatgttgtgtggaccatcgatgcaaaatgaggaaaatcaaccaagggaggagcagactatgggcatggcggatgaaggggagaag

SEQ ID NO: 17081 - DNA, 701 bp, Oryza sativa
  unsure (1)..(701): unsure at all n locations
cgagcttataaaactaatggagcatgcttgcgcatgcctttggtcgactttgcagttgcccccaanccctagccgaccttgcgagcattctaccgagtaacaccacaccgctcattgtcagtgatgctggctttaaagtgccatggtataaatccgttgagaagctgggttggtactggttaagtcgagtaagaggaaaagtacaatatgcagacctaggagcggaaaactggaaacctatcagcaacttacatgatatgtcatctagtcactcaaagactttaggctataagaggctgactaaaagcaatccaatctcatgccaaattctattgtataaatctcgctctaaaggccgaaaaaatcagcgctcgacacggactcattgtcaccacccgtcacctaaaatctactcagcgtcggcaaaggagccatggattctagcaactaacttacctgttgaaattcgaacacccaaacaacttgttaatatctattcgaagcgaatgcagattgaagaaaccttccgagacttgaaaagtcctgcctacggactaggcctacgccatagccgaacgagcagctcagagcgttttgatatcatgctgctaatcgccctgatgcttcaactaacatgttggcttgcgggcgttcatgctcagaaacaaggttgggacaagcacttccaggctaacacagtc

SEQ ID NO: 17082 - DNA, 762 bp, Oryza sativa
  unsure (1)..(762): unsure at all n locations
ctgcgcnagtagacaacttgttaggaacaacggccaattttattatattcaaagtgtcaataaatagaaattatcatttataattaagatatggcctacttaattgtttttttttttgaaataaataccaataatcagttgtgaataacatattgcctaattaattgtattcaaagtgtaaataaatggaagtaaccatttataaatattatatgggtgaaaaatagtaatacattacaaattaagcaggtgagaataatatattgatccaaattgttcgaccttcaatacaatacaaataatttacatcttccatcaaacaacctaggtcactgttttcctcacgtactttctactcactattgttccttcgctatgatcgttgcatgagtatggcgtgtccttcttgatagtatgagctcgggtccaacgtcacttgaaacggaaggttgccctcaaacagatcgtaattttcgtcagtcttatcctcgattccacgattttcctcctgccgtggagaccaacatggcgtcttggctcatggggccctttcccttctttgggttgctatccatgttcttcacgtaaaaaacttgtgttacatcattggctagaacgaatggttcatctgagtatcctaccttgtttaggtcatctcgctgtcatcctgctgtcatcaatcgttacgcctccaccggtcagcttaacccattggcaccgaaacagagggactttcaggggtccatactttattttccgggg

SEQ ID NO: 17083 - DNA, 3115 bp, Oryza sativa
  unsure (1)..(3115): unsure at all n locations
acccatttacacatatacatatatactccatccgtcccataaaaaaacagcctagtaccgaatgtgacgcatcctaatactacgaatctagatatacatatgtttagattcatcgtactataatatatgcaaatatatatatgttgcctctggtttcgaatgtatgtaactgttggccagtacaacaaaaattttaactgtgaacatcaataaacattaaatggttatacgtcatgacatatggaagttttatggctattttgtttattttttttaaacaaaccaacgttatataaaaagaaaaaaggtatatttttttctttaatatatgtgtccatgagatgagacgatgacctcttcttccctctagctggatgctgatgtttccattgcgatgtgccctagctatgtgtgggggagggaagggagggcagttagtagctttgcaagctagctgatgggtggataggtcatggtaatggcaactgctttcattagaaatgaaatgaaagaaagaaatcaagaaagaaagaaatcgagaataaaaaatattgagataggccaagatgaggtgtgacaggtgcctctcttgttggtgccttgccatcctatcccatgttgacgactcatcatcgatctcgatcttgtgtccgctttgactttgtgttcctcctgttgctcctccttttgcatatgtataatccactgcaaaattaaaatatagctgtgtgtatatattagcatatgcgcacgtgacgtgacgacgtctggtttttctctattccttccttgatgttgttgtcacgttaattttaataatttaatggttcttggtgtacttcctgatacctctaaattcttttgttggtttttattatatctgcgtttgtgcggtaacttcttgaccgcaaaacaaaattgaagttatccaaaatctcgaaaatttttaaaacacaaccatacggatgaaaacatactgatactgattggaattgaacccgacagtaattctgaaaacattaaactatatataaaaaagcacgtatctaacttaatatgactatattatataatgatataaatttaaagttacactatgtaaattacaaaatattacccctttagccatatactcaaattagggatttggttgagtagttgatggaccactaaagtatgggccaaatagtaacatgaaccacagatactgggtatttagaaatacagtaactattgtattgtagaaatagtaatatccataaaaaagtaaagacaatgaaatggttggtagaacagttccgtttctatatttctttaccatttatattttcattctgtttggttaatattttcatataattcctttggcaagagttaattgaaatccaccacaattttgatagggtagctagggacggaatatatatatgttgctcgatttgataggaaaatttgtgttatgagcatatgaacattgattgatgttctttttttgttcagagaattaaactaaccctacatctgcatgcttcactagagaatattcttcgactctaaacttgaactttctcatttttcgttagtatatggttttttgcaaaagtttttttttctaaatagaagttgtttaaaaaacttaaataatttttttaagtttataattattaatacttgattaatgtgctaatgagttttctcgttttgcgtgcgctaaaattctatccccaaatgaggtgatcgaatggagctttcaaataaaatctctcatggtccctcaataaaaaaaaaggtgaaacttgccggtaaaacgaatttgaaaatctccagaaaaccactcacctcatcacctatctctgttaatttctgttttgtttggcttggctttccaatggagaaaaaaaactaaacgaaagacaaaattgtaggatcgaaagacaagaactaagccaaccagaggggggtgaatggttggtatacccaaaaaccgaaaacttttagcggaaataaaagttatcctcgaaatcgacggaagtcggtctgaccgagattgatctaccagtctgaccgaagcgtacccgccggtctgaccagtgttgatcttccggttggaccgccctggaatccctgtcgcgcctgttgtcaccgcgggtctgaccgcggttcacccgccggtctgcccgtcgcgatgccgccggtctgaccgtcggtgtgtcaccggttagaccgccgaaaccgggcgaaacacaaatcaaagaactctaaaagtggatgacgactttattgattctctcggtgttaacaaagtgcaccaatagccctccttagaaaattttcgactaaactcgaaaccctaactcaaaactcaactcaattgctctccaaagcgatagcggaaagaacacttggtacaaacgtacacatcgtgctcaaaaaatccaaaagaaaacttatccccctttttaaaagaaagaaattcccaattgaaccaaaaacatgctcttctcaacaactctccaaaaattcaccttgctcacattacttctcccccttttgacaatgatttcatcaagcataggaattatgttcattaatgttcaagagcttagtacacatatagcatatcaagtcatgtgttgcaataaaaagaagataaacccatctataatataacaagcatgcattaaagtataaccatgaaccaaagattttacaattaagcttgaatcaacaatcaaaattcatgatttcatatgatttataatgcaacatcttaacaagcacataggttgaagaataaacactaaacacatatacctattgcatttatcactctttctcaaataacctttagcacaaaataaccaagagaatttttttaaccttttcttttcttgagcctttttgctcatatttttctcttttattccaggtacgtccctgtcgtcaagactgtttccagggattcggctccaattattttgctcacatcgaatacgtccttgtcgtcaagaccgtttccaaggattcggtattcatttttttcatatttttttattctctttttcacaatgggtaccaaggtgnttntccattgcaagccgaattcaaaccatcg

SEQ ID NO: 17084 - DNA, 973 bp, Oryza sativa
  unsure (1)..(973): unsure at all n locations
ccgccatcggcaaggcaaggcaagncggcgtgagggtgttatcggtcaaagttgaaaggggtgacggccaaatcggccccctagcccagatctggccacccctgtcctagatgaaggtgcccggtgaccaaccatgggggtggccgctggcagagcagtggtaaaactggtgaaggtggagttgtagggctgccagtgcaggagttgtaaggacgggggaggtggagttatagttgaccggcgagttggggcccggtagaggtggaaataaagggggattgatgaggtggagaggtgctgctcgaggtagagttggccaacgagtgcagggctaacggaggtggaaatagagccttggcaggcaatgtgtaggtggccagaagaagtggagaagcagacacaggcccgccggtttaggaggtgcaagaggcaaggcacacaatttggcactggcaggaggaggctggcgaggtggtcggcggggtgtagtaggtgccggtaggtggagttgccacatggagaggctgttctttggctgatcgatcgttcgttgttgcaagtttgcttgtttggaaagctgcgggacacgatgaacaaatgtgtggtcagtgacctggtcgacggcaagggatccccataaccggctgaagttctcttctcctgttccttggaaccccttcccttctttgactagtctgtttctagactccagtcaaggggtgcccccatgataaggagagagacgcgggttctgttggagggtctgcttgtagagaatacgatgttgtcaatctgtttgggtttgaaagtttttgggcagcgagggtgttgtttttaagttggtggggcatgaaactcttggggacaacctttggttgtgatttcggagggagttggatctacttgaccaggtatgacaagcttgggataataaacccttatttttatattttggaagcgtcaagggggttgg

SEQ ID NO: 17085 - DNA, 756 bp, Oryza sativa
  unsure (1)..(756): unsure at all n locations
cgtggcannagtacgacgtacagccgccgccngcacgncgactctagaggatccccccaacagcgtccatgtgtaatagttgtcccggtgcattcgtcatcacagaaacaatttgatcttgtgaagaagcaaccatcttagcatgatgacatggggtacaaaccaaatgaagatctttcttaagtttaggcaaaccacgaacaagatccaaaccacttaacctagtgagatgatcaaaaccaacatgtgcaagtctacgatgccaaaacatcacatctttatcaaacttagcaaccaaacatgttatcacaggtgaaccaagattttcaaaatcagctttaaacactcttccatagcgagaaatattcaacacagaatcaccacaagaatcaaaaactttacttccagttttcttaaagtgaacctcaaaattttcatcaacaatttgtgaaaccgaaagcaaattgtactttaagtcctcaaccaaatctacattctttaattcaaatttttcatttaccttaaccaaacctatagcgagaacgacacttgtagaagcatcaccaaagataatcgattcagtcttggatgccttcttgagtgaggagaaccaatttttatcaccggtcatgtgccgcgaacaaccggaatccacgatccacacgttctcctttcttgccaccaaagcctacacacaagcagaagtcgaagccttagtactgggattagatgataataaaaatttaggatccagtc

SEQ ID NO: 17086 - DNA, 1930 bp, Oryza sativa
  unsure (1)..(1930): unsure at all n locations
agcgaaggacggcgcttggccccgctcaaggacaaactgtggtttagcttccaggcgaaggcacgggtcgagttcaatcaagatagggtgggtccccaccgaaaaaaagagtaggtagaggcggtgcatgtggtatccccttgaggtataaaaagaggactttgcccaccgagagagaggacgactctcaaaaaacctgagcttgtggaggagggaagtaagagtgttctgccgagtttaggaacccttgtaactctcagtctaaatcccatacacaggagtagggtattacgcttgatagcggcccgatcctgtataatttggttgtgtgcgagctagctaggagccttggggatggatacgcgatttctagaggcgagcttcttccctcggccgaactcacgaaagggggggtctcacgatctcccgctagagaggatcacccctcgacaagcggaaataaaagttacccggttagaccgccgaaacacggtgaaacacaaatcgaagaactctaaaagtggatgacgactttattgattctctctgtgtttacaaagtgcaccaacagcactccttacataaatttcgactaaactcgaaaccctaactcaaaactcaactcaattgctctccaaagcgataccgggaagcctcacgctccccctctatttatacatgaggcagacagcctaaagccacgaaccaaactcatactaggagtcctaaacaccttatgaaaccctctagtacaagaaagaaactttacataaccaatcgtaccaaatttggactccttccaaattcaactccgtatcccatacgcacacaatacctncattgtatgccatatggaatctncatcaaccacgtgcatcaactctagtctaagtattccgcatgatctctgaccaccacggacgtcgtcttatccccaagccgattctcgatccatcaccgcaaatactctcccgaagcattgagtcatctacacatgaaataaacaaagaaaccatattccaagaccaagctatctccaacttgactcattagtagcaaacagtagtattacatacgtatagtatccatctagaagtcataatcatgaaataatcacggatatccaaacaaacaacccgaaaccgaaactgacacagcgtcggccggtcagaccgcgggctgcgccggtctgaccgcgcattacacgccggtctgaccggttaccaaagcccggtctgaccggtcacataaaatgacgaatcctgcgatcacctgtgaaatccaatcatatctaaaaccacttcatgaataaattctaaataacaaaaccaataatctccaatgtcaattgttcatcacagaataataaacaaaaacacctttgattttaaaaaatgtacacatggcgagtggcgctgtgtgaccattgtacgtatacgtaaggatgacgctcttgttgatgcaacgaccgcacgtatacgtaacgctaatgcatgaagcatgtcatcagagtagctaattaaaaaattgccacgtatcctcttaattaatcgcacctcttgaccactatacaattaattaactcagctaaatatactgcttaatgtcatccactactgttgctgctggaggcatatatatccatatgcatctatacttgtatgttactgtatcaattgctaaattaatgacgcatcatgatcaatattgtaacatagtgattaaccaccacgtgttagtccattcacaattagatcttgtttggaagattgccggagattcttaaaaacatctagaagagatgtgtttttcagcttttacttatctattggttaaataaatttggaccatttagagaacctcaggagattttggaaaaggggatcatctagagtcgacgtgcaggcatacaggatagttattcaaccgt

SEQ ID NO: 17087 - DNA, 764 bp, Oryza sativa
  unsure (1)..(764): unsure at all n locations
catactttacttttactttcaatacaagcacgaaaaaaccttttctaaaccgccggccgcaaattaaggccgaggcggttggaaaaggaagactcctcacccccacgaaacgtaaccgggggctccgggccgggtccggggatatggaaggggtaacgtcgagcgtgcaagcaaaaatgctttcttccccccaacgccgccatcgtacgcgctggtgaatgaccacctggcgggggtgaccaccatgacgggccaaccacacagggagaacatcgaggtgctccacctccggacgcggcggtggaacaccgtggtggcggtgtacgtccgccacctgaatgccaccaccacgttgctctactcccacggcaacgttgctgacctcgggcacttctaccagctcttcctccatctctctttcaacctccgtgtcaacgtcctcaggtcagtcaactcactcatgctcgctcacttccttgcttgcttccttccctctcctacttcatttgcttccttctcctcctgcgccacgcggcgcgtgcgttggggggggggggggtgggcgtgatctgtgtggtggggtttgggcgccccagtacgtggcttctggggctcctccatgactgcggctttctcgattcgttatgtccggatgggaaatttcatgttctactctgaaattttctgaaattttccctctttttagatggggatacctctagagtcgacgtgcaggcatacngaatgagttatatcaatctccg

SEQ ID NO: 17088 - DNA, 2792 bp, Oryza sativa
  unsure (1)..(2792): unsure at all n locations
cgacgaaaaagataaaaaagaaggtgagactaatttgttaaaaacgggaaggagagaggtagaagtattttaattatagtaaaaaaagaagataggaactgcaggtggacaacctaggaggacaagagggggaccaagagaggtgggaaagaggagaggaagaggggcggcatcaacacagcggccacgtcgagagagcaacgatgaataagatttaaatgaactggatagaggggtaagaggagtaagatagggacgagttgggatataaggtaatggaggtgaattcntgnaagttgatgtaggaacggtggaggtatgaagtaggagagacgatangggggggcacttacatattttcccccataggatcctaaaaactagggatctttatcttgcagaatacgacgagatggagaagtgccccaactggaaatttgtgtgggagaataaagctcctatgaaagttcagttctttgcctggctcttgactaaagatcgtttcccaataaaacgcaacttgcacaagaaaaccatagtaccggctccgacctgtgaactttgcaactctgctgatgaaacagccctccacctatgcttccagtgccccttcgctgtgaccctctggagcgcgatgaatataccggtcaatgttgcgatgcttgttgagattgcctcaagttcccttgaagcactttagggtgttctacttgctatgcttttggaacatgtggaatcaccgccacggggttgtcttctgacacgaggcttcttctttgcgccgtttactagagcagtgtatcgaggatgccttcctctggggggaaagaatcaaagtagaggagacatgtaatttcgacctggaaagatctcttttcttcctccctccactctctcaatatgtaatgctctagactttgtaaaactgccctttgctccctttttaatgaattcaggtggggaagctctccccccagcgaattttctaaaaaaaaaatgggaaggatgggacatgcctgagtttatttccataaagctggacacaccctgatccaagagtgtcaggaaactcattttagccttggatgctctgcatcaccttcttcaactcgggagttctcaagaaaaattaaagttaggttgtgtttagttcagcgcaaagtttggattttggttgaaattggagatgatgtgactgaaaagttgtgtgtgtatgacacgttgatgtgatggaaaaggactgaagtttggatccaaactttggatctaaacacagccttattgtaattcatcagcgatgttccttaatccgacgtgtcgacaccattgtcaacaaatcttgaaagagaaaattgacatttagccatcctcgggttggggtttcgctagaatgccatccccgaatgtggcttcgttataatgccatcttcaaacgtcaccatcttgccatattgccattcatccaatttcagttatttgcaaatgttaatccgctttgatctgacttttttgcccctattgctatttcgttgacttgctgggagggacagatcgatctccatccagtcgtcttcttcctctagtagtcgcagccggacggcaagcatagctcggacgtgctcccggtcccagcgctatcgcagcagagctatagcagtcggctgcgcatcttctccggcacggcgaacccgacgctggcgcaggaggtggcgttctatctgggcatgaagctgggtagggtgaagatcaagcggttcacggacgggggaagcgtgcgtggttgtgacatgttcctaaggcaggccacctgcccaccacccaacgagaacctgatggagctcctcatcatgattgatggacggcccccgcgcatcttgcggtttggggggcagcagcagcactagtatggctatcgatctcgccagccatggcggagctcgccattgaagagggacttcaaaatccacaacagaattaagccgatttgagtgggatttgtggggggaattgttgaggaggacgagaggaactgatttttgcattcaatttggggcgagagcaaccgaggagggagatcaagagagggcattgttgcatgagttcaccggagggagaaggatggtggcgggcggaggtggaaaacgctcctggcgagtgggccccacggcggaaggatcttggccggtgcgtggagtggctaaagcaagggcattttggtcaaaccaaataagcaaaacaatgaaaaatatttgcaaataactgaaattggctaaaatggcagtgtggcagaatgggggcgtttgaagatggcattataacgaaaccacatccggggatggcattctggcgaaaccctaatccgagaatggctaaatgtcaattttctcatcttgaaatggtttggtgatatgacatacaagcagttgagattataggcatataatgatttaatctatttcataaataaatcatgacattacagatgaaaactagcatgaacgcatcattagatctacacatgtaaactacacagtataacatgaacagatcaaacatgcgcaacatattgaacacgtaccgaggtggcggaaagaccggctgctcggtcgaaacttttcgcaggcgtctatgaaggcacgcagcacgcgagcgaagaggaagacgagccgtcccggacgaacagggaccagtcgtgcaaagcgcttcccaaaattcttattaccgccttctcccggtgcaggggggatcctctagagtcgccctgcnggcagcaggcatagaatctcaacgcg

SEQ ID NO: 17089 - DNA, 1857 bp, Oryza sativa
  unsure (1)..(1857): unsure at all n locations
taaacaaaaaatnccactgaaaatgaaaggggtagtanaatgaaatgactttcattcccttcncccttttccataaagaatcttgcctccttantctcctgtttctttctagtggctaaaagaatcaatccactttagtttggtatcgtagtccgtctgttattcttgtacattcttttgccaaaaaaaagtctgcactctggttcaacctttattctattgtaatatgttatctccaatttccaatcattgaccactgtctgattttatttgtaacctgtgcagtgagattaacatccaagaatggtcttgtcggtcagtcaattgaaaaggttgacctaaaccatgttgatgatgagccctttgagttgaccgaggaaattgaggcccaaataattggaaatcttcttcctgatgatgatgacctgttatcaggtgttgttgatgaagttgggtatccaaccaacgctaacaaccgggatgatgctgatgatgatatattctacactggaggcgggatggaactcgaaactgatgaaaataaaaaactgcaagaatttaatggcagtgctaatgatggaattggtttgttaaatggtgtgttgaatggtgaacatctataccgggaacagccttcgagaactctttttgttcgaaacattaatagtaatgttgaggactctgaattgaagctcctatttgaggttagttacttatttcttcttctttgaatcactcttctgttacaacagatttgacatctgagaagccatctgttcttctatgcagcatttcggagatatccgtgccctttatactgcctgtaaacatcgtggttttgtgatgatatcttactatgatataaggtcagcgctgaatgccaagatggagcttcaaaacaaggcactgaggcgtaggaaacttgacatacattattccattccgaaggtaaccatcaaatcatcaattgccacttaactgaaaatgcttatctgcattttctgttgcctgtgcttgtgcttagaatgttattattctagatattcactaaaattgagcacatttgcttttctttgcccacaggacaatccttcatagaaagatattccccactgaactattgccctttgtgacgctgacctatctttaacaaatgatgatctacataagatctttggtgactatggtgaaataaaggaggtacgatatttcatttgctgactactattatagctagaaagtatgactcactagttctatttgcagattcgtgacactccacagaagggtcatcacaaaataatacaattttatgatgtcagagcagctgaagctgcacttcgtgcattaaacaggaatgatattgcaggcaagaaaatcaaattggagaccagccgtctgggtgctgctaggctgtaagtcatttgggtcttgtcaacagtgataatactctgtttgctgttttctttttagttcttactactactttcttcatcacttttataacatacatattcaccattttaacatttttgacatactagctgaatgcccatacattgcaatgggaattaattattagagaaccacactgcacactctaaagcctcaaaaattaatataaaactatcctcaatgtaaatcttagggtcatattttttgtcggtcattttcacctccaatttgttttccctgttagacggcttgaggttaggaaagggacaaaagtccaccaaccacactgtttgggggactcacataccagtgttggtgggtggtgggtggtgccagtggtagagggggatcctctagagtcgncgtgcnggcntgcaagtagaagatgttcatcctncacag

SEQ ID NO: 17090 - DNA, 2206 bp, Oryza sativa
aaatgcatttctctgagtattttaattgtagctattgctttgactgatttcaatgctctctatcacagcttgtcgcagcatatgtcttcagaattgtgtcaggaagagtttggtgtatgcaaactgggaggtccaagcacaagtagccctccaattgcttcgtttggtatgctgttttcctttttcatctcaatgtatgttttgctgataggtgcattttctgacacggatggttatattgcaaggttctactaatttggcaacaataacttcaactggtcatgaaaatggaagtatccagggtatgcattctggacttcagacatcaataagccagttcagagaaacatcttttccaggcctatcttctaccataccacaaagtttgtccactccaattggaatttcatccggtgcaactcatagtaaccaggctgcccttggtgagatcagccaatctctaggtcggatgaatgggcatatgaactatagttttcagggtatgagtgctcttcatcctcattctctgcctgaagtccacaatggagtgaacaatggtgtcccttacaacttaaacagcatggcacaagttgtcaatggaaccaactcgaggacagctgaagctgtggacaacagacatctccataaagtgggttccggcaacctcaatggacattcatttgatcgtgcggaaggaggtaatttgtatatcctaatctcctttggttgaaaaatctgttatgttaagaggaactgaactatcctaggatatgttggttccatcatgggtcatgccatgattttggtgggatgaaatcctcgttttctataataacatgcttttgtgggatgaggtggtgatcgaccaaacacattttgtttctcaaaccaatgaaagttgtgtaatgtttggatgaaagaaaatacatttggatcaatctacaggccttatatgttatctaatcattccttgaatgtgtattttttttttcacttgcagctcttggattttcaagaagtggaagttcttctgtccgtggtcaccagttaatgtggaataattcaagtaacttccatcatcacccaaattctcctgttctatggccaagccctggatcatttgtaaacaatgttccatctcgctcccctgcacaaatgcatggagttccaagagcaccatcgtcgcacatgattgacaatgtgcttcccatgcaccatctccatgtaggatcggcaccagcgatcaacccatcactttgggataggcggcatggctatgcaggggaattgacagaagcaccaaatttccatcctggtagtgtgggaagcatgggatttcctggtagtcctcagcttcactcgatggagcttaataacatataccctcaaactggagggaattgcatggacccaactgtgtctcctgcacagattggtggtccatctcctcagcagagaggttcgatgttccatggaaggaatcctatggttccccttccatcctttgattcacctggtgaacggatgaggagccgaagaaatgattcaaatggtaatcagtcttgataataaaaagcaatatgagcttgatgttgaccgcattgttcgtggtgatgactcccggactacgctgatgataaagaatatcccaaacaagaatgtgtaacaactggtaatttaggttcatttttttttcttgcctttgccttcttttctgtcattttcatggatttctaaatgacttgggattccaggtacaccttaaagatgcttctagctgctattgatgaaaatcataaagggacttatgattttatttacctaccaattgacttcaaggtgatctagatttatttagtatgcaactaatacatcatatttgttcagatagtcttgcctaatcgaattactgaatgggatgtgtcctacttttcagaacaagtgcaatgtaggctatgctttcatcaatatgaccaatcctcagcatatcattccattttatcaggtgagagatactatctatagggcctgcccagctgagctggctgcaactgcatcacagccagctgctgcccgaagcagcaatgccagtggcttgctcctgcagccagctcagccaagagaaaccattatcaagtgctagtcgcatgaaggcaatagcttacgttctgcatgcggcttgtcaactttggacattgtacattat

SEQ ID NO: 17091 - DNA, 3150 bp, Oryza sativa
  unsure (1)..(3150): unsure at all n locations
ctgtcaggtgacaacttctccaccaacanggagttaaagcagcagatgacacttggacacagtttgctgttttatggcaagttcttttttgttagcaggccttttctgctgtatttgaatgtattttatcacaaatagacctatattttgtggttgtttctgttctgcagttccaaatttcatgccacattgtgggttccttctcactctcttttttcttttgcatgccatgtcatggtctctttcctatatattacagttgcaagcaccattccttctcatttctttgggaactagaagataatagtatctgttacttattattctctcctaatggcactgagtttgctccataatcactagtcattcttgtttggtctttcagaaccttttatgttagctctgaaaggtttattgttccatgcagattgctattcctttaactatatgattaacaccttttgtccttttgttgtccattaggaaccattccctatgggtacaaacatccgagccaggtcagggagatcgcgagcttcctctggcgaagaaagccaccaggacatctcaatcacctcggttaattgtgacacttctaccaatggagttgatactacagggcctgccaaggactgagtaacacaactgctctggatcactaacccccaaatcccaaatcataacttttgcgacgcggtttccatttcccagttttccgccctttttcccccaactttggtttttttggtatgacccccaatctgtatttattaacttccatgaatgcgggttaccgaagacttggctagattgctgcaacattttgtccctgatggaaacatggatagagagacagagagggtgcttccagtttcccctgaacctaccattatcatattaacctgaaggccgagaaaggtgaaaggcgcagcgagagcttccagattttggtcactttttaagaatgtattaaccccatgttgtatagcagtttccagtaactgtgctgaggggagagagagaaagagaggagagcaaggagacaatttacatgagtttttagtggtggtgtggagaggaagtctttccctgcattttcttttggaaccttttctggcgtcttcatctatgttccattttgagttgaggtctcctcttttaagttgtgtgcagaggagttccgattttgtcttcagggaactttgaccgtatctatcgaccttcatatgtaaatcaacatctctatatagtttgtgtgccctctgttgtatgcctgcggccccttgcaccaaacgaattgtctctctaactcgtgagattgctgtcctcgtttggtcgtattacatctgaatctaagcatttgatgttacgcaaatacatgccaatggctgcattgcgacatgtagcagacggccaatgttcaaacaaaaatcttaacttatgaagtatactagtacctccatcctaaaatataacaatttgggactgatgtgtatatcctagtccaatgaatctggcccttgtctaaattcattggactggatatgtctcatccactttcaaatagctatattttgggacgacactttcaaataactatattttagaacggagggagtaaataattataaatactagtactatcaatttggcacatggtgtcaagtccacttggtgcatggtcatctaggcttccctttggtgcctctcttaagaaccttctaagcgtttaacacaaattaaaatcgaagtaagaatctgacacgaattgaattcgaaatttgctctcacaatgagacaaaaacaaaagaatttggcgaatacagcagtaacgccgtggacgaagacaataataatagtctcggactcgggagttgttcagtcagtgtccgtcactgggggcccgtgggccgagcccgaagaggaggtgaagggtccagcagtggaggcccagctgctggaacgtggcgtcgccccggcgaatccccccccacgccgcgccggcgaaccgcaccagccggaacgcccgcctcccgccgccggccgccgaaaccgagtggcggtgtcagtatcgaaagagcgcctccaccgaccgtgccgcaccgaactccttctgcaccacccgcccgtcggggaacctgacgcgcacactggacgcctcctccccctcagtcgccttgcgtagtccgacgccgcgtcgccgtcttcctcctccaccacgttgctgttgccgagcacgggcctgagatacccggcgtcttggaagaagctctccgtgcgcgcaaggacccgcattggcgggcggaccacgggcaccgccggggcgnccggtgncggtggcgtgcccgtnaaatgcccgtggtcgtcgtcgtcgtcgtcgccgtagagcctctcggtgcgggtcgggatgggcgggcggatggggggctcgtcgtcggcggcggcgaagtagagggcgagggcgtcgtcgaggctgccgcggcatgatctgatgtggttagctgcggcgtctcgactgtcgcgcatggtgatgtccatgaaccgcgcgacgaggtcgtccatgtcgcttcccgccatcggtgatggatggatcgttcgatgtcgctggttgatgagttggttttgcagcgcgggcaaagatgaaaagttgacactgacacacacacagagagaaacttgctgatcgtggaagtggcgggcaaggggtgtaggctatttataaggattgaagagccctgatatattgattccgacttggattggaggctgcacgagtgcacggtcttctctccgactccgactcggatttgaggctccgcttcgtcatctaactgttgacgaggacaccagacgaattctgacacgatacagtccgacactatgacatgccctttctggtcttaataatccaataagcttgtattggctgcaagcctctgcaaatgtaccttgccttggccttgtgcacgtggttattagctgaaatttaagcaagaatcttggagaatatttgccattctgtacctagtatcgacttcgaggcttgtgttggaantaatgaatgggccctagcccactcgaagattacttctttgaaaaatcacaaaagcccacctcatgggatgacatgcctatggagtttagtatacc

SEQ ID NO: 17092 - DNA, 590 bp, Oryza sativa
acttggtccagccaagccatgcgcgtcctcgtcgtgtctgcttccccaaccaccaccgtataaaggccgcgccaccgtgaccgcgtcggcgtcgccgccgccaccgccgcccgccacctcgccgccgaccagacgagccgccgtttgacccaacaccgagctcccgcgcggagttgatgtccatctccccttccgaatccaccagaggatcccagccgctcgcgccgcgcccttccaaccctagccccggaccccgccatggcaacagctccgccccaccgcgccgccgcggccgacgctcccctacggctcccgtctcaccgccctcagccgccggcgggagcggcggcccgagctccggtgagttctcgcttcccgcgagctccctccctcttcccccttccacggctaaacgtcgattgaaacgataggggattatcggcggggcttgcagatctactgatctagatagctggactgggttggttggggggacgaggattgtgggaagctttttacctgttaattttgcaggttgtagagttgagcccaagctttgtgtagaaactctaatacctttttggtaaatt

SEQ ID NO: 17093 - DNA, 4979 bp, Oryza sativa
atgttttgatttttttgaaaaaaaccgacacctataattgcttaaaggtgccggttttttgcgatttcaaccagcggaagtgtggaaaggcctatagatgccgattttagcacttccggcacctatagtgctgacacctatttgatgttttgtagtagtgcccggctccggccttagccccgtagagtcatccaaatggaaaacggggacccgacaggtgagcgaggcctcgcatcgggcggcaacatggagaacatggtgacatcattggatggcaacaagcacttgtttgcatggctggttgtcgacgaagggatggaggcacgcccggcaacccttccttggctgggaacgaagcaagtgacgggaaaaaggagaggacatgcggagacatccagcaaggggaacaagaagtcgatgacctggcatggagggatggaggccggaggagaggacagtagacgacgaggagggagagcgcttctcgctccaacggtgtgaccgcttctcactccaccgcttttggctcatgaatctgatgatgacttgcggcacatgtgttggggagaaatttcgggataggataaggggagagttccttcttaagcctgatgggccttattttcataacgggttatcactattgttgaatagtcccacattgcttgtggaagggcaaaggatcttttttataagtaggggagcccctcacctcataatctagctttttggggtgggaaaggccctttaccatcctataattggtatcagaacccggctagttcaacatttctggcccgagggacaaaaggtgtaaaggcctgatgaaccgggggtgcctgcggggcccgtatacctgagggaccatggggaaatggtgaaggggcggtgaacggctaagggacaccaatgtgtgaagggggagattattaagtagtcccacataagttgagaaagggcaaaggacgtaaaatataagtgggcgagcccctcacctgataggctagcttttggggtggaaaagccctttatgatcctacaactatattttcactctataatgtaatcctaaggcccccgcggttggagatgtttccctgcccccggctccgcatgatgtcggtttcctgcccccgtatcacctgcgagtagcatttcgcccccgtccctggcccggtaggggcgggtacccgcgccccccacccccaaacggggaaattgccacccctagtcaaaaaggagagctaacgactattgacggtcataatagaccaatttcgactgtcaatacatccggaaataaaagagaattagcaatatttgtatgcatatttgtttaagaataatttatttccacttgtacttggcaacgtatttgtatataggcgatcttcatataaatggaggagaaacgatggaaaataatcgttcaaacaatcaaagctcgacgtgtggcagacttaatggatggatgggcccacaaacccattagaacacctgtaatttggcccaaccatcatgccactaagctaaggatccatcaagcgaagtccaggagaaaggatgtgccagcccaaggttcagccgaaaccgccaccagcgccgttcatcctggccttccacgtggacatcctaaattgcttcccaatgatgtttgcagggtgtttaggacattttcaactatcataaccatcattgagcctataaaaggatcactacatctccatttcaacacacaccaagaaggatcaatcaagaaactctctagttatttactttgttctaatgctagtggagtagaattagaatagttttcttagttcttcaagtcttctagagatttcaggtatcgctctactagctcctctctctctcttgtaagacttaattcaataatgaaatattcttctttatatagttttgttcctttacttcatttatataattattcgagtaccgactttagttcatacttgtctcgtaataattatgtagctagcttactagagatatgcaatggtattggtttggtaatcaattatttgattgttctatgtcatctgcagagatatagagtagtatgtagtaatgtaagcacaatgcttagattattagataccagtaaatggtgctatatgtacggatctatagaggtaggctgctgatggtgacatcttagtacatgtattcctccacgtgcgtatatagggctaagagattttcctagtgtgggtactcctccgtatctattaccaattggatggccatgacggataaggaactcggcaattaggcgtgatttctcgatattacaggagggcatagttaggggtattggctgcataattgtataatagaaagtgttaattaaaatgactatatactataagtacaggaattatgcttttctatttctttctccaattagcttagactattatttcagtgagagtattttggttaattctttttgtgtgtcaatcaacccttgtccttaaattgattaacccctgtattagattttgatcaacataagtgatataattgttattataatactctcttctcatatctttccttaggactaaataaaatacgatcccttggaaatacttccggatgaaatgctacagcagtatattcgagcgtttgcagattatgtctgtaactataaagaataataagtaatatttcgggcataattgtttggaattatatttctagtaattttttaagaaatattaagaacgacaaacaagaaactccttcacctgtgatttttgttgtgtgctgagctggagggaaatgatacttactaataagaaatcaacttattttaagatggaaggtgcatattaataccatgatcatatccacaaagaattgtgaactataatgaaaaaggaaggatctttcgatcttagcaattagattcacttgttaggtataggcctataatccaaaataaaaacagacaaacatgcccttagtatctcataatatctttgtgtttttttaaagaaagacacagacaagctggttttcttaaacaataagctgttgcttatgtgttctacccacgtgctcttaattatatggtgagcatggacactcttgattgtcttaggaggagtgttaaggctgtgtccgggaggtggaatttggaactccatctccccacactgaaaatgtggtggtttattaatgtataattaattaagtatcagctaaaaataacttaaaatagattaatataatttttgagacaaatttggtataaaactttttttaaaatgtaccgtttagtaatttgaaaagtgtgtacgtggaaaatgagaaagattagttgggaaatagaagaaaagaacttagagcaactccaacagtccccttatcccaatctccaagttaaattttagcaagtttgaagaaaaaaaaacactccaatagcttctctatttgactggccaagccatctagctggccaaaatggctccttggctggccaaacttggccagtttgcctgcctagccaaacttggttgctagctgtgggacccacgttgctccccacctcaatatctctttcccctctctttcaccgcacagatcgatcgtcgccgccatcatcgtcctacagcgccatcgtcatcctgcgatgtcgctggctcgcacctgcacagtcgtcgccgtctgatttcctccgtcgccgagggagctccgcgatgacgaggcaagagcgaggaaggtgtgttggcgacggcgacgagggaggagcgatgatggggaaaaagcggccggatccatcatcgctgtcgatggcctcctcctccggcaccactgtcgtcgtagaggtcgccgtcaccatcccctctgcatccgtcgtcttaagggctccgctgtctcctaccccgccggattcggccggcggcgtgtaatcgccggggggtgggggtggggggcacgtgtggactccgctgcctcctcccctacgcggatggcggcgtggattcgccgggacgacaatgtgtggactctcgctgcctcctcccccgccggattcggccggcggcgtggattcgcgaggggggggacctctgccgtcgtctggccgccaacctccgcgcatccgccgtcggaccaccggccgctgaggttgccatcgccatctgccgcaccgtgctcgtcgagccattcaccgctgttgccatctagaaaaatggtgagaaaagagaaaggggaaaagtaggggttaggaatagcataggctgacatgtgggtcccatttgtcatagatttataatggagatggtagataaagagactgatggagcaagcaacgagtttaactagtcaaatcagatggagagttggctatatgggtatttggagagtgggatttggagaagctgttggagatgctcttagcctaattagcaatgctactaatgctatttaacactccctcccctctctatctccctctatcgctctctctcgtatggagtgttttggtgttgcatgctgtccctgctgtgcataggctttgttagctagcaaggcagctgcagttgtaggtggtgcagctcagctgggggctgggcatacagccccaaaacactgtccttggcccccctcctgcacagattcccccttctgccaaacccagcaaaaggttcccttgtctagctcctctcatcacacacactctctctccctctccaatgcacaagtaggagatgagtaccacatgcatcatgaccactttattcctcccttcccagagacacagatgagaacaacgctgtctcacctttcctgctctctcacctcctttaccacctccccctttgtctttttcttatcgaaaaagaaccggtactatatagggcgatatattagtataacaagaaaattataagattacaatcagtattagaaaaaacaatacccattaattaaattttaactttaaaaaa

SEQ ID NO: 17094 - DNA, 2697 bp, Oryza sativa
  unsure (1)..(2697): unsure at all n locations
acggcaggtangaccntcgtcgngcncgcctgcaggncgactctagaggatcccctgcgtgccaccgtatcattctagcttgggatttgttcctgaaaaaccgcttcagccttggtattataggaaaataccacatcaccttagcaggaattcttttcttcaaaggttgtccgtcaacttcacctggatcatctcgtcttatcttgtatcggagtgctttgcaaacagggcatgcttctaggttttcgtactcaccgcgatacaagatatagtcgttcggacacgcgtaaatcttctgtacttccagacctagagggcagactgtcttcttagcttcgtatgtactttcgggcaattcgttcccctccggaagaatgttctttacgagtttcaataactcgccgaatgccttgtcactcacaccatttttaaccttccattgcaagaattctaggatggtactcaactttttgtagcccttctcgcaacctgggtacaacgctgttctgtggtccgctaacatgcgctttagtttctgcacctccttttcactttcgcagtcctcctgtaagtcccgcaatatttgaccaagttcatcagcaccgtcattcccttaacatccagctccgcctcgcccattgtgttttcttcaaatcccccatactgagcccagtcccgaatgttctcatcttcaactttatcttcttccattgcaaccccaacctctctgtgcgaggtccaacaattgtagctacgcatgaacccccactaaaacaggtgggcatgaatagttcgtggggtggaaaactctttctggtttttgcacttgtcgcatggacagcttataaaaccgtaacgcttgttatcattggccacacccaaaaaataatgcacgccgtcaataaactctttcgaccgccgatccgcgtacatccattgccgatccatctatatgaaatacatataaatcataattatacaaaatccaagatttacaaggtaattacataataatacaataattgaatataattattcatacaattaatcattattattaaattcattgtacatatttttcatgttttaattacattataaacaaatatttaatatgtttttcttattttaatattaaattagcttagttttataatttcatacaaaattatatgtaattattcaaacaagtatttataatcttctttattccctacacacactttttctctcatcagcttccatcacattttttagagggaaaaatatgtaaaaaaaatagctccaaatgtagatgctaagcaaaacaaagagtaggatgaagttactaaccttttgaagacctcaaatttgtatattaccaccaaaaaaatttgcttaaaattttgacagcacctccctccctcaaagcttaattttgaagcaatggctcgggctagaggaggaagaaggggtatataaagctgtgcaactttagtcccggttggtaacaccaacccggcataaagatctcaaatcactttagtcccggtttgtattaccaaccgggactaaagatatgatctttagtccccggtggtaacacgaaccgggactaaagatcccaagccccccgacagaggtctgacatgccctgtcaggagacgaaccgtctttaatcccggttggtatcgtcccgttgagtaataaacccgggactaataagccactttagtcccggttcgttttggaaccgggactattgtggaaatcggccgaccctctaaagacctcttttccagtagtgatatatctcaaggatctgtttccaataaaaaagaaatctcctctctctatacatacgtactcctccctctgtggtaagtacgtgaatttcctactttattgctagcaaccccatataaaatcttaagttactaaattatactcactctgtttctaaatattcgacacgttgacttttttaaacatgtttgaccgttcgtcttattcaaaaaattttataaaatatgtaaaactatatatatacatataattcaaatgataggaaaagaattaataattacttaaatttttttgaataaaacgaacggtcaaagatgactaaaaaaagtcaacggcgtcaaatattttggaatggagggagtataataaaccacaaagatgcagagaaatcaaaacattgaatatgttttcaacgtgcgtgctgcttgctttaatgtggttatccaaatagactaacctattcttgctagggattatcaatgcagttagcattaggtctgctacaaatgagggtgtgcacgtgttttcatcctgctaagctctactagatttatcttaatcatcaaatttgcgaacacatttaaatttagatccatggtgtctttaaaatacttaatgattcaaccgtggtaaacttctatggaaaagaataatttctagggcatgtcatcctaattaccattttaaaattaaaaaaaattatatactaaaggtatacaaacactcctatactaccacgtggtacgcctataaacactactaaaccgccacgtggaattataataaatcggtaaaccatcaattttcgactattagatttatcttttttttcttaaaaaaaaccacaatccacatccatcgcctgtctcccaccggcataactctcctttccccactggcccacccttccga

SEQ ID NO: 17095 - DNA, 2804 bp, Oryza sativa
atcgaatctatcttaagaatgcaacattcagcaagtcacagcagggatccttatgtggttgattattaccaccaagcttgcatcgcgaaaaggggtgccaattctaggccaaaggccaattttgccccaacgtcaatgaaagacttgccttccaagtcccgatccagtggtgaccatcatgcatatcttcaggttgatgctgtaggaagagtttccttctcttccatacgtaggcctcgttctcttcttgaagttgaccttccttcatcaagtgatggttctcatgatcagaagtcttctctgagaccattggagaaagaaccaatgctggccgctagagtcactgttgaagatgccctctgccttcttcttgaggtggatgatattgaccgtctgttgcagtctagtcaggcacaggataacagtttccaactgaggcgaagacggcaggtcctccttgaaggtttagctgcatcacttcagcttgttgaccctctcgggccgagcacatcaagccattcatctggattggctgctaaggatgatcttgtttttcttcgcattgtttctcttcctaaaggacgcaagtttttgtcacgttaccttcgacttcttacccctggaagtgagttgacccgtatagtatgcatggctatttttcgacatctgaggtacttgttcgggggtttaccatcagattctagtgcagcagaaacaacagttactcttgcaaagactctttcatcttgtgtgcgccatatggaactaggtgctcttagtgcttgccttgctgctgtggtctgttcacctgagcagccacctctgcgtcctctagctagctctgctggtgatggggcttctcttattattaaatcagtactggatcgagcaactgagttactgactgaccagcatgccgcagccagctatacagtgtcaaaccggactctctggcaggcatcatttgatgctttctttggacttctgacaaaatactgtctcagcaagtatgaaagtattaggcagatgtttaccatgcagtcaccaggctctgtaattggatctgaggtctccaaagcaaccagcagggagatgccggttgagttgctacgtgcaagcctccctcatacaaatgatcatcaacgccagctgctgtttgattttgctcagcgaaccatgccagtgactggttttaatgccagcggtgcaaatggtgggcacatcacctccgagtctgttcctggttgatttagctcaagatgccaaaaagtgtagattgtcaatgcttaaaggacttaaatgtgcttgtctttggatgataattcttttatatctggagacatgcataaccccttcataaggtaaggttgtgtgagcttggagaaagttccatttgctcaggaaaaaatagccttcagattgtgactttaggcttcagattaatctcatagaccaacaatctcctttctgtgggtcatttatatagcacccacctgatatgcatatgtacatgcactgttgtaacactatcgttggggcgaattttagcttttaacataacattcatatgctcccagtgaagaagacatccaagactagtgggtttagcagcagtggttgtacaggctctggtactttgaggttactataaatgttggcttattctttgctcaaaaacaattttttaggggggaactctggtggaatcatatattttttaccaggataaaggctgcctgcctttgttgtaagtttgtgtacagtagttattagttgcagccttaaactggatcatttgaatgaagtagtcgcagttaacctcgagtgatcatttaaatggagaaattcgtgggatttttatggaatttaggctatatcatgtgattctggcattcgaaagaagccaatatcatttttcagggcagcattttgaattttgagtattaacagtctataacagcgatcccatttgcaatgcaaatgactactcctatttgattttcagtaggatgaaagtgggccccgtcaattctctactagatccattccaaaatatagttgcatggcatgttgaaaaccaatcgtctggacaagcaaaacggtgtggtttattagtggcaagcaaaatgaagtactcattagcacgtgattaattaaatattagctcgaaaattttaaaaatatctactaatacactttttaaagaaacttttacttaaaaaacatcgtttaatagatcaagagatgtacacatgaaaaatgagatagtgaaagttgagaaaaagatatagaatggaaccttacttcacctacaaccatccgtaatttaatttctccatctattcctcaactaattataacatctcttatttaattttcttacctactattttatcttaattgattagtcacctaatcatttaattttaccttatctttaatctccatgaaagactcaagtttttatcttttttaatggagtcaaggagagagtatttgttactttgaccggttctcctacagccaaatgaccacaccagcttactttccttttctttgtttagcgaaagatttgcatcgaaatatgtgtaatccttttcttattttgattttccagaaggcccaaatactagatccaccaaatttaagacgatggataaaaaataaacgattttaaaagttaggggataccaatcaaacagttctacagttgagggacggaatggttttgagaccataagagcattctcaccaaatactccatcccatcatcctgaaaatggcatattggaaatgaaagtcag

SEQ ID NO: 17096 - DNA, 1915 bp, Oryza sativa
  unsure (1)..(1915): unsure at all n locations
gcggacacatctttctccgaaaagtaacgtgacgaacagctgatctgagctggaagtatcgtaacactactaaccaatcagcgactattcttcttttttcacaggcacgtcgaaagacaagcagcgggagcagcaggccgcatcgagaggcacgccaccgccgccgccgcngangacgcagcagcagcagggtggcaagaagcggcggcgagccgacgacgacgaggaggaggaggacgacggccgccgcggcggcgagctgcagagcaagctggtggagatcctggatcggagcagccggatggtggcggcgcagctggaggcgcagaacgccaacagccggctcgaccgggagcagcggcgagaccaggcggccagcctcgccgtcgtgctcggccggctcgccgacgcgctcggccggatcgccgacaagctatagccaggcatatacagtatatgaataagatactagtactcctatatgtaacgctaattaagcgtaggaattcaggttgttcggagtcacgtagagtgtgaaataatttacagcaggggagagagaggagaaggtgacatttttatggggatattgtacagattggcttagggatcattaattggcaattcgattcttttgtaaacccccggttctgaagttcggtcagaaaccgttattgatttgagatgttgcctttgttttgtactgtaatttatagggaggaaaggtaaggttgttactggcatcttgacgatctgaatcgtagcaatgtttatctgctttagtgaagttgcattaccaacgcaaaagttattttataaaagtatttcaggcaaacgtttccagatgaaagtttttcggacgaatgttttcagatgaatgttttttaggaaaagaaaatgtgcactgcgaacgcaaatgtgctaaataagaatcgccgtttaactttgggatatttttctcatcttgtatgagtcttttttcctgtttgatgtaagaaatggaattggttcattcgtttttacttgaatttatgaaaatgggccaaatgtcctagcaaaggcctagcttaacacgtcctccactctccaccgggatctattctagcaaggaagaagtctgttctgactccctcatctcttggtctttccccaaaaccggatatagcgccttccccatcttcgaaaactattacaaatcgactccctggatgtttttgtagatggttttatcctacatggtgcttaggtggcattttaaacagaaaaaaaaatgacagtgggtcccacatgtcggatcatcctccttcctcctcttcttctacactccttagccaacgactccggcgagcttgcaccaccatggtcatgccacagccgccaccaggcatcacccttgctgccacccaattcctttggcactgtagccgtggctacttttgaccacaacgcctcttcgtcgtctctttcctcaatcgtctgctttcaaccctagtgccacctcgatgagctctccgcggacgacgcagcggtggcacttacctccgcccaacgtgttgtggcacgggccaccctcgccacgccccttgccgttgccgccgaggtcgccaccctcgccctcctcgccgccatcgaggaattcctctggttcgcggaatcgagggaggtggagagaaaagggagtggtggtgcttgcttgcgagcctattggcgaggtggacgcgactgtcgctagcggagtagagggtggcctcgtcgctgtagtagagcatcccgaccttctcgggtggcggcgaggcaagtgaggtggtcttctcggtagcatcaactagcgcccgcggcaccatggatgcaccaagatgcattggcgccgcacatgcacaacattccttgggagggagnagtcgatctacaccgc

SEQ ID NO: 17097 - DNA, 2780 bp, Oryza sativa
  unsure (1)..(2780): unsure at all n locations
cctggactgaaatgacattcgacttggcacccanncntgtatccgtgcttaggagagctttggcttggttaattgtaatccaattggaccaattctcgtgtggattcatgtggatcaatgtttttaagcttataattggtcaggtactatcgagtgctgccgatgcggattaatggttacgtctcatggaatttagattcattactttgctgtagagcatgcatttctttgtaaagacattttggtctcaggtaggcactaccatattggacaattgatgccttacaacttacttagctatccttcaaaagtggggaaggctcaattaaagcgagcgggggattatgttttttcaggagttagtgattccatatgaacgttatgctatctagtataaatagtggaaataacaatggggtcatgaagatagtgaccccatttgacatagcatgttgcagtctcaaccaagttctgttcccttagaagccattttgtgttcttcattagttcaattgattctcaaattcactgttgagtgttgacaatgtctgctatgagcatgctcattgattacatcattttgctaataaaaatatccattgattggtatttttttttcataaatattattgaagtgttgccttactagtttccaatatacccatttggaaagtaatttttacaacgcaactcatactttgcagtctcggtggttccagctatcagagaatatgttgatacttcccaaaaggtaaaatgtttacataacgtaattcaaatcagatttcagtttttcgataaacatttgtgtatgttgctcttgattttttatgaaacttacattcaattttcttatgaatctggaatatgtccaggtagttggattcagaatctctagagaagagaatgatgattcatatacccaagaagttggcaatttttctgaatgccactcttctgaacatgggaattcaggtttttcagccaataatggcacctcaggccaggcaactcctcaaagacctgaattgatggaatccctgaagattgatcaatccactacaaattctagtgggaatggtactcaggtgactgctagaaagaatcagtctgtaaatgccaattatctgctgaatttccactatgatccaatttctcggccacagcctagaggccccagaacatatcctacaagaagacagaggaagatcagaccatacaacaaagatttgttcctacaagcaaattttaagtttgttgtgttggatactggaagctatgaaatagaattaatggatccagataagatgctccagtgggaagatattgtatgtgtaagatattatagcccttgtgaggtgcaatgccctatttgcttggagagcccattgtgcccacagattacatcatgtggtcatatatattgctttccatgcattttacgttatttacttatgggaaaagaagattacaaaggtgaaagctggaagaagtgcccactgtgtttcatgatgatctcaacaaaggagttgtatacaatctatattactcaagtccagcattttcatgttggtgacaatgtgacatttacacttttgagccgctcaaaaaattcactcactccttctattaagaacctcactgatgaatctactatagacgaagatccttgcagtgcattctccaagttcattttgacgtctgatgtggaactttctgttagagaggcaaaaacagatcttgttaattggttgcatatggcagatttaggccttgtggatgacttggagaaacttccatacgtttctaccgctttggagcagctagaagaacggatgaaatattggagtgagtacagaaattttagtgtcagccctcccctaaaagacagcttctcacctgtaactagttccaaatcaaggaaccctaataatgcacaatcttcacgccagaacagtgaacacaagctatctcctctatcagatgaagatatgattgctggtgtttcggagctctgtatttcacctgaatcaaataaaatctttaataaaggaatgccatcgaaaacagaagagagatgtatggctcccatagattcaaatgagaatgatacttataatttttaccaggtctgaagtatgtctggctgtgattgtttaccttgtgcacatggtttttcattctcagagttttgatatgtcaaatcttgttgcaggtatctgatggccaacacctaattcttcatccgctaaacatgaaatgccttataaaccattatggaagttctgatatgctcccaccaaggtatagtgtttgtttacaccttaaaagtcatcgctctcatattgacacattattttgtgtattgtattagtattgggtagattgcatcctgattatgattatggaaaattggatttttcactatgtaagcagagataatttgtttagtttgatctgataaccaattttactcaatttgctcgagcaatgtatttcttgtgtgcatgagatactacattctggttggagtgcttatctcttctcctttttttttgtatctggttgttgctcgtggtgtttgcttgatacttatccagcttacttgcacgcagaatacatggaaaaatcttggagctagaaactgtaacacaatccgaagctacaagaaagcgctatcgttatctaagtcacttctcattgacaacaacgttccaggtaaaccagttgtggataactaacttttacttncgggtaccgaggtagcntaacttcagcat

SEQ ID NO: 17098 - DNA, 1460 bp, Oryza sativa
aaaaatatgccagcttttgtatgcatctttgttgaaagctatatataatctcacttatgaaatgcttccattctgcattactgcacatgtttccaaaactttaatgccatcaatatcgaccagaagaaggctattttgtgtctattacacccttttgttgaaaaacaactattcttttggaactctgggatgtagccaaagtcaaattaatgcctgaaggctcaacttgttactgaactatgtaaatgcccttttcaggttctctaactgttgattgggctgaagatgtagaatttcctaactgggtagatcaagacattttagaggatgaggaatttcaggaaagtaaaagatggtggtcacagtcacacactctggtgcagcaaggggatgccaaaccattgagccgaacatcttcctatcctcagcaaccactgcagcaccgggcaagtgaacctatcattccaccaaaatctccttcatttacgtcctttccaccgccaggtggtagatcaccttatacttctcaaggccttacacgccatgggagcattccatcacttggtgctggcctgcaaatgggttctccaagcatgtcccttccaagttctccatatcatatagctggactatctcatggactaccgtatggagggagcatgtccttcggcacttcaaatctgcctgtaaacaatccaatgcaaaatgattggccaagccaagccaatctttatgctggggagcaatttaatctactgccgaacatgttacagaaacaaatatcacttccaaatagcccgatgtcatcactgttattttctcaacagcagcagagattggcacaagttcaagtccaaccatcccatcagaattacctaaatttaccacctcacatattttaccaacatcactccccagaattaacaggaagatttgattctgttagcagtgttccttcatcaagagacaagagatcaaggtcaggaagaggaaaacacaacatacgtttttctcaaccattgcctgatactggtaatcaaaatggtgatagtggaggaataaaattcagatctaagtacatgtcatctgaagagatcgaatctatcttaagaatgcaacattcagcaagtcacagcagtgatccttatgtggttgattattaccaccaagcttgcatcgcgaaaaggggtgccaattttaggccaaaggccaattttgccccaacgtcaatgaaagacttgccttccaagtcccgatccagtggtgaccatcatgcatatcttcaggttgatgctgtaggaagagtttccttctttttcatacgtaggcctcgttctcttcttgaagttgaccttccttcatcaagtgatggttctcatgatcagaagtcttctctgagaccattggagaaagaaccaatgctggccgctagagtcactgttgaagatgccctctgcctt

SEQ ID NO: 17099 - DNA, 584 bp, Oryza sativa
atgatccaggtgaagttgacggacaacctttgaagaagagaattcctgctaaggtgatgtggtattttcctataataccaaggctgaagcggtttttcaggaacaaatcacaagctagaatgatacggtggcacgcagaagaacgtaaacaggatgggatgctgagacaccccgctgacgggtcgcagtggcgaaatatcgacagaacatttaaagacttcggcgaggatgcacaaaacatgaggtttggtttaagcactgatggaatgaatccgtttggagagatgagcagtggccatagcacctggccagtcaccatgtgcatctacaatcttcccccttggctatgcatgaagcggaagtacatcatgatgccgattattattcaaggcccgaagcaacctggtaacgacattgatgtgtacctaagaccattggttgaagatctgaaagtgctgtggaggaaagagggcgtccccgtgtgggatgaggacaagcaggagcaatttaacatacgagcgttgctattcgttacaattaacgattggcctgcacttagtaacctatccagacaatcaaacaag

SEQ ID NO: 17100 - DNA, 2133 bp, Oryza sativa
  unsure (1)..(2133): unsure at all n locations
agcatgcaacgagggcgcgggctatccgccatcgtccgagaggcccgcgccgcccgcagccccatgatgtgcggcggcctcgccgtggcgcacgggctcggggcggtctccacggggaggcgagcgttgttcgtgncggcgtccgcggtgcaccgcgccgacgcgatggaggcgtgccgctacgtcatcgacgagtcaaggcgtccgtgcccatctggaagaaggaggtgtacgacgacggtgaggtctggaaggagaaccgcgagctcctcaaccgcaccaccaccgacggcgctgccgcggcgccggcgaggggcgcgcttgctgcggcagcaaggtgagagtcaacgagagctgatgcccaacctcccccaaaatactgtagattgtcaatgcttaaatgtgcttgtctgcggatggtaattcttttatatcttggagacatgcataaccccttcaatagagcaagtttaatagcccactactagtttcaattcatctatagccgatctaatagccaattcatacaatagttgcttactatactattaatatatggtcccacctgtcatacacacattgtgttttaaagtccatgctgcaggtggctatagatctgtagtccgcgactcttctctcttattttttatctcattaaaatatgtttatagctggttaatagcttgctattgtatctgctctaagtccattgtaatctatcttccactgccattgacaacgagggatcctaggtaaacgaagattcctagtttgtaaacttaaaaagaagaatggacaactacatagcatcctggtctaattagaatttagcatgtgtgacttatgataactatgtgcgtatgtttactatcaccttgctagtttagtaagagtggaaccgacatattagaattcatcccttcaaccatatgactcccgggttgatccttttatacgaagcgatgatggaagtataagtgaggtggtatgtgtaagtgggtccacctgtcaaatagactggttacgcagttctgaagggaaggctattacaatctattcagcataattgtactaatataggccaaagagaaaaatggtcatagacctaaaggacccagagcaggggaaagggaatttaaaccagtgtggtagcttcttctagaatcggctgtctcattaaaatgcaatgtccaatttgcagtatccaatttgcaagtggtccttgttgttttagcaactaaactgaagcacatgctgcctccaaccccagagcaatgcatggggtggcaactggcaactatctctaccaagagacaaaaaagaagtatgattaagtgtgggtaactagagacataaaccacaggaataggataaacaacaccaagacaaacattccagtcccagtagtgcttatagctaggctagaatggtgctaagcacaaactgcatcacgtgaacctaactaggaaaatactatatgctcatactatcatagtagtaagaaagcaagaggaatttaattctctcttggaagaacaagaatccaactaccaaatctctctctcccttatcccctttaacctcttcacaaggatttcttctttctttcttttctttttctcttttgttcttgtgggaacatgcatgacaggtgcaggcgtcagaatacggatgggcacaatggggaaggaggatgctaaacaacaaaaccagcgtcaggccagccagcatagaccacggtttgtatacacacacacacacacacacacacacacacacacacacacacacacatatatatatatatatatatatatatatatatatatatatctatatatatctatctactatatctctctatctagagccacataaagtacacacacctacacagagccacatatatatagcatatacataaatatacatccctctacataccaactaaatattcttcctatatatataggttggagatacacttaagtacttatagatacccagcggcctccctctagatgcatattttggatctcatttgttaccccctttgtccttttccaggttcctagtcagttttattcttaataaaagctggccctatataaatttgtacgttcttattatgct

SEQ ID NO: 17101 - DNA, 711 bp, Oryza sativa
  unsure (1)..(711): unsure at all n locations
tcctcgtcgtcgcngttgtcctcgtcagatcagccaccgtnangcctcttcccacnnggcggcgggcngcngcacaaccaaataagtggcttcaagcaaagcatgctctgctgttcctcagaagtctcaaccaccgtattaatcagaagagtgcccaaaataccacgaacttccaagcgaactctatatggcaactctccattgaggggctcaataactgtgtactatggagcttcaatgtaaccggcaacaaatgtcatatttgcaagctccgcaacaaatccttccatgccttcaccatggtgagtacagggagaatcggccatctaaagaaaagatagaaggaacaaaactgactccgatcagaaacgagatgctggcattaaaactggaaacaaaaagaaagaaaaggcactaaactgaaatcaaaaatactgaagcaatataaatattttttaaaaaaatactatttttggcccaaatttttttttaaaaaacgaaactctccctttctttttaaaccgaaacccttccctttttttctgccaaaaccttttccttttttttgccaagaatttttttccgaaaatattatttttcttttgaaatgccgaaaacatttttttaaaaaaaaaatcaaaaggcacaaagaaaaatattttttttttgatgaaattcagaaacttgaaaacaaactcatttatttggact

SEQ ID NO: 17102 - DNA, 4063 bp, Oryza sativa
cttcgtcaaagtaaagaaatgcgggaaaaagcttttgaacggcagcagcatctttatctgtatcttgtactttatgtttccttgtccttctaatggtggggcccggcctccccagtgagttgcgggacccaccgctccagtggaagacaagattctttaggcctgttttacttcccaaaattcttttcctaaaaacgtcacatcgaatctttgacacatgcatagatcattaaatatatataaaaacaaaaactaattacacagtttgtatgaaaatcgtgagataaatgttttgagcataattaatccatgattagccataagtgatacagtaacccacatgtgctaatgacggcttaattgagctcaaaagattcgtctcgcggtttccaggcgagttatgaaattagcttttttattcgtgcccgaaaaccccttccgacatgcaatcaaatatctgatgtgacacctaaattttttttttcgcgaaataaacacacccttagtccatgagcacaggtgcagtagtagcttcgaaaaaaaatactaaaaaaaaactccgaaaagggagaactgaagacctaaatacgggaggaggtgaaattcagggggttcatgttcaggttcaggtggccaacacatggccttgacagtccagttcagcaaaaatgcatggaggattatgggggtatatacgagctctcatgctaagacattattgttagcaataatgcagccaaataattgggtcaaattctatctaaacttgccttctgcctttgggccctgggcatatgcgttttggattggggccaatagctcgtctcatcgcctgacattattttatgatgatgatcagtgccgaagctccgatttgccattgggaggggcgggggggtgtggctataatgctgtcatgccggccagactccataacaatcactgcagatatataagtatacaatctataatcgctgcagatatataagtaaacaatctatggctctgtagcttgataaatcaaccaacatatgttttgcgatacaaaagaagcccaaatgttcattataccattaggtagcaactagttccaagtctccaacatcaaataaacaatgtaacatggctgcatacgatttaccataaaaaaattacatctcaactaacttgaatttgcatctacgagaattagctagatcaaatgccttaataatatcattggaactaatcattgctgataaatccttttcaatatagactaccaaataatcacgcaaataggcatctcccattttacttcgaagacgagtcttgacaattttcatagctgaaaaggctctctcggtggttgcagttgacacaggaagagtcaagactaatctcaacaacctatccaccattggataagaagaatctttgccaagcttaacaagtccacttgttaaatcagccaaagatgataaaatttctagttccggatggttgcacacatcaagttgaaagtgtggcaattggcactctaattgcattcgttcttgatttgagaaatctgtgggatagtacttctccactagaatgcataccttttccatgtcaaatgagtcaagccttggatccaaggacacacaaagtgctaaaaggtctgtagcttgagaaccaaatcgatcttctaattcaatcagttgttgatcaattgcaacattaaacacatcaactttataatggtgtaaagttgaggtgttatcattcttgtttcgagattttgtcacatcaacaaacctaaaaatacaagggtaaataagattaatccatacaaaagaaatcaccattcagatttaacaatttaggcaaaagaacttacttcctattcagatctggaatatcaatctcatgcttctcacagaaggatttgacctcctgtagaagaggctcccaaccatcatttcttaagtcaccaagtaacattttggtgttagaaacagaatcaactgcatttaaaatatcaattgacttcttttggagagtttggcacagcacatcagtgattttcataatcttttccatcatgagcataataaacacaaaatcaaatgtgataatcattcgcagggcacatgaagcatctccacgtgaatactttgaaactgaatgatcatgtgcaatgttgcgtagaactgaaactattgcaccaaacattttctttaagctctgaattgacttgtaatgggaactccatctggtatcccctggcctttgtagagagctcatctgatttgcccctcttcctgtgtcaagctctcccaactcaatttcacgagatatttcttcagcttgtgtagctagtaactcattgttgcgcttaggagatacactcacaacatttatgatgaaatttgcatgctgaaagaagttatgtacctcatgtacttctcttgatgccgcgacaagagccaattggagctggtgagccatgcaatgaatgtaatatgcataagggcactcatttagaactagtgccttcaatccattccactcccctctcatgttgcttgtcccgtcataaccttgacctctaatgtcttgtatattcaagctattatcagataagacagcacaaattgagtttttaagagtcaatgcagcagtgtccttaacatgaacaaggtcaagaaaacgctccttgataagtccttctttggtaacaaagcgaaggactattgccatttgctcttttttagattcatctcgagcttcatcaaccatgatgcaaaacttgctattgccaatttcttctctaactgatttttgcacttttctagcaattatgcttagaatttccttttggacatcagatgaaatgtactttgcatttcttggagcattttccaacacaacttctttcacctccttgttaaatgaagccaaaagcttgaccatttcaagaaaattacctcgatttaacgaatttatagattcatcatggcctctaaatggacacccttgaagtgttaaccacctattatgatagacaatactaagtgctgttagatattaaattattgacatagtatagtcttacatataaataatatgcaaaagaaaaaagaacaaaacttattacctaatggactcaatggtagttgtaagccttagtcttgctcctgcaaacaatttttctttttgtgcaattactgccctgtcaatgtgagccatactatttttgagattattgaaacaaccaacagaatagttatgagcagatccagagttacccatatgttttagaaaagcacactcttttccttcattaactttcttccaattttggaaccccctcactgtgaatgtatctgatccaaacctcccaattggtttctttgaaaagagaaaacatggcttgacaataagcacgggccgtgtaaggtgaatactctagccaactaaattgtttaaaccaattgctttggaatcgacgagcatgagatgcatcattcaatgggtactcatccaatataaattgatatgggccttcagatatataaaatctttgagctttatcttgttgatcagcagggagtgcagagatttgaacacgtttacctgggtccctctcaaatgccgtaggtaccaatacttcttgttcagcttgcaaattttgctgatcaggaacttccacattggttgggctaggattttcaatttcaactgagacagccctagcaacaactggcttgtagaagcaatcaatcggttatcgttttcctcttcatcttggctgaaattaagatgggaaataacaaaactgagtactcataaactgattgaagtctaatggctaccagatacaacctacaaaacttttgttgtattggggatttggaagagaaaagggaaacttggagaaagaacctaccctaaacgggttgaacaccacctgttttttggaacttccgcagatagtgggcttgtgccctggcagagtccaattccggcttccaacgtgtttaacggggagaaaggcgaacgttgttgaaaggcgaaatcacacaaaagcttgcccccg

SEQ ID NO: 17103 - DNA, 1550 bp, Oryza sativa
  unsure (1)..(1550): unsure at all n locations
acggtttgatttcaatgaaaacacntcgnacccnacccaaaatagcgccacaaagaccgacatgagggatctggcgctacctccaatcttgttgagttgatatcgaggatggaggctttattatgttattccacatattatactcggatgatactaatatataaagacaacatcgtctttggtcaacaggagttgggatattacctatcatataagggggcacaaacctgtgtaaattttttttgtctcccaacactttaacattaatctcgtgtgtaccttagcatcatcgtaccctgatacttcctaatattgtagtcacggtataacccgtcaacatctaggcatatccatatttttcatgatgtcctatatgaaaaatactactgtgccatctttaggatcatgccttactttcaagccgcttttattttttttttttgtccactgtttataagccgagtcacacgatattaatagaagcagcataaaatactccttccatatcaaaatataagcattttatttgaaggaaaaagtacgaattaccccctgaactatcgcggtcgtccgaattaccccctgaaccacaaaaccggacattcttcacccccccaactatgtaaaccggacgaattacccccctcgaccaatccgcggtggttttgatctatgtagtgtacacgtggcagtccagtcagtattttagtttttttaatggtgagacccacatgtcaaactccactttctctcttcctctatctctctctttctctctcttcatcggtcagcggcagcggcgcgcacgcatggcgcggcgcggggaagggcaatgggcagcgacgcgggggcaggctggcggtcagcgcgcacgcagcgcgcggggaggtggaggggatgggggagaggcgggcgccggcggccatggcggagaggcaagccatggccggaagcgtcgggaggaggacgagggacggcggacggaggcgcgcgtcgggagctggagcggcgtcgggaggaggacggggaggaggagcaagagaggcggaagagggagacagcggcggcggaggaggaggccattcccgcgaccgccgctcgccatttcctccgcgcccaccttctgtcccggtggcctcccgcctcagcgtcgcggctgtcgcagcctaccggttgcccgctgcacggaggggcgggcggcggacggtggatggcggcgcgtgggagcgggcggtgggcatcggacggcgacgcgcgggggcgggcggtcccgcgccttgagacactcaaccagggcgtccaccacgtccccgatgctgaccacctgctggtgcctggcggcggcggcgccattgttggcatggtggagcagctgagtgggtgacgcggacgccgccatcaccagggaggcggggactgggaacggcgtggcgcggttgacgccgtggcgggcgtggcgttcgttgatggcgacggcgaggcagcggcgcggaaaaagcatggcgagcaggtggggtacgaagctcgtntcgcaatgcaatcaaaccgct

SEQ ID NO: 17104 - DNA, 1911 bp, Oryza sativa
  unsure (1)..(1911): unsure at all n locations
cgcgctggaaatcacttgcatgaaanncccctangaaatcctggcataactaaactgttttctatgcagggccagccgcaacacccgcattatcctttgccagcatcatttcctccactagagcgtcagacaatagcctggacacgcacaaaccaaatgtagtcgggaagaaaggcaagaaacccaccaaagtgctcttgtccactggcggtggccgccgatactgaaggaagagtgacactggaatggaagcagttgccagttggctgtttcctataagcagtgtgtatagtgcataacctggacttcacatctgtaacactcccaagtcccaagtagcagctttttctcccatttggtttgatctaaatcgcctgactgttttagaaggtttttactgtgtatctacatcctgacccatgctaagggagtaagggtgactgccctgtcgcaaaatgagaagagctatgtaaaatttgataaataatgatgctaaggatcatgcgcaatactttgctcaatgtacgtcgacgagttgatccgtcataggctgatacagcctgctgtttaaatcgtgagatgctctgagtcatattttcaaaatcacggttacggggcatatatataaattataaaatacacaatatagaaggaaggaaaagcagaaatgcatggtttaatgcaataagtttcaaatgggatggaatgtcaaactttaagtaacttatgatgatatttatactaggagtattggcaatgtatggactaaatattgaaaaagtagcagaaattaatttctttgtttaaaaagcaacggaaatatgtgttcgatagggtaaagctaatgggcgatcgatcgccccaggtgatcgaccccatcccccctatatggctcctctccccttcttctcttcctactacaccataaatctttttaaaaataaaaaaacagttagaaaaatttatgtatagaaatactatatatataaaaaatatttgaattcaaatttaaatttgaatcgggtattttgacttataaactttgggttaataacctttagatgtatagaaaatcctatatataaaaattatttgaattcaaattcaaatttgaataggatatataactttggctctctaaactttagatgtatagaaaatcctatatataaaaaatatttgaattcaaatcaaatttgaatcggatgtataaacttttgacttataaactttgggtctctaaactttaggtgtatagaaatactatatatataaaaaatttgaattcaaattcaaatttgaatcgggtatataaacttttgacttataaactttagatatatagaaaatactatatataaaaaaaatttgaattgaaattcaaatttgaatcggatatataaacttttgacttataaactttgggtctctaaactttaggtgtataaactttagatgtgtaaacttgaggtgtataaattttagatgtataaataaatttactaaaaatagaaaagtaatacggtaccaaaaaagaaaaccacgttgaggaggagggggtgtcgccctgatcgcccttagcgatcaatcgcccattagcttttccatgttcgatatgcattcgagagtatcccgatacgcatttgtgtttgatacgatatctgatatggatatgcttgtttttagaagtatggttttctctttttttctgaaataacaaattaaaatggtggtaaatttgtaattgctcttttattttttgaaaggcagcatccaatattggacatgactacacagcgctactacttcatctatgaaaaatcctatccacctatacttcaaataaaaattcctcttaaccacccacgtctagggacctcaagtgccgggggcgagagacgtcacctgccc

SEQ ID NO: 17105 - DNA, 2809 bp, Oryza sativa
cgcgtggattgatatacactcgtaccccttcgtagacacctgcgaaaagtttcgaccaagcgccggtcttttcatcacctcggtacgtgttcaatatgttgcgcatatttgatatgttcatgttattctgcgtagtttacatgtgtagatctaatgatgcgttcatgctagttttcatctgtaatgtcatgatttatttatggaataaattaaatcattatatgcccataatctcaacaatccaaaaaccttattataggcactgtgattttactatggctggttttgccgatgcactgaggccggataaattcaccggtgtgcattttaagagatggcagatcagggtcactctgtggctgacagctatgaaatgcttctgggtgagtactggcaaacctgaaggagttcttactgctgaacagcagaagcaattcgaggaagccactactctctttgtgggatgcattgttagcgttcttggcgatcgtctggtcgaggtgtatatgcatatgaccgacgctaaggagttgtgggatgcactgaatactaaattcggtgctactgatgctagcaatgatctgtatatcatggagcagtttcatgactacaaaatggctgacaaccgttctgtagtcgaacaggctcatgagatacaaaccatggataaggaactcgaactccttaagtgtgtcttacccgacaaatttgtggccgggtgcattattgcaaaactacctccatcttggaggagtttcggtactgcactcaaacacaagagacaggaatactccgttgaggggttgattgcgtctcttgatgttgaggagaaagctcgggaaaaagatgccgcgtctaagggcgatggtgggcagtccagtgccaatgttgtgcacaaggcccagaacaagagcaaggggaaatacaaagctcagcagaccaccaacttcaagaagcagaagaagaacaacaacaatcctaatcaggatgagaggacttgctttgtgtgtggccaagttggtcatctggctaggaagtgtccacaacgcaaggggatgaaggcacctgcagggcagacttctaagtctgctaatgtgaccattggcaacactggagatggaagcgggtatggtaatttacctactgttttttcagttaatcaatctactaattggtgggttgatactggggccaatgtacatgtttgtgctgacatctcattgttttcttcttatcaggtcgcacggggttccaccgtcctaatggggaatgggtcacatgcttctgttcatggtgttggcacggtagatctgaagtttacttcgggaaagatcgtgcagctgaagaacgtgcagcatgtcccttctatcgacaggaatcttgttagtggctcccgtctgactagagacggatttaagttggtttttgagtctaataaagtagtcgtgtctaaacatggatattttattggtaaaggttatgagtgcggaggcctgttccgcttttccctttctgatttctgcaataagtctgtgaaccatatttgtggcattgtggatgatgaggctaatgtttggcattcacgtttatgtcatattaattttggcttgatgtctcggctttccagcatgtgtttaattcctaagttttccattgtcaaaggttctaagtgccatagttgtgtgcaatcgaagcaacctcgcaagcctcacaaggctgccgaggagagaaacttggcaccactagaactcctacattcagatctttgtgaaatgaatggggtgttgacgaagggtggaaaacgatatttcatgacattgattgatgatgctactagattttgctatgtgtacttgttgaaaacgaaagacgaggctctagactattttaaaatttataaggcagaagttgaaaatcaacttgacagaaagataaaaaggcttaggtctgatcgtggtggagagtttttctcgaacgagtttgacttattctgtgaggaacatggcatcatacatgagaggacacctccctattctcccgagtctaatgggattgctgaaaggaagaaccgcacactgactgacttggtgaatgccatgttggacaccgcgggactgcctaaggcatggtggggggaggcattgttgacctcaaatcatgtgttaaacagagttcctaacagaaataaggacaaaacaccatatgagatatggattggtagaaaaccatcactttcttatttgcgcacatgggggtgcttggcgaaagtcaatgtaccaataacgaagaagcgcaaacttggacctaagactgtggactgtgtttttctgggatatgctcatcatagcattgcctatagatttttaatagttaaatccgaggtaccggacatgcatgttggtacaattatggagtctcgtgatgctaccttctttgagagctttttcccaatgaaggatacacatagtggttcgaaccaaccctctgaaataattcccagttcaatcacaccaccagaacaaactgaacatacacatgaacttgtctctgaggaggatgtcagtgaagctcctcgaaggagtaagagacaaaggacggctaagtcttttggtgatgacttcactgtgtacctcgtggatgacactcctaagtcaatttcagaagcatatgcatctcctgatgcagactactggaaggaggctgtccgtagtgaaatggattccattatcgctaacgggacttgggaggtgacagagcgaccctatgggtgtaaacctgtggggtgcaaagtggtgttcaagaaagagct

SEQ ID NO: 17106 - DNA, 7014 bp, Oryza sativa
ccacagatagggcagacatccaagtcagcgtattccttgtaatacaaaatgcagtcgttcggacatgcatgaattcttctgacctccaggcccaacggacataatacttgcttcgcttcatatgtcgtctgaggtaaattgttcccctctggcaacagatcctttaacagctcaagaagttctgtaaaactcttgtccgaccagccattacaagccttaagcttcatgagttccaacacgcatgacaacttgctgtgcttcgacttgcatccatcatacaacggcatctggcaatcttccaccaacttactaaacttctcaaaatctctgtcgttgtcctctgcgtcttcaatgtcatgcaacattgtagatagacattgagtgtccaaatctatggtctctccacctaaaggagaaggtacgaacatgccttctcgagctgcggcggttttctctacatcctgatccaacacttcttcagctgcaatatcaggcgcctcttgctctccatgcttggtccagcaggtatatttcttcatgaatccattcattatcaaatgagcatgcacttcatccttgtcttcgatcatctgttcattcttacagtccctacatgggcacaacatgtgcatgctcatcctactttttctgtcattatccgcaaatgtgacaaattcagtgaccccctctctatactcggtagacgaacaatgcgcatagtacatccatctacgatccatctgaaatcaacaacatacgaagaaaaataaatgataatcgatatgttgagaatgaatggagaataatgtgttttttaccttgaattttagcaaaaaatcgccccccttgccctcccaaccgatttgtgaacagtaaaatggtcgggatggaaagcagttggcagtttgaggggtatttatagacccaacacacctcaaacgggttagataaaaaaagcccgtcaaaggtattggtcatacctttgacgggcttctattcagtggcccgtcactggtatcccctcacctgtgacgggccagaaatgaaagccgtcacaggtggcggcccatcacctttgacggcttctaatgtatcggcccgtcacaggtgaggggataccagtgatgggttggaagcaaaactcgtcactggtatacctttgacgggttttcctttcggcccgtcacaggtgaggggatacctgtgacggtccgcggccggatggctcaccggtgacgttatcccgtctgacccgtcagaggtaatggtcactagtgaccaaatcgtttgcccgtcacaggtatcccgtcagaggtgtgacgatctggcgtagtgccaatagtatctgcttctttaggggaggaggagtaatgggtggcctttttaatgtcgccttttagtagccacagaaaaacccccggtgaaaatcaaattttcattggcagatgtttaagtgcgccgccagcgaaaaggtgtacatcttcgctagcggccctcttaaccttgctgccagcgaatatccattttcactggcagtccatagccccccaccccttagagtattttcgctggcggtgatcatgtatagccaccagagaaaaaaaataggttgacggcatgaaaaatcgtaagcccgttctaggattctgaaaaggctatcaattagaaagagaatcatatagaccatcaaatttatgtataacttgtgtaacctatggcttagattggatttataatgagacaatgcatgaaccacttatgaaaatcttattgaaatccgttataaacacggctgtatggatgatctaaggtggctgagcctacattaggaaatctcatacaatgtatatataagttttattgtgaatgttgagtgccatttcctttaatattatgtgctttaacttaggattctagaaaaatacacaggctatgtttgggaggtgaatttggaacttaccggaaagaacacagctatagtagagtgtaaaatttcaatttttgctcagatgaatgatccgagaccatggatgactagagctcatcaaataatgtgaaatatactatatgcacatttgttgtaatcagagtatctagagtttgggtgaaattacggcacaattgaattaattagttcggatcatccgatttccattattaagagccataattcttttgcaacaaaaagaagagagagaaatacagagatgctggagggctcttgcatgttttattaggatgaacaatggtcacccggttggctgctcatgtttctgcacatgcccatgtgcctgagccgtcgataccaccggtcgcagacatgcgctgcatgtcacatcaggaaattaccatggatgtatctatcaggacgcatggcagttggtctcgccatggctgggtctcactaactagttttgccagctcccaaccatgttggtgctcatggtcgtgaacgggcaatatggatgcccgatgcctccgaagcctagccacatcaattacttgttcgtgagatccatggctgaaaacaatgcaggcgagctgcttatccgcttccccaggagtacaacgcatggctgaaaataatcgacctcgacagatctacgcacgggttcatcgaccacgtctccttcgcttcgactacatcgactatggcacaaagggctatcatccgtattgagcattctcgatggttcattggtggagaaaccatttatactctcggttggtaaccccttttagtcccggttttccaatagggactagcaatccgggactaaatatacacttctttagtcccggttagtgttaccaaccgcgactaaagagaaggtatctttagtcccggtcttttttttcattgtttcttttgccatagtttaatccctgtattttctcccaaatcgagtgggatgcatatccccaaatcccaaatcaaagtaacatcccataacattcacatcacagatcttaagttacttatacacacaaatcaaatacatcacaaatcttaaaaaaattacacacaaatcaaacacatcacatattatacattttagatccatgcaacgaatcacaaaattatacatctaagtgaatcacaaattgaaaaaaaaagagaaaggatgctggcagtggctgccccctgccgccgctcgccactcgccacaggcgcggccccgctggctgcctgctgcgtgtggtcccgccggccttcggatgggaagggtggaggggggagagggccggggatgggaggaggaaggggaggagaggggagaaggaaagggggaggggaggagaggaggaagggatcgatctgaggagatgagaggctagttgtggaggagaggataactgcgaagaggccggttgtggaggagaggataagggagagggattatatactacgcgttgaattttagtccaaccgggactaatctttagtcccggtttgtgacaccaaccgggactaaagatcctcagccccctgacagactactgacaggggataaacttggactaaagatgatctttagtccccattgttgttaccaaccgggactaaagatcgtagaatggctgtggggttttaaaccgggactaaagatcatctttagtcatggttcatcccctgtcagtagcctgtgagggggctgaggatctttagttgtcacgccctaaaaatcgactaaattaaaaatgcatattttaaatcatttttagaaattgttttaaaagcctacaagctaaaccctaattttctaggaaaatttccaacataaaaatgagctagataaaattttattaaatactatgcttgctcctctattttctagagttttctgggaattatttgagcaagggaagtatttttaataattgaaacaacatttcacaaattgttttattcaaaaaagttcaaaaatccccctcctaggccgttgggccgatttcggcctaactctctctttctctctctccccgcgcgcggcccatgccggcccaagccgccgccgcccgcgcccctctctctcgggacactgacatgtggggcccacatgtcaggcccttcttcaacctccggccgccgccgagaccgagcccgagccgccgtcttccacctccgattccgcccaaatccgagcccgattcctccgggtttttgaggggttttgttcctctcgttctcctctttcttttcccccaagaatcaaagcgaatcgttgagtattctctccgaatcgagttcgttttgattttatccctaaaaccgagtttgaattcttcccgaatcgattcctctcgtttggagctcgatctcttcaatccaatgccatatatagcttcctctcgttgtcctcttccgtttgccccctctcccgagctctcccgtgcctcctagcgccgccgcgacgtgttccaagtccgccgccgccgccgcccgtcttcggcgtcgtcgccgcgccgtctccgccgtcgccgtcgcttgccgtcatcgccaagaggtgcgccgtggtgagaggaagctcgtgtcacgaccggaaataacccaacgggcgttcctgacgtgcgtgcattaatccttgtcccaggaggcaaggtacaccaaaagttgatacaattcagagtttaacaagcggaagcgtaaatagttaacttattacatgggcagcgaaggcccagcacacacaaagacaaacgagaaacagcggaagactagggcgacgaccacaggcgcttgacagcaggcacgaactagacaccaaagccttcatcttcaaggaactcctcttctggggttgggaaaaattgagcaagactgagtacaaccaccgtactcaacaagacacacccgcaagtgcagaataaatgcaagggagtacaagggaattatactataaagggttagggttgcagtaaacagcatttaaagacatttagttgctccaaagctattttgtaaacacgattctagaactatacaatgttattaatcacggccgtgaacccacacggacctgccttaacccaaggcctacgatgattcagaccgaactggcaacccgaccctgggtcccagctcgtcccaagccaacccaggccaaccattccacattttagttgataagcaggttttaagacttagaacactaacttgggtacattgctcggcttgcccataaccgagggcgcggctattcgaatagattatactctgatcagaggtgtacatctttacccacaagacacatcttcctcacgtgcaaccacgtgccacataccaccacggtatacagacggaagacgtgacatagtttccaacccatcctagccatagacaagagtaccgacccaatcccacctacggccggaacccccgggacaggcaggcaggactgagcccctagcagcaggacaccggccctgtgccatgacatctcgactaccgaaccgcagcccgtgtagccttcatttgccctggagaatgtccatcgacccccgacttcatccacctccatccgtgtacttttgtttataaccagactgagccacaaactaagccttacccactagacatgtggaagtacggtagtgctttgcaacagaggcccgaagaccggtccttatatggcagaggtgctactgtcaaaaccatgcacccctagcccagcccaaaaccattttagggattttgaatagaaggagcggtgtgaagccggttccacgataaccagaccattccaaagtatccaggtgacttgaatatttcccaaagtctaaagttgtaaaaccacctaatgttacctaattaacttgcgaagcatctacctaaaattaaactagtggtgccatgagtagagtgtccactagttggggttttgtttattctagggtgaacaaggtaatattaacaataacaataataaggtcataacaaaggaaaataggcatggctaaataaaacagtgataacgcgggaatttaaataaagtgataatgcaataatttaaatcaacataattttacaaactgggattcaatatgttcaaagatgatgtgacttgccttgctcgctttcccaaacatcggcttcaacttccacgaagagcggatcttccgaagctgtagcgtctacacgaccaacggaaaagaaaaggctattaccctaataaactccatataacagcagaaataaagcacaaaaatgggttcttgacttcttaaggaaaaattagagacttgaacggtccaattccgagttcaaatggccaagttatggccatttgaagtttatatgctctttaaatggatatttgcgaatttcttcatttaaattttaattaaaaattggatttattgcgtcagccgggagagagggcgcgcggaccgggtccacgggagtggggcccacgcggcagcctcacggcccacggtggaccgggcgcacgcggctggcgtcggccggcgccgtgggtcccacgcgttagccgcacccacgggcgcgggcggctgacggccgggcccacctggcagccgcgggcgcgcccgaaggcggcctcgccggcacggccgatgggaggcggcgcacccgcgccccgatggtcgccgccggagaccaacggcgcggcggagcggcacccgagagagaggagggaagagggaaagcgaacggcggtccatggctcaccccgggacgacgagggcggcggaaatggcgaccggagcggaggacgacggcggcgcgggctcgggtcgacgaggacggcggcgttccggcggtcggcgagcgaagcggaggggcggacggggtcggcgaggacgcggcgaagccgaagggggtgacgccgaaacgggaggaggtccggagcgacgacggcgactgaccggagctcggcggcgatggcggagagagaggacgacggcgcgggctcgattccgacggggagagtgagcggcgagcggcggaaacggaggagcggagctcgggaagcgattaaatagcgccgggag

SEQ ID NO: 17107 - DNA, 19831 bp, Oryza sativa
  unsure (1)..(19831): unsure at all n locations
gaggaaaaagaatggaaaaaacgggaaaaaaaggagggaatcacggggagtcattccccctttttatgccgcccagcacggcagaattcgcggatttgacgccggcgccggtgtaaggcacggggccgacgatagcccagctcgagaaagggaatacggttgggccccaccggtcagcgagggtgcaggcggggcccgcctgtcaccggcgcgcgcgcggggaagaagtcctatgggcctcggggaacagaacaaagaggcagaggggaaagtgggcgagccggcccaagaaggaaaggggggaaaagaagacttttagggtttttctttttataaaaccttttaaactttgttaatttcttcccaattataatttgtgctctgaaaattccactaaaattttattaacacattttaggcttttaggaaataaacaaaaatcttccaagccttatttgacttttaaatttgcacattttaattgttggaggctttcacatgggttttaattattctcggcacaattttaagaatatattttagagtcgttttggaacgcgacagctcggccgccccttcttttccgccgccgaccaccggagctcgttcgccgccgtcgacccgagccgccgcgccgcttcttctcgtcgccggccgccgtcgtgcgttgttggtcgtcgtggtgagtaccaacgggttcgcctcgttgtcctctacgcgtaggtgtcctccaatcgtccggccgaccgctctagcgccggcgagctcgcggacccgagccggccgccgttgctgacgtcatgccgacgttatctccagggctgacgtcatctcctctagggctgacgtcatcgtttccttttctttttcttttttccgattttctaatagattaaaacttcggaaaatcataactaaataaccgtagatccgttttaggtggttcaagtttctaaatttttctaaaatcaagatctacatgttaaaaatatcctcatgtactgtttatgcttgtttttgtactgttttgttgattttgtttatttgcttttgtttccgacgttccggaggagagcgtttccgttgaggaaggttccgaagcgtttgtggaagcccaaggcaagtcacacagatcccaaacaaccctttgagcatgttgatcccgtttaaagctattgttttatttcaactatgcattgttttcgaatgtcatcgggtggtgaacctttcccagttatttattggccgaagatgactttattttcctatgggctataatttgattagcatgaaccttatatattggattggttcagctaaatgctatatataggtttgcttagccatgcatagaaacattagctaactaaaaggggttaaatataaattatattacataattattattgttaataatggttatatttaatggtagctcacgatggtcaatcgtgtgatgttaactaattgataattaaaatctggataaggtgggttgtgagcatatggttttgatggttgtgctcatgacaattaaggaccggttcgcgagctactgttgtgaaacatttatcgtgccaaccacaagccagcgtgggcaacggctttatcttttgtatagcgtaattcattatagtgcgccagactgagaagtggcgagaagtccatgggggtcgctggggagtccatgccttgttttaaagggggtgattatgatccaggaaaggtgcgctgtaatgggttatgttgtacaaggggtattgtcacaactcctttccgagataccgtggtggtattgaggcacatggtgacatgatgtggggttgtgtcttgtgggtacagtggtacacctctgatcagagtttaaactattcgaatagccgtacccgcggttatgggtgagttgagcaatgttcttcgtgattagtctcacactactcattaatggtaataatgtgtaattaatttaattcctggtttggaatggttaattcctggtttggagggttaatttgttcaactggggttggttgttcaaatatggttgggcctatgcaacacgggtgtgttgtatggtgtttatttaatattgactaattattcaactgttttactattctcttaaatatttattaaatgctgttttctgcaaatgagctatattatgccatcctttgttatcttgtgcacttgcatatttgctgtgtggcttgttgagtatatcatatgctcattcttgcaatattcattcatcagaagaggagtatctcagtgaaggtgatgatctggaggattaggcttgttctggttaagttgcttgtggagtggagtcgccatagctgttccgtagtttgttatagttttattttccgctgcgtagaatgttatttttctttgagaggaactatctacctctgtaataattttaatttgcaaatattcaatagttatttatttgtactctattattaatttgtcattgtgtgcctcggttgattcctggacgagggtttatcacacatgtaagcgtttggaattttggatagaaattccgggcgtgacaatagtcccggttggtgtcataaaccgggactctaaaattcaacgcgtattatataatccctctcccttattctctcctccacaaccggcctcttcgcagttatgctctcctccacaaccggcctcttatcctctcctccacaaccagcctctcatctcctcatatcgatcccttcctcctttcctcccctccccctctccttctttttggaaatgggactattgtggttttgggtcgacccaacaaagatcagctttctagtagtggttccttctctagtccaagagtccgcgctgctcatgcttgtactgcgggggatgttagagtatatggataagatcgtattgtatccggtttgccatggtaggataggattagtttctatctctatctcttaaagttatttaagacctaatctatgtaataacctatatataccggtcctttgaggctcaatacaataattcacgttacccagtatatctcttttcttatacaatccaacagaaaaacaggcaggtagtgatcttgaacctgcctgtaggagaatgagagtagcatagagagtcacaccaagtgtagtagtgggctccttatatgtgctataaattctcttatactttaggccagagatagtacgagttccagaacatcctggtggttgtatccaagaaaatatgtgtcccatacatactcgcacatcacctttgtcgctgtatatgatgccgtgatgggctttaagctagcagtctatgtgtaccgtggaggatgagtaaccaaacacagctgtccttaggctatcaagtcatgtaagtataggggactatgctattagacattggtactcttaaataggggtgaaaacggtacggaaatttccgagaattccggctaccgtttccggtttgcaccgaccgtttcaatcggtatcggtaattgtcggtatcggaaatggaaacggtaatctctttcggaaatggtagcggaaatgatatggggttttttccgaccgttttgtcggtaaccgttttttatcggtaatttccatcaaatttccgacaaaattccgaagaaggaagtcggctgggcctggctagcaggaggaggagcccattaggcattaaggagcagcccattccgaataaagaagccaactaggcctgaccgcatcgtcgtcttcatcggcgctggggcaccgccgcgccatgttgggcgccgccaccaagtcgccgacgccggccgcaacctccttcgccccgacggcctccgtcgcagccggccaccttccctcccccatgctccaccgccggcttccgtgccaccgagccaagcgccgagcgccgncgcacccgcccagccttcttcttcccaccgatgccgcccctttctcctctctccttcccccaccgccgcctgcgccaggccgncatctccggcgcctctctcctctcgggcgcgcgtgaaggagccaaaggcagagaagagaacgagagagaaaacaaagaagaaatcgagagagcaggaaaaggaaccgagagaagggaaggataagagagagagaaaaaataaaagaaagagaggaaaagaaagactgtgggatccactggcgggccccaccatcttgactcctctctgtgatcgacctggaaataccaaaaagtctagtttagcatgaaacttaattacaacagtagttatacagtgtcaacataaaagttctcatgcaatgtgccactgtaggacgacgatatagctatgtcaattgatgatgaaataatgaatgatgtttgacaaggagctgatcagctgaagccatgccagcttgtgagcttggtgttctcgaagacttcaaatctatatcctaaaaaaagtcagacaatattagttatgctgtaatcctatcatgtaagccacattgtatgctttagccacattgatgttgaagtatcattgaactttatttatattatttatcaatcttattgtcaacttattaatcatcatataacggtgttgtgtggcagcgtaatgatgcaagggtgaaattataaggtcatcttcatacatagttaaatgcgggatgataccacagttcgttgttttcgacatgaattttcgacttccgtccgatatcggtatattcccgttccgacggttccgtttccgagataccgatataaccgatatcgttaccgtttccgagtataccgttccgattccattttcgagaaaataaaatgaaaatggaaatggtagagggtttttccgaccgtttccgaccgttttcatccctactcttaaattggttctgactggaaaccggtagttttaaccagctcccgactggcaccaataaaaggtttctgcagtagtgaatgtggcatgcgagaattgaaacagttcgataaaaacagcaataacacattatgcggtctaatttaaattgtgtatggtgtcatctaatttaaaacatctattgggtaattaaggaaattgctcagtgacatgaaaaatgactgaattggaatccctatggctggtgcactgaatggaatgttggccggaaacattattgttcttaggttaggtgtataaattcgagcaatgtgggaagctggaagctagagcgcttagatggagctaaaaacacaaggtacactgcaagaaagatccattgattgtagggtttttttttggggggggggtgctgggaatctagttaattgcaactgctagtgtgctacaactttagctagcttaggcaagagatttgcattgcaagtaggatgcaactagggatgaaaatggtacgaaaacggacgaaaatccaactatcaagtttgaattgagtatattgggttgggctgaattgagtgacttaggaattaggatactgaattaggttgggctggggaggaattatagactatggtatgggcctttataattccagaaattccgagaaatttttcggaaagtttccgaccgaatccgagttccgacggaaactgcccttatcatattcgatttcgtttctgagaaaatatttccgaattcgtttcaatttccgaaaaaatccaaaataattctgaccgacaaattccgttttcgaaaataagcccgctgtaccattttcatccctagatgcaacatagccgtgaacttatttgcacaagtatcaaaaaatccacttgttctcccgaatcagtagatcgctgctcacccagatcccgtgtgttgatgggtgatcaatgcacatccgaagtcttgcttctgacggtctcaaattgattggagcaatggagttaagcagtgaccctccatgacctcggaactgattgtgatgttttcttttgtttagtacacttgtgaagctaatagtcatttgccgaccatgcgcaccacgcttaaccagaaaacaaacaaattagccatacaaatttcactttacattcctctccagatcagtttctcttaatctgtaaattggtcatggtgagttctagctagttattgtcttattgagggtcttctctgaccttatgtggaagttacatgttgttccacagttgctagctagtgttaattagctgttcctctaccttaatatgcgtggtgcctcattaacacaaccaattgggtaatgagaaatagctagagaagtagagattggatagcaacagccaacagattggtctccagcagaatgaacacaaccgattcactactaaattataatatgtttcagtaataagagcttgccaagttcacaactacaagagaaacttttcaagctagctgttatatacttgtattaaactgcacccacttggcaacttcttgtatccaaggtgcaatttactcaaatgagaactacacatataatgacattaaatggaatcccatgagttaggttcactaaatgaaaggtttggatagagagacattattgcttttagatgtataaattcgagaaatacaggaagctagaatgcacacaaatggagctgactacaaaaaaggtgcttacatagcaacatgaacatttggtttcttcaacagttgcaagaaagacctactaattgtagtattctccttcttaattgtaggcagaactcctgccatctgggtttataaagagaaccatggacagaaaatggtatagcgtgtgcagacgtgcagtgatataaaggcactacatttctagtgtcatctgtgtgaaatgtcatggtgtaataaacgactagttcgattgaagacgtatataactatatatatggcataatgaacaaaatcgagtcccatgagagcatagtgtactatatgatagggtgggctgaaaacaccattgttctgctaattttaggcttgaaggtgactgggaatctagttaattgcaactgctgcaacataagctacatcagtcaacagattagcattgcaagtaggatgcaactacattgtgaccctttctttgcagaaatagatgataaggcacgtcgatatcaggctttgccgtttgggtagatcgctgctcaccaagattccatttggctgctcattaattatctgaaattttggttggcgtaggctcagagagatctaagtgggagctggttgtgatgttcagtattgtctacacttacgaaggtattgctcaccatgtccacaaggcttcagctacgggactagagaaagaaacaaactagccctacaagtgaactttacactcctctctagtcaagtttcactgtcgtgtgattcgaacatatgctgataggtatacttctctaatacttcgagaaataacatattgcaaacaaactaactaaatgaggttgttaattaacaaatgtttacaacatgttctagtcgacaagccttttcatgttcatagcccaaaagttacttgaagagctgaaggtacgtagcacaaggtccatcctaacgtacttgcagttcctttatgctaagaaggtatcttgcgaaggactgaaaaatactcaaatgataacactttcttcgttttgcctattcgcggaataagcgaaacatcatatttgcaaacgaaaagtaatttgtgaaaaaaacttttatatactttgttaaatcaaagtgtgtttgattgttattctatgatgaataattggcatatgagattattggttttggtatttagagattattggcgaagtgggtttagagatgattggatttgcagatgataaacagggactactggataattggaccgtttagaccggtcaaggtttgccggtcacaccagaggtatacgtgtggtcagaccaaccagcccgcggtctgaccattcgactatgtgtcggttttagtttcgggttatttcattggatatttgtggataatttgtgtttatgacttctagatggatactatgtgtacgtaatactgttgtttgctaacaatgagtcaagttggagatagcttgtgctcgagatatggtttcttgtttgattcatgtgtaggtgatcttgacgcctcgagatagtatagcggattgggagtcaacttggagataaggagacgtccggacggtcagatattatgtgggatacttaggctaaagatcaatgcacatggttagtccagattccatatggcatacgatggaggtattgtgtgcgtatgggatgcggagtcgaatttggaggaagtccaaatttggaacgattggagtttgtaaagttagtttcttgtacgggaatgtttcctagaggattagaacttcttgtacaagtttggctcatggctttacgctaactacctcgggtatatatagaaagggagagtgtggcctcctggtatcgctttagagagcattgagttgagagaatagttagggtttcgagtttaatcgagattttcgtgaggagtgctgttgttgcactttgtaaacacagagagaagtaataaagttgtcatctactttgagagttcttcgatttgtgtttgctcgtgttcggcagtctaaccgtcgagacaccaccggtcagatcgatggcatcggaccagttagaccggtggagtaacggcggttagaccggtggcggctacaggtgacgacaagtgatttcggcagtcagaccggagcgactactgcggttagaccaacggtttccaggcggttagaccggtgcatctactccggtcagaccgcgtatcatcgaattgagagtaacttttaattccgctaaaagttttagtttttgggtactccaaccattcacccctctcttgttggcttagttcttgttgttcgatcctacattttcttctttggattttaatcgatctagagttttgccatggctaacaagtttacaagtagccacgtgttttcgatggcttggatttttcttattggtgtgacaagatgcaatcttacatgatggttgaagattatgatgtttggcaaaaggttgctcagacttatgtgattcctaatcaaattaataatgttgctttgaaaactgaatttaacaaaaattgcaaagctcgcaatattttattgagtgggatttctcgttcggattttgatcctgtttcacatcttcaaaccgccaatgagatttggaatgctttgaaaaactttcatcaaggaactacaaacattaaataacttcatcgagatcttttaaaaaaggagtacatttaaaaagatccattgattctgcttatgacactaattattcacaatctaagattcctcgccactttttgaatggtcttgatatgtctgtttgggagatgaaggttacatctattcaagagtctgttgatatgtccactttgactttggattcactttatacaaaactcaaaacacatgagatgaatattctttctcacaaagttgattctaagtctagtgcatgctttggtttctccctcgacttgtttggatattggtgcttcatcgtcaaattctaccgctcttgctttaattaatgacatgtccgatgagcaactcgaacaattcgaggaggaggactgggctttggctgctaacaagatttctcaagctatgaacaatgtcaggtacaggaaaagaggaggtcaaactcgttgctttaaatgtggagcacttgatcacattcgttgaatattttggattttcagtgcaatattttgaattttttataatggatttttgtacaatatcatgaaatttcctatagcgtatatttaagctttgtgtgtacttactaaattttaatatttagttaggagttatcccaccaattcctttgatacaaacaaacatcccatggtgcaatcaattgttttttgccacaccgcgctaagtgcaagggaatcttgattttctttttaagtcattgacatgtagggatttaatttattggaatataatattgccacaacggttgctgtaaccaaatatctgtcaagttgatcaaactagcctaattttagatcaatgtagcaaactatggttaagtgtggctggcaatcaaacatccctggagtatttatggtacaaattagatgagtgaaaaataaagttatcatgggatggagagaatttgtctagaagaagtaaaaaaaaaatagacacaacttggccgcttgagtgttgagatcatggttcttgtctttctgtgtgccatattgccttgttggcagtgattgcttcttgaaatcatttcatttgtaaagtatgacacgctaagattttatgcgtttacaggaaagagataaattaacagaagtcaatggaaatatttggttgaatcaagaaaataaatagactcaaccacggttagtgacctggccatgctattgagtacggacttgaacaatgacataagtagtcgtgcaaggtattgacataaacaatgatataaggaatccagcgggcatgtgatgaccgcagactttcagttactgtttataggtcatgtagtccctccgaaaaaaaaaaaagaaagaaaacacaacctaagtaccaagatactccctctgttttatttatatctatctagattcattaacatcaatatgaatataggaaatgctagaatgacttacattgtgaaacgaaggaagtatcatacattctagtacaacgaatatggaatagtatatatactccctccgtaaaaaaaaagaaaacacaatctaagtactgagatgtgatacattctagtacaacgaatacggacatagtgtatatgtctagatttaggttgtttttttttaacggagggaatactcatcatattatatgattttttagctaaggacgcagtattaaattcattgacattgagagtgtgctccggatgcccctatatataaatatataaatagacagagggagggacagggagagagaatgggtatctcaaatgctctgcaatggtgggaggagtggcagctccgggttcttctcttgggcagcctcgctttccagtacttccttttcattacagcctcccggcataagtttcctatccgatcctacctcagatcctttatctggtttgtatacctcggtagcgatgccctagcaatatatgcccttgcaaccctatttaaccgtcacaagaaacaggatgttggtcacacacacaacaacgatgtcttagagattctttgggctcctatcctactgattcaccttggtggacaggatagcataactgcctacaatattgaagacaatgagctgtggatgcgacatgttctcacggcactgtcccagatcaccgtagccatctatgtcttttgcaaatcatggccaggaggggacaggagattgttgcagtcggcaatcttgctcttcgtgcctgggattctcaaatgcttggagaagccctgggctctcaatagagctagcatcaatagcctggtgagttttgacgagaaagtccgtaggacgattaacaggcaaggcaagcagattgattcgatcgaagattttgtgcgaagtgcaaggggatttttttgtggaaatgatcatctggagaaaccaagtagatcagcggactttacacctgatgagttatttgtagaccttgcatctccttgtactgataatcgcgtaagaaaactaatgtcattctcagcactttgtggagacgaagcatattatttgttacagaacaacctgtccgacacctttgatctactctatacaaaagaaaagatgtcccttaaaactccccctaccgaagaacttgagactggccttcatcattttgttgaattatacaaacagttgaattataccctatttagctctctcagtgaattttttggtactgtaatacgtgaattagcaatgtttctaccatttacggccatcggcctatttcaccagagtaacagaaaatcttataatgataaagatgtcaaggttacttatgcattgctctgctgtactgctgtcatagagttttacaacccttttgtaaaggtattcacaagtgtgacactaaaccaacgatcaagctcagtttccaagctcagtcaaaggccaaggcaacgctacctttaccaacatcaagatgacatggtttcccaatacaacctattaggatactttgttcgcaacaaaaaacattctacgataatgaactttgtgggattctttgggtgcagaaactatcttgaccgacgttggcgaatgaagtcctgcttttcatcgcgcagcattacaaacgtagttcttgggcatgtgaagcgttggtggaaggatcacataactgatgttttcacctacaggatgttcaatgatattaggggtcaatggagtctcaaagttgagggttgctttcagggattaggctggagcttaaagggagctttcgatgagagtgtccttctctggcatctcgccacggatttgtgcttctaccatatcagtccatctcatggccgtgaacatgccacaacaatgtgcatagagcgatctctggcctcaataatcggtgccctacttggtgcgaaaaatctattcaccataaaaatgctgttcagtgccgagaaatgtcgaattacatgacgtacctactgtttgtcaatcctgagatgttgatgccaggcacaaggcgaaacctattcacagacgcctacaacgaactgaagggtgtcgtcaaggaaaagaatccaccactggatgaaagagaacttgcagagagaataatcgccgaggtgcagcaacaactcgaggagataactggggaagataagtcaccatccagtaaaagagggctcattgaagatgcttggtccattgctgaagagctcctgaagttagaagatgacgagaagatgtggagagtgattgaaggcgtatgggtggagatgctttgcttttctgctgccagatgccgagggtacttgcatgctaagggcctcggtacaggcgtggagttcctgagctatgtttggctactcttgcattacatggggatggagaccttggcagagaagctggcaagaggagacctccaaaacagaggacactcaggtaatttgcggacattccatgttagagagtcctctggtgaagagcaggttgctggaccatcgacttcttatgctaacggagacaacggtgatcaacatgttgttgctccattctctgaggatggctttaccttggctggggatgaaaatgtgtgacgtgatacttacaagatcacttagttcctgtttgttgctctttttttttttgttttgctcctgcatgtgtgtttcagcttttcttgcgatttaatattaccagtgtcatgcaactgatttttcatgtgaatgcttactaattacactaccacaatgttaagtcttaatgccagtatgtttttcttcttaaagttgtatgagcgttttttaagggagagaagcttgtgcgcgcgcgcgcatatcttctaatagtactagcctactaggtgaatctccgcgctttgctgcggaaattactaagtaaattttaatattttttaatatttgagctaaaactaaaaatgatattagttattaacaaataaaactggtttgtcaaactatatgttaggagagaaataaatttagtagtatgtatgtgattgtagataaaatatgatatcccacgctttgattatatggatgaatatatgttaattattataaaaatgatggatgtatatatgttaaaaatattgtgaaaaaaaatatgaagcaagatgattggatgttgatttatagaattcaatgaattatagatgatgtttcatgcttacataagttttgtatgtaattattactaatggatgatgaggtggtatgtttgcatgtagagctatagtattagtgggttataactttatagtaataaatgatatgatttatgatgaatcattgatcttaaaatgctctattctaaggtgagtcatagcgtacatctgaaaaagagtgtggccatggtatgcaaatcaacgtgtgtttgattattattctatgataaacaattggcatatgagattattggtttagatatttggagattattggcgatgtggttttagagatgattggattttacaagtgatgaacagggactgctggttatttggaccggtcagaccgggcaggtgctgccggtcaatccggagctatgtgagcggtcagactggctagcccacggtctgaccggccgactctgtgtcggtttaggtttcgggttgatttgttcgatatccgtggataattcgtgtttatgacttcgagatgaatactatgcgtatgtaatactgttgtttgctaacaatgagacaagttagtgagaacttatgctcggatatggtttcttggttgatgcttgtgtaggtggtcttgatgtctcgggagagcgttgccggtgatggatcgggagtcaacttgggagaagatgacatccgaacaatctggatatcatgcgggatgcttaggctaaagatcaatgcaagtggttggtgaagattccatatggtataagatggagatattgtgtgcatatgggatgaggagtcgaatttggagagagtccaagtttagtacaattggagtttgtaaaatttgtttcttgtatgggaaggtttcctaggggattaggacttcttgtacaagtttacttcgtagctttaggctgtctactagggtataaatagagagggagggtgtggcctcctggtatcgctttagagagagttgagccaagagaaaagttagcgtttcgagtttagtcaaaattttcgtgacgagtgatgttgttgccctttgtaaacacatagagaagtaataaagtttcaatctactttgagagatcttctatttgtgttttctcgggttcagcactccaagcggtgggacactagtggttagaccgacggcattgcaacggttagaccggcggggacacggcggttagaccggtggcggtgacaggtttcggcggttagaccggagaaactacctcggtcagaccggagatttctagacgatcagatgggtgcatatactctggttagaccgcatgtcatcaaaattgagggtaacttttaattccgttaaaaattttggttttttagtactacagccgatcaccctcctggttgggctagttcttgttgttcgatcttacaagtgggtattagagccttgttttcttctttggattttaaccgatctaaagttttagccatggttaacaagtttacaactaagccacatgttttcgatggattgaaactttcttattggtgtgacaagatgtaatcttacatgatggctgaagattatgatgtttggcaaaaggttgctcagccttatgtgattcctgatcaaattaatactgctgctttgaaaactgaatttaacaacaattgcaaagctcgcaatattttattgagtgggatttctcgtttgagacataccaagtaatgtcatcgatcatcatgagttcattaactgagaggaacttttcaagttgctgtattaaaccgcacccacattccaagttcttttatcagtgtttcaatttactcataagagaattacattatgtgacatgtaatgacagaaatggaattccatgagttaggaacactaaaagaaaggtccaactggagacattcttactattatggagctgaagatatatggagcaaagtgggaggctagagcacatatatatggagcagaagacacagggtacatttttacatgtcaacgtttggcttcgccaataactgcaagaaagacccgccaattgtaggcctgagaggaacggggaatctagtttattctgcgcgcttccaccatatcgaacattatctaccttaacctcaacttttttttttattacaaagtagtatcggatgcaactaaagagtgacgatgaacttatatttgccgaagtatccaaaattgcaatggtaagcgaaacggccccatcatttcgcttattctaatgaaaagtaattaatttatggataaaatttttatatacgtgttcttagcgatttaaaagaaaaaaactgaaaaataaacttcgataaaaaaaccttaaaatcaacttcaaatttaatgttgaaaaatcaaattttagttgaaaagtataagcataagcgaaaatatgagattcttagtcgagcatgagcagatcgctgctcaccaagattacatttggtgggtgagtgcaggtacgtccacacactcttatgttgcaaactcaaaacaagatgaagcaaggtcctcttatataggatcaaacataagtaaccaagtctactagaaaagggtgagtggtagattacgccagcgaaagtcaaataatcgaatcttgatagatcaaaacacaccccaacattaaaaaccaatggaatatacattcggtggtctatccgacctactatggtaggtctaaccaaagcctggccggtttgaccgcaggtcctctcgcgatctgaccgtcagcctaaaaacagcacgatagaggttcggtaaaaacacgctttctcttaaaccaaccgttggattgagttgcaaactttacagaataaactagacaaaccaaggaacaactccaccacagggatttgcaaattacaaaacggtttaagagaaaacaccatcgattagggctggacgaaaagctcgtgtctcattgactcactcagctcttatctagcttggctcatttggatttattaacaacccaagccagggttttagctcgtttgttataacgagccagatcaagctggcccgtgagctgttcgcgagccaaacgagccaagcacaacagctcaagtacctagttggccagcagcaatatgaagcgaccaagctggcccatcaagaaaaagcccatgaaggaaagaaaaatactaaccctagatggagagacacgtacatgacctgtctctcgcactttgaattcccgatcccctttctactctagcatcgctcgctctccacttctcacgcaccgacgaggtcgcgccgtcgattgctcgtaggcggtagtggcaccctcgccttggtaggccctcgcctcagtcggccccgaccgccggccctcgcggcatcacctttgtcggccccgctgccggcccttgcctctgtggcttcgtcggcaccagtgcatctacaccatcgatgaagaaggagctaggaaggtgaacgagtcaatgagaccagccaaaccaacatttgtacatctcttccaagatgattatctcttgcatgttttattgatggcaaaatttgctaggacatccaaagactgtgctctttgctagaggacactgaaagaatacgtttttgttagatgacactggtaattagctgctggacacctacggtattattttattatatctagagaaatatttattaaagacaagtttacccataggcccacttgtcaatcacacatatctagctttctctgttcatgttcttcttcctgctgctaccttctctctcatgcgtgtgcacagcagcggcaatggagagcatgtgcagttgctggctggggcagagcatgcggcagctggttggaggaggtaggcctggagcttggccacccgtcagcggcgccacgagagagccgcacagctagggtgtcggtgcgggagactgggttgcaaaggggaaatatagcgcagcttcaatttgaccaagcagtaagtacgacggggtgtctaggaactttgggaagtcgatttccaacgattgcaggacaaagcaatgtcggggttgtgtgcccatgatgagcttgacggcagcccaattgagtttggactggcaaggcatcttcgtctaatttttaaaattgattgggtgcagtgcctctatgggtagggaaaaaatttaggatgtaatggattgccggaaattggcgtgatggcgaatgatggcaacgacatcgtgctcgccatcaacgagctcctcggcagcttcaggtgcgtcgtcgctgtcggcggtgaacccggcgatgcgccgccgccccgccgtggccgagccgtcccggctcggcccggccgcgttggccacgcgcgtcacacctctcgggtcgggccggccgcgttggccgcgtgcgttgcacctctgctcggcagtagcaagcgcgaggaagaagggaaaagaaaagaagagagatctggagtattttggtacttacacaactctttctttctccatttaactgaaaataataaaataatgtgagaagtgtccaacagctagttatcacttttttacggtgtccacgaaaagattcacgatctttggatgtctcacagcaaagaccgtaatcttttgatgtcttatagcaatttttgtctttattgattcctcatttgcatttttagatctggaatgcccctgatttatgttgcagtactggtttaatcccgccactcaattacatttgctttgtagtgatcgatcagtgcaagctcgtgatgtatcatcatattcattttcttttccaatctgtttgtttgtgagcgtttgccctcttcctcctccccatcccatggcatatgccgctactcttttccttcttctgtctcacgagctaaacgagctagctcgagctgacacacgagccgagccgagccaacactttagctcgttaggataacgagccgagccgacccagctcgatatccacccctatccttgatacacatccatctcagatggtcaggtggagtgtcagtattattttcacacgccatgtcgattggtgtgacgaaaagtttcaaattttagaaataagttttgaaagggttcatttttttaaattaaaaataaggttaaaaataaaagaaaatccttttctagcactaaaacaatgtcaaccacatcaggtggtcaatgactaatctgaagcacatagttattgtgaagcacatcagtgtggagaagccctcccgtcgccgacagcaaggtgttggacgccaccgcctccaacgtcctcctcggtgcacccttcgcccaccgcagagcgccctcccgtgatgccgccagccgcctgagctcaccccgcctcgaccgctggccacccgagttctctctgcctctgcctccaccgcccgccgcctaagctttgcctccgctgtcggccactcgagtgagcgagagggagagagagagaacagggattagggagaggagagggatgacagctgggtccacgagttcttttaattttatttgctgactggattgccacgttagcgccacgtgtgcaagtttaagtcgaaaacaactcaaaacagtacttaggagggttatttgtccggtttgtatagttggggtgagatgtctggttttatgttttaagggggtaatttaatcgaccgtgatagttcgggagggggtaattaatttgtactttttcctattataatactccctccgtctcataaaaattacatttctagctaatttaggacaaaacagtaggattgaaaaatgaccacaatgaccttatttaatgaacccattgcatgcacatatttcatatatacaaatgattaaaagtaagtttagagaattaacccatataattagcatacctaaattacaagctgagagaacttaaggaaacttatctagatgaatcaatttgttgggacaaagccttagagctagaaatgcaattttttttcggacggaggtagtacaatgnaggagtgagggtnngagctagagtgtcntacctggggcgcg

SEQ ID NO: 17108 - DNA, 822 bp, Oryza sativa
  unsure (1)..(822): unsure at all n locations
tgcggaanaaagaaagagttgattaagaatcgatttcttctcgaaacataatgacctattatagattttttgtgttnnctgncanatacnccccccccccccagaggntttgatgtanatcgcctgctgccagcaggcgactctagaggatccccaaatatgatatatatatatatatatatatatatatatccatttttcaagtttgtaataatttaaactcaattaattacacgttattaccaccttttttgcgtgaaacacttacaaacaccacctaaaggtgtgttggagaatactacctccgtttcaggttataagactttctagcattgcccatatttatatagatgttatatatcgcggaggccgggggcgaggaaacggtggcggcgcgcgcttttccaacaaaccgcgccccacctgtcagctatgtggcaagattggacatgtggtggcagactgctggtacaggtatgatgaaaatttcattccagattcaaaaacagcagctgcggcttcctatggggtagatacaaattggtacatggacaccagagccactgaccacatcacaggagaactgggcaagctgacaacccatgagaagtacaacggcaaaaaacaaattcacacggcaagcggtgcaagtatggacattaagcatattggtcatttctattatttatacccccatacgcaaaaatcaggtgaaaaaaatcccttatggggcctaaaactaaaaaaaaaccttatctctggtcaatcgattaaccggtggtaatcaagcccttggtggaagacattcctttttcttttgca

SEQ ID NO: 17109 - DNA, 1270 bp, Oryza sativa
ctctgattgatacagtctgaatatgatgctaagagttatatactgatattcttacaaggttgctactcaactagctgcctttttataaagcactgtatctgtggaattgaaaagcccatttccttctcatgatagaatagattgattatagttgccacgtggaatacaagattagaatagcacaagtgcaaacaatgttgaactcatagtgctggtaaggttcaattagtgctggtaaggttcaattcagaaggttggggttgtactctagtgcagccattaaaagttgaacagaaaacaaatgtacctttccggtgatctttgtatagatggaaagaacatccatcacagtagactcaaagtgtgttgtggcatcataactctgaaaagcaaatcgaattaaatgtttatttcaaatgcagttttttggtcatatgtctaacctacatacacttgatatttctgcgatgacttactgttgagatgaaacaattgtctgaagatgggtcattagtaggttcaaatctgtcgtatgtatcaataaatagttcatccactggcccaagaaggtctatccctggtttcaattccgccgctggattttcactctctgcttgtgctgacacgaacgcgatgaacttcccttttgatgcaacattgtgagagtaggaacaacagaaaacatacctggcatgcaccagtgaacattcttttgttacaataatagaaatgacaagtagaccaagagtaatctataggtgtaatgcccagtaatggataaaaaccagaggtgatatacagaatacttgcatgtctgatttgcgtccaagttgcttttgtggtattatgatctgtacagagtgagaatctgcagtatttgggattggatggctcatgatagcgattgcccgaaaaacttttccaacttttctaacctgatataacagcagataattctaatcagtaccaacattttgtaaacttctacgtcctctaatcctaagcataagttgttttggacttgtgaataggaactaaggccccgttcaatgtggggttttgtagacagattttggttgcacgcaaaacgagaaacatcatccacacatgatttattaagtattaattattataaattttaaaaatagatttatttgtttttttaaataacttatatgtaaaaactttttgtcaaaaacacaccatttaacagtttgaaaagcgtgctaacggaaaacgaggggtaccgagctagaatatcaatccagcg

SEQ ID NO: 17110 - DNA, 654 bp, Oryza sativa
ttttaatatctgtgccattcgtgggaagaaatcagttgggggtagaaaggcttaggaaccctctgctcatcaccacccctggaggggttatgacagcaaagtatagaaattcaggggcttccttttccctcggatctgattctgctagacaccaagaacttggatgtgatccttgggatgaattggttggctcaattccaaggagtagtggattgcgcgagacgcactgtcactctgtaccgagggccggaacaaccggttgtcttctttgcacccccaacctctgtcaaaagttcagaacttcatgagataggactgtcagaaatccccatagtcagagagttcggagacgtgtttccggaagaactacctggtatgccgcccaagcgagagattgagttccggatagatcttgctccaggaaccactcctctgtacaagcgaccctaccgtatggcagcaaatgaactggccgaagttaagaaacagttggaagagttgaaagaaaaggggtatatacgtccgagtacttctccctggggtgctcctgtgatttttgtagagaagaaagacaagacgaagaggatgtgcgttgactacagagctctcaatgaagtcaccatcaagaacaagtatcctcttccccggatcgat

SEQ ID NO: 17111 - DNA, 591 bp, Oryza sativa
gtgtccctttgttgtctacctggtacccttcatgttcctaaagctaaaaagaaccttatctctgctcatcgtttagccgttgataatcatgcctttgttgaagttcatcctcgtttctttgccattaaggatcaggtcacgaagaatcttcttcttagaggaccgtgccgcaatggactgtacccgttgccaacatcttcattcgccacatccaagcaagtccttggagccatcaagcccacaatgtcaaggtggcatagccgtctaggtcatccttctctagctattgttcaaaaagttgttagtaggaataatctcccatgtttaggagatgtcaatgagtcaggagtctgtaatgcctgtcaacaggccaagagtcaccagctaccctatccaaaatcctttagtgtgtcaaataatcctctagaacttgtgttttcagatgtgtggggacctgctcctacttctattgggggcagaaagtactatgtcagttttatagatgatttcagtaaatttacttggatctatttgcttaagagtaaagctgaagtttttcttaagtttcaagaatttcaacaacgagttgag

SEQ ID NO: 17112 - DNA, 587 bp, Oryza sativa
gataaccgtcgctgtgacctggaattcgcagtgggtgactttgtgtatcttcgagtcacgccattgcgaggtgtacacaggtttcagacaaagggaaagctcgcacctcggtatgtgggtcctttccgtatcattgcccggcgcggagaagtcgcttaccagctggagctgcccgccttcttgggcaacgtgcacgatgtgtttcatgcgtcgcaactcaagaaatgtctccgagtgccatccgagcaggccgactcagagcaaattgaagttcgcgaagacttgacctacgtggagagggcagtgaaaatcctggacaccatggagcgcaggaccaggaaccgggtaatccggttttgcaagggccagtggagcaaccccgccgaagaagaagcttcctgggagcgtgaagattgactgaaagcaacccataccgatctcttcgccaagtcctccgaattttgggggccagatttcgtttaaagggggtagggtttgtcccgttccaaaaccaattttaaatatatcctctaaaatgtggccagaattattaaaaaccctgtggaaaggcttccacacatttaaag

SEQ ID NO: 17113 - DNA, 572 bp, Oryza sativa
aatttattcatcactcagtctgaaaagaatttcctataaatatttgcatatgcgcatgcgaagaatatttaactgtgcgacacttaaaacccaagttccaataagtttttgtgtatgtctccactctccataataaagtagagcagtgccatctaagcccaacaaactacacacaaactccagaatataatcaaatataaattggagccgggcctgacctttggaatcatgtctacattgtagtctctgctagccccaatttgcgccgggggagtaccttcacctttgaaccttttccatagctggcatacataaacaatgagcttgatcagataatttcatctgataggtaaccaacctcacacaaatttgtctgaaactaatattgatgaggaaatttctaacatcccttagcacgtcaggaaaacagaagttggcagacaggtaggtaagataatgttggcaaatttttgctacggagggtgaagccttgtcacctgattcaggttgagcgatgtggagtctccaccgtagtaatcattcctgtccatatgcagcacctggtgacaaaa

SEQ ID NO: 17114 - DNA, 5335 bp, Oryza sativa
ccgtcgctgtgacctggaattcgcagtgggtgactttgtgtatcttcgagtcacttttgtagtcatgaaactgctccatgatatacagatcattgctagcatcagtagcaccgaatttagtattcagtgcatcccacaactccttagcgtcggtcatatgcatatacacctcgaccagacgatcgccaagaacgctaacaatgcatcccacaaagagagtagtggcttcctcgaattgcttctgctgttcagcagtaagaactccttcaggtttgccagtactcacccagaagcatttcatagctgtcagccacagagtgaccctgatctgccatctcttaaaatgcacaccggtgaatttatccggcctcagtgcatcggcaaaaccagccatagtaaaatcacagtgcctataataaggtttttggattgttgagattatgggcatataatgatttaatttattccataaataaatcatgacattacagatgaaaactagcatgaacgcatcattagatctacacatgtaaactacgcagaataacatgaacatatcaaatatgcgcaacatattgaacacgtaccgaggtgatgaaaagaccggctgcttggtcgaaacttttcgcaggtgtctacgaaggcacgaaacacgcgagcgaagaggaaggcgagccgtcgcgaacgaacagggagcagtcgcgcgaagcgcttcccaaaaaccttattgccgccttctcccggtgcaggacgtcaaaggcagaggttccggagacctgctctcccgatcgctggtgcacgccggcgagcgggatggagtagtctacgagcgacggcgcagtacagagtaggaggcaaaccctagattgattttcgcatatattgcgtgaagacggcgggtcggtttatatagagaagggtcgcttgatcagggcgcccgcacgatctctactgcgcgtaaccgaaccggataagtcgcgcgtaacttatccggactccacgccgtttgcacgtaccgtatttttcggaacgtttccaaaacaaaaacgaatccgaatttgcagcaaaacaaaactgcaaaaggaggctgcatctgcgcaagggtgctgcatctgcgcaagggtgaggagccaatttttcggaccattcgacgcgtacgtcgtgcacgcgcgccgcctgccctgccctgccaggccaggcgagcgagcgcgcgcgtgtgtttcccctcttctctccaccacacatgcttcaagtggctaggagagcatcctcccttttaaggaggtccccctctcctagaataagcaaggtggtactaaactccacatgcatgccatctcatgaggtgggcttttgtgattttccaaagaattaatcttcgagtgggctaaggcccattcattaattccaacacacttcccagagtctttccaccgtgcatcttcggagacgtcctagcgacagctgcaaaaacaaaggtttgatcctcttttccctcaacggttcaaacgaaataacaactcccagtgggcatagtcgacggtgaacatggaagatagacgcgatatcaatgcattccgagtgatgagaaggaactaaaggtaccctttctaaaccaacacctttgatgttccacatatccaaaaagtcgagaagccccccatcacccttgagatcggtcaacaacaaaaaacacagaatcaacattcaagaacaaaatcaacatccacatatcaaaaataaaatccaagaacacagaggggaggacaccgaaggagagaaggccactgccactactgctcattgtgggtgaagtccactcttgagcgccgcatgatgggagggcagcaccattcgttgagggagtcgccgtgccagggacaattgagggagccgctgccggcatcaagtggtccgtccctgagctcacagcgatggatccaaccgcccccgtgctcgtggcggcagatttggccacccccttgctcacaacaacaaacccagcggagaggaggagggacggcgtttgtggcagagatgaggggcggtggtggcaacgtagataggagtggtggcagtaaccaagagagagacggagaggctcagagagagtggcgagagagagagagagagggagagagaggctggactctagagacagagtcatccatatataaaaatccaggtcggctcgattgtcggcttgactacctgaggagtgttggttttctaaaagattacccggttgaagcattagcttgctttagatggtatacgggcggcaatggaatgggttcacatgcccattatagcggataccagattaccggtaatataatccagatgtggcagttagccttgtgaaggactgctccggccagatatattcacaggcaacggtgattactgaagtaattaataagcacaatgcagtgttaaattttactaaataaagagcgaaccaaatagagttggcggatccagcatgggggcggcggggtctcgagccctccattactggcgtgaagactatgagagaccccacaaagaccccactaaaattttttaccatgggagggggactgtaactctatctagtttgcttagaccccactactatttatttctagatccgccactcttcatatttttgctcagcaatgtgcacggcaacatatatggaatggcgtttctgtgctcccgaaggaaccccattctcttccaaactgttcagattcttacccagaagataaattttgctacggaacacctcaaattttagataatttgctgatagatatggtaaaaacgtgttatggctgaaagacaccataaaaaactgataatttgctagagaatactttcgattcaattgaagagagaattcttttcaaagacgagaatgcccctagggccaaaagcttctgagttgaggctggagtgaaaatggaatatgatgtacgcttgcgatgtacttaaggtgatcacaaatttaaagttgcataatttctaaactttcactctaacatcatgtgttaaagcatgtggtcctaagggtattcttgtttttcttaagaatttatctccagcaaagtgttctacaagaatttatgtgcagcaaattgttctccaacaaattactattttttgggtttttttttcagctatcacatatttttgtgatgtctacaagcatattatagaaatttcgggcatcatgtaacaaaatttgcctacccaaaatataagaaaaggaaatatcctggggaaatgagctatgtgttgaaaactcatgaaaaccatactttaatattttgtaaattcatgaaaaaatattagagataggtgtaaataagaaataaattctcactaaatgttaagtccaaactcaacttcatttgagagaaagaaatgacaaacttcatatgaatataactcacaaaataaattagaagctagaaattaagaaacctaacttccccaaactttatatgagtagaactcacaaaataaactagaagctagaaattaagaaacctaacttccccagatttttatgagctgtttatcataatcgcaacttctcaaacaagatcttaagctcaactaagatagattttttaagagtgaattcagaaaactattgatacatcgaccaaactatatatcatgaaactatagttttaagaggtatatcacaaaactatagatttaataatcaatttgttacaaatttacaatttattttaaggtgatgttctaaggtagatttatgtgctataatatcggtgcagaaaaactgaaaacgaggagagagcgagagaagagctgggggcagctataaaaaaaatgtatatttaacttgtactcatatataactattcaaaaaaatgtgcacgacatagttggctagcgccacgagcgagactgcaatcaataggttgcgaggctgattctttctttagctagtgcatgtgttagacaatttcttttaccaaccccggacgaatgtcaatgcaatccgactgttagaagggaaattcactgtttaatttctagcgattccagaagagtttggtgctgcaaaattcgcagcttttctgatcttctttctcctttatttattgatctcctcaagtgggagtttgttacatactacaaacttttcttctttttcttttttgtttcatattacacacaaacatgaccgattaaaacgcacgatgcaacaaacgcgctatcccacgtcgtggcacatccgacttcggtcagaaaacgagctgaagaaacgcttaattcttggcttcactgaatataattccggtaaccccggattatatccaattaaccactacatgaaacaaaattaattaacttaattcacatgagaggtggcgtgcaacagcatcgcatcaacggtcatccccgggccgaacgccatcatcactcccaactccggccattcacccgccgccgccgcctccttgcgctgccggcgcagctcgtccagcgcgaagatcaccgtagcgccagacatgttcccgtagtcgctgagcacacggcggctcgccgccagcttgccgggctcgaggccgagcgccgcgtcgacctggtccatgatcgtcgacgagcccgggtgcaccgcccagaacaggtcgttccacccgccgccgccgtcgccgccgagaagtgggccgaacatgtccaggaggcaccgctcgacgttgtccccgatgagccccgggacctgccgcccgaggacgccgtccaagcggcgctccgtgaaccgcatgttcagggcgtggtccgactccgggatgatcgtctgcgccgccgacactatctcgaacagcgggcgctcgacgtcgtcggcgtcggcgccgacaatgacggcggccgcgccgtcgccgaacaggccctggacgaggagcgtcctgaagcagccctcgtcgggcccggtgaagtacatgaaggtgagctcggcggcgacgacgaggacgcgcgcgccgcggctgttctcggcgaggtccttggcgaggcggagcgcggcgcaaccggcgaagcagccgttgaggtggagcatggtgcggcgcacggaggggcggaggccgaggagcgggacgaggcggaagtcgacacccgggacgtgggcgccggagttggtggtgacgacaaggtgggtgatgtcggcggccgggcggccccactcggcgatcgccttcttggcggcctccgccgccagctccggcacggcgtccgcggcgatgtccagccgcgcgtcgagcgacggcgcgtcgcggtccacgaactccgggtgtgcggacagcatcttctc

SEQ ID NO: 17115 - DNA, 29501 bp, Oryza sativa
  unsure (1)..(29501): unsure at all n locations
atttttttttataatttgtagtttgtaagagttctaatttgtatatattttttataatttgtaatttgtaaaagttgaattttaacatgtatatttatcgactgatacatcacatgctaatacatctttttttttgcaaatttattttgtaaccatttgggtgatatatgtaaacaacgagtggacgtgtgaacgttttctcgagggtttaaaatccattctcggtggaggttgtatatgcaaaattaatatatcgactgagaagagttggatagtagaaggagagaggctgtcgtgtgtttacacgtacagatacgcttgaacttgtccttgagggcagtgaggtggtcgctgttggtgacgcggaagtagaagtcggggaactcctcctgggtaacgcagttgggagggttggcggtgccgatggcgagcacggcggcgagcccgtcggcgcgctgcgaccgccgcatttcgccgagcgggtataaggcgcttcccatggtcgtcgtcggtgccatgcaaacaattaaatcactgcaactaattcttcgatctcgatcgatctccgcccgccttgcttggcacgtctcgcacttttgttttgcagaccacctcacacacttatggtgtttatatagcagtgcgctggatatatgacccactgcttgtttgtcagttgccagatttttcaaaacatctacgtgtgctgttttgtgtatctatctattatctatatatctatctatctataagatatatcttaaggctgcgttcggcagctgccgattaagagaagacttatctcttcactttccgagtaattaaacggtgtgtttaattttcttcaaaaattttcaataagagttgctttaacaaatcatatcaatctatttttaaattttaaaatagttaatactcaattgatcatatgttaatggctcacctcattttgtatatctcaatcttctcttttcatctcctttcaaacacattaaagtccattaaacatcctataaacgctccacgtgacacttctacaaacgctttcagaccatcatgtgacgctctaataaattagagaaaatcatatatattctgagaaaaaaatctatccatttagttccactcaaattagtggatccgttattttgaaccactagattacgtctattaaaaattaattccgtcctaattgatttcccgtgtaagtaagagataaaatacctacgcatagcttcacatgaaaataaacctaaaacacattaccccttgaacttcttagtattaaaaatcaaccaaatctaaatagatagccacatataatgtcaaattacccgtagcaaagcatgtgcattcaactagtttacatttacatttatatgctcctaattgtcttataattaagtgccttatatatgtcgccttccactttggcgtgcagtgtaaagtttagttctgacttgattaattaggcaatttcaatattaccaatcaataattgtatgttatacttgcattggtttaaaaccgcataaattttagtgaaattcaaagttcatcttggagtcctcgtttagtttttttatttaataactcaaattcaaaattaacgattctagctagatgtacactagatgtagattgaattgttatgattcgattagggcacattatttttctagttacgttgtttaaattatcaaatgtttctcttttagaacattagtatcaaataactacgacatgttctttcttagcagataatggataatccggctttgacttaagaacaagctacccccacttcctatgaagttttcaactgaatcaacagtaaatatgcatactaatgaaaaagatgacaagaaggagaaacattattaggaggcttcctattggtgaatcttcatccaatgttagtgaagatttgcatgaccattttctccaaactctggcgtacaatacatatatgagttccttgtttttatcacacttttatagttgggcccaaaactgcagccaataaatataaaagtacttgcatataagatttaaaagtagctctgtcaaacaccatatcactcatggtaaaccaaagaacctaacataaaatatatggatctactaaaataagctttatggttcttacgtcaacggcactaagctaactcccccaaaatgtgaaacattatttggtggattcaagccaaaataaatacggaccaatctccaaagaaatttagcaaagtgacaatcaaagaatatatgttggacagtttcaatatgcatacaaaagcaacatttttttagtactagcccaatttagtcttgctaaattatccctgtttaagatatcccctttaattaagcaaatatcacataaatatttttattttaagaggaatcccattttgttcttctcaatatatataaccattgttgattgcagctaagtacataggatggatagagaacataccattttgatgaagattccatcaaaatatatctttatcctcatttagattaatatcccaaatcattggttcattgatgtacttggctagtgcaacgaggcctgatatctcatttgctgtaagtaagctgagccggtttgtctcaaattcgggagatgatcattggcaggctctggaaagagtaatgcgctatttaaagggcactatgagctatggaattcactataccgggtactcaaaaatactggaagggtatagtgactcaaactggatatctgatgctgatgagataaaggccacaagtggatatatgttcacacttggaggtggcgctgtttgctagaaatcttgcaagcagaccatcttaacgaggtcaacaatggaagtagaacttacaacactagatactacgacaattcaggccgagtagcttcgtaaactcctgatggatttgccggtggttgaaaaaccagtgccagctatcctaatgaactgtgataatcaaacaatagttattaaagtgaacagtttaaatgacaacatgaagtcatctaggcatatcaaaagaagactgaaatctgtcagaaagcagaaaaactccggagtgatagcattggactatgtccaaacggctaaaaatctggcagatcagtttaccaaggggctaccatgtaatgtgatagacagtgcattgagggaaatgggcttgatacccacctaaggtcacacaatagtggaaacctgtccattgtgatcggaaatcccgtgaatttggatggcgaaacaaactattgtgtggctgagagaagagacccttaaaaatggctcattttcatgatgtacttctcttctattctgcatggtaggatggcttatgccttaatgtggtccaagtggcttttctaagcagagatgttgacctgcagaacatctcaaaaggaacacacctatatgagttcgactgctagccacagtctatgagatttgggcgatctctagatactcatgaaagggccttgagtttgacttatatgctccaaaaagaggggatgcaaacggcaacccagtaccaatcaagggtttgagtgaaacctgatcacacaagactaacaattcaaggcatagtccattgtttagttgtggtctgatgtagctcattttctaggtggaagttcaacttaacagtctctaccaaaacattggtatatcaaacaggttcaactttgagaacatttcttatgagccatgaaatttggtggggattattagaataaatgggctaggccctaattttctattaaatctcaaggccccataataaatgttaaggataataataccaccctgagaattaaaagaggagtatctcaacttaaatagggagttattggaggctcgctgttgaccggttgaggtggggattagaaagccacacgcgcacgcgcgcgcgccgagccaagccgagccaaccggggcgaggctgtgggcgaggcgtggcgtggcatgcgttgcgtctctctctctctcctttttgcaacggaccggaatccaatcccgcgagattgcctctgtaatggatagttgattcaatgcgattgattgcatcgttactgcggcaacgggcggattcctctcctgcgctattaggaaatagagcaccccgatcagatctcaaggcttagtttccaaacgctggttcttcctcctcgcgcctgtgctgcttctgtttttcccggttctgatcgcttgcgcacacgagagatcgggacgaggagggcctctaaaaccacacattcgcctaagatctgcaccgggtaggcgggtgatcaggtttgcacgactgctcttcttctgttcgtcgtctgttcatctgcatcaccatgtctggagttgtcgcacctagagatggcacacctggagcgggagccggagctggcgccccgatcgacaataccaacggaggcagttctgccacataatccagcggagggactttcacagtgtataactctctaccgctatttctgtttttgttacttctgttagtcgcaatgctattgcgttctctacatgatgatgatgcttattctatcttaagcacgctcctggttatgtttaattttatcactagatcacctcacattgttcatgccatgattattgtcttaatattttggattaaaatatgccgatatatgactatatttccaacagttacatgattacatccttacaaaatataagaatttacatgttattaagcagatattaaggttttaaaaacactttaacactccttatatggatggttaggggtgggaaaatggtaaagatatatatatatatatatataggtcatggttaatgggaccctttactctaaacaatgccacatgcaatcagttatattttaatatgttttaaatgctataagtgcttacctttagcatcaagcatgtggtttccccgccgtcgtgcagctaaagatatatacacatgcatgacgccatcgtgcgtgaaatttcttggtacagactcgcggtggcggatttatgaatttttttttagcctgcacaaacctaatgatagaaaataaattaacaagcaaatacaaatacatatagcattttatcatgaatagaagtaaattggctatcatcatttatatactaaaagtccattaaacttcctacaaacgctctcaagccgccacatggcctcctacaaacactcctatgtcgccacgtggcattttataatctcaccgtcgattttcttttaaattggtggacccgttaattttaagcgttagatctcccttagagaaaaatcatccccactatttttgagaaaaattaccgtatttgctttaactaatagatagaaaaaaaaagagaatcccataataggacaagaggccagtgaggatcgggcagggtacatacgttctttttttttctttttctggtggcatacgttctattttttttcctggtggcatacatacgttactacgttagtatttttttcgcctttttttttggcaaacaatactttttttgctttacacattcggcaaacagtactattactacgatacgatacgtacatgtacgggagtttaggggggaagtgttaatagatataaaatcacatgttaccaatttaagggaaaatcgatggtttgattttttttctcataatttttaatatttattttaatttagagatatgacatgtagtgacctacaagcatttatacgagcgccacgtgccggtttaaaagcgttcgtgggaagttcaatggacttatatatactaaaagacaattaaacttcatatagacgctcatataaacgctcatacatcgtcacgtgacattctataatcacaccgtcaattttcttttaaattggtggacccgttaattttaaccattagatctccatctcaaagaaaataaatctggtatccccactactaacaccttacatacatgaggtaaaaaaaagctgtacatactctttccaccctccgaatctcccctcctctcctattttctagctaacttatcctattttataattaacactcaatatatcaaaaaaataattcagacatctaaataatcataaccctcaagttacaattttattctcattttttgttaattgttgtgttatttataattaaatataaaattcaaaatccatattgatcatattttgttatctaaatattagatcatgcaaccattctaactacaaatgtctaggcctaatggtacacctataaacgcttctaagtcatttgccacatgacactattaaattaaaaaaaatctataagtgtgacaaatgaaaacaaaacatctaaccatcagtttacacttgaatcaatggatgcactatcttatatggttagatctatctttaaaaggaaatcccaaaactccgtcccaaccgtttgtcccgttcctctctccctaccattcattatctgttatttttatctccatagcaactaaatcgaaaattatctttacgagaaaaaaaacacacccacaaatggactccgtctaacaagtctagcgagcttttcctttgccatgtgcttctcttctctttctccttaagctagcacttatagaaacaacctaattagaatttaaaataatcgtaaatttttaaatcttatattcaatttatgacatttttaaactattgtaagtttcaattaaatcaataatttaatacattgtggacccatctattcaccttgaaacctccaataaataaaataaaataccaaaatttctaattaaaaattaaaatatcccaccttatgtttttaatagcagtcaacccattatttataccatgctaaatagctaatggccttcttccaactccttctgttttagattacaagtcattttaaattttgtctatgtcaaattacttgaattagtttataaaaacatagtaacattttcaacacaaaacaattatattataaaaaacatattcaattttgaattcaataaaaataatttggtgttgtaaatattgatatatttttcgtcaacaatggaagtagttaatttctcttaacattcaaataggggctatttacagatacttagatgcgcttttatgaataaatgatcttttttagagataaatagacgttcctaagatcatcatcacatctaaattatacatattatatctgatgtcactaatagattagagtaaaagcttttaattatatcttttttcttgtcataacgtgtaccctgtctaggatctatttgtcatagacaatagattgaaaacaatcaagggatacttttatcccatgccaagttgtatggccttaacccacttatatttccataccaaattgcagagatcaaaacatttaagggatgcttgatggaatggaaatctagaaaaaaaatagaaaaataacatgataaaaataattgaacactgaactttttttttcttctaaatttaactttttttgaatttgaaacccattctaaatagcaatgttcaaatattttaggagtactgatacaatgaaaataactaaaattttaaataacatataatagaaaatagaatttttggcattatgttggaaacaaaatctaacataatttcagttcgaagtatacaactctaaactacaacttgagagcgataaaagtctcattttttaatatattttctgatttagaaaaacttttactgctaaaccatagtttcatactgcaatactatataattacaattaaatcattatttcaacatattcagctcatttaattagatcatgtaatcgtattagccatatttttaatagaaaatatcttcaattgatatatcctaaaattcaaaaaaacatatatagtgcaaaaaaagatgctaaatattaaaaaaataaatgcattatgtacaaatgcattatgtagaagtgatatatagtttcatatatatatttcttataaaaccaaatttgcacagttttaagtaattttagtttagaatttatacgccagcgatgtttactagcattcaaaaaaacaccacacaaattattgaaaaattaaacatgtttacaatagagtaatcataaaaattcctaatcaaatttctaacccagttaaataagatgcccgcgcatatgcgcgggctaccttcctagttatatactaaaagtccattaaactttctacaaacgctcttaagccaccacgtggcactcctacaaacgctcttaagccaccacgtggcactatctaatctcaccgtcgattttcacttaaattagtagactcgttattttacaccattagattagatctattatttaaaaataataacttcctcatatattatataacatagaaacgttaatataacatagaaacgttactgttcagccatagagtttatatacgatacagaacgttacgtacgtattgaaaataaaacaataaaactttcccaatgttacggtatttatttaaaatatgattttctacagtataaagataaaatatatttacttcacaaatataaatatatttagtcaaattaagatctattataaatatccaatcaatgttctttaaaacatcttataaatctatctattatctatcaactatatatatactaaaagtacgttaaacatacgacgaatgcatttacgctgctacgtgtctctctaataaattagagaaatcctagaaatttatttatatactaaaagtgcattaaacatcctgcaaaaactattacgccgtcacgccgtgctataataaattagagaaatcctagaaattcagagaaaaaagaaaggcatatgatcctttaatttttacttaaattggaggacccgttatttaaaatattagtttagatctattaaaaatcccatgctgctaatctctatctggaaaaaaaacataatgtgcgtacgtcgtacgatcgtctccatcctaaaaaaataaaacttaaatacctacaccatatacgataaataaaacagataaagccaaataaataaaagaaaacatgcacacgtacatagaatcggaaagaaatactaatcgtgaaaaatcacactgatgtgttgtcaacatcctttaaactattattttattaaaaataacactacacagatatgcacattaaacttaatctctgatagataaaatgtcaaagcaaccgtctgacaaaacctaacattgtgttttaagtacatctgttttgggttatttaattttggagatcagattctcaaaatatttggatttgttcaaaacttttttattcttatttgatgagtgagaagcacaaataatagatagatgagaaaaattaaattaaattttagacagtggttttgcgataataaaactacagaatttagctttggtttttaagtggatcattttatgtttattttgggtgacattgagattttaagtatctgaaattttttttattgctatttgaggagagagaagcatacatcatagatagatgtaaataaacaaataaacaaataagaattaggcagttattttgctacaatacaatccttaattcatcatgagaattatgattatccatgtatgttttttctttgccaagtagtattggcaaacatgaacaatccagtaaaacacgtataaaactataaattctatatactgagtataattgatggacgaatgttatacacctctgaacccaattttgtcaattctttacctcaaatcaactcaaaacttaaaaataatactgtttttgccacctcttcctttctgtatatatctgtccttcaatgttgggtgtattacttgctatgccatcataaatattgtagagacatgtaaatggttgagttaaggtggtgtcctaaaaggccaccataaccaatgtaactaaaatgacatacttaccaatgcaatcatttgtgagtgtgccaatagtgaattgagtgttaaaattgtactttaagatggtctttaggggcacagttacatcgatgcgaaacccgtgtttcaaggcattatgtaagaaagccttagttggctgctacggtcgacttcatctgttagaaaatcattcatgaatatttttaacggtgttatcgtattatctggtagatatgatatttttagacaatttatacatagatgtgaaaataagttatgcacactgggttatgcagtgtagatgatatttttagcgtataaataatgtatcatttattttagtggtacaaatacagtttcttttattaaaagtgcacctaactttcaaaaacaatgatagtaagtagtggtgacaaaagacgagtttatatatgaccaggacaaagggatttttacttaaatctaataaacattctatcacatttagtaatctataccatctattttacggcaaatatatttgttttttttatttagggtaatctatattcccttacaggatatatgtattaatgtatatactaagatatgatttattttagcattctttttcttgaacaacaaataagatgcccgtgtatatgtgggggtttcttttccgatttatattctgaaaatatcctccattttatattttgtccttacattggttgaaacatagcctatgatacatgcatgcgcgcgcgaatgcgcgggctaccttcctagttagtataataattagtgctaatctaaatggtgcatgtatggagctcatggttagtttctaatgtatggatacatacggtggagcccggatgcctatccgtgctggctgggccttggctccgtcgctggtacagagaatgaggttcaaattagttactactttcgtcccctaaaatatagtaatcagaatatttcctaatacgacaatatatagacaggagatctaccccgattcataatattaagatgtgtcatattctacaaatggagaaaacaactcatgggacatgtatgtgatgacaataaataaactatggccatgtttactttatgtgccaaaatatttttgaagtatatggacacacatttaagtattaaacgtagactaataacaaaataaattacagatttcacctataaactgtaagacaaatttattaagcctaattaatccgtcattatagcaaatgtttactatagtatcacattgtcaaatcatggtgtaattaggctcaaaagattcgtctcacaatttacatgcaaactgcgcaattagtttttttttcatatttaatgctccatacatatgtctaaacatttgatgtgatggaatttttgaaagtcggaaggaaacactgcctatgatgtaggcccccacctagctaggttaagagctgatgtgaaagggatcgatccctaggttaagagctaatgtgaaagggatcggagtgaggttgaacctgccgacatctctgccaatatggtcactctcagtgagagagtttcattctcactaaatagtgtcatgtcaatatttatatgacgtctcttaaaaaaatatttatatgacgtggcaagtaattaataaaaaagagatgaaatgaatttcatctcgatgaaactatttatacaccgttttcaatgtgacttgtttctacatgtgttgcctatgaaacaacaaaaataaaacagtatattgtgttagctatttcaaccatcaattaaatgtcttactacctccgtcccaaaataagtgcagccgtagatatccgtgtccaacgtttgaccgtccgtcttatttgaaaaatttatgaaaaatttaaaaatatttagtcacacataaagtactattcatgttttatcatgtaatagcaacaaaaatactaatcataaaaaaattttaaataagacaaacggtcaaatgttaaacgtgaatagtgcaaaactgcacttattttgggacggatggagtattctttatatgacactcttttttttttactgaactttatatgacactcttagaaacataaaaataaaacgtcccactaggaatgacgttaggccatttttcacatagagttccaagagtgacacgtgcatcaaacaaagaggttcggattaataaataaaacaaacgcttctaacgcatttcgtgatttcatatgctactcataacatttagttgttgaattgtgttgttaaaagagttgataccagtacgatttcatttttaatttcaaggcacgaaatgaaatgattctgttgctgtgggttttattttgtttctaagcattcctaatggataaatgcatatatatgtagtttcatttcttgatttttaggttgagattcctaacagattcaagttgatgaacaaaactaatatatccaatgcacaattttatttcgtggtttgatatgtcgtccatagtattttattattgaattgtatcatgaaactatttggttataataggggtttatttctgttttcaagacacatgagataaaatgaatagggttccattctgtttcgaaggcataggtaagtatgtaaaacaagttttttaaaataaaactcatttcttctcacttgtaaatttcttggcatgtcattagtttagcctatgtgatatcttatttaataacatcgaaactcttgttaaacatgcattggaaatgacctaggtattaaaatttcacctaaatgaaactcattcattttctttatattttttcagtttagccttatcgtttaataagattgaaactcttacgcaacctgtcctgaaactggccttaggttaggtgctaaggagactattagagagagaaagttgagagttcttttaagactatagagaggagagttgacgttgtccttcaataaacatccatgtggacaggagtctgactttctccatagctgtgccaattttatatgttcggtgtacgtgaatatagaagagagggaagcgagagaggacacttgacttcgcccaatgagaaacatcggcatgccgattttgtgacgaggttcggtgttgacgagaataggagggagggagaaaaaagaaacacacatgtagatggatcggactttttatatcttacccttttttaaaaaaatcttattttacaaatatactcttaaaaaaattgttctagaaatgaacatttttctcgatgctagaattattggtctgagattcaatgtctcggtgccaataacattgacatcgatatcctcgcttcttgctaaagctaagtcaccgatacgaaggatcggtgcaaatgacattagtgctaaagatctatttgtaagaaaaaatatttgaattttaaccttttctgaaattcttttataaataaatccttagtgtcagttagtagcagagccaagcctgatcagcatgggctagtggcctagtgcccagtctccgccaaacgaacgcgtgactttccagttagaacattaggcaaaacagtgattacccttgctagattatttggcaaaccagtaaagaatgcatgacagcatgagtgctcgaactagattatctaggcaaactatcgaagcaattaagggcaaagcatcacaattcatgtattaacatatagcccactaattaagtaatacataattattgtccaatcaatctaatctattgatcaaaatggtttttctcttctaaaccacaatttgatagcgttaacttggctttcattaatgatggatagcccatagagttgtatgaatatgtgtgttcattagaattgcccagattttagaaaatatatagatccgccactgctgccagtgttattgtaactaaaaaggattaaaatataaaaaatgcagggtaagtgaagataattaaacaattaactgttagtgtgtagtgttgtttccaaagggcgatttttgttgaaataagacatttatctcaaagttgatacaactatcattagattgcacagccaaagcaaagtttttgggtgaatacacactaataactatcagtttgcatactagattgtgttagattaaataagctggaccaatttaatcctaataaattctatgtgcccataattaatgttaaggaattaatatcacgttgaaaatcaacgtggagggatctcaacttaaatagactgctattggagagcaattgttgagcggttaaggtggtggtggggctgccacacgcatgcgcgcgagccgggccagggcaagggctggctgctctatttcccaaacattatgttttaactaaagatgtaactgatggatgcactcgttactccaacaacgaaacgttatggtttgattgaagacataaccaatggaggtgctcgttactctagcaacagatggggaattcaatcggattgattcgggcgctctcattactccagcaacggacatttcaatctcgacttgattcctcctggaacattactctcttgtacactatataactcccaccttctcgttactccagcaacggaacgttatgttttgattgaagatataaccgacggaggcgcttgttactgcaacaatagacggagaattcaatcagattgattcgagcactcccgttactccaccaacagacagagaattcaatctcgatttgattcctcccggaatattactctctcatgcactacataactcccacctctagaatagacatagtacacacaaatgcccagtacatcttctctctcgaactctgattctcttgttgggaaaatcttgttttctctgttcctacgcttcttgtgtgtctctggttccgatcacctacgcacacaggacaatcaattttttggggagcgcattctagagcgactgctctcatcctcttcctcttcatctactctgcactgctagttcttcttcctatcaaaaggcagcaatggtggaggtggcggcatcgggaccgggcaccggcacatgcgagaacagcaacaccaacgtagacaacaacaccaacaatgcctcatctagtaccggagcattctccaagtaaccatgttaaccatgttattagatgatacttattttgttattgccatgttctgtttagcactatcactagatcattctacacatatgtcatgtcatgttcagtatgatgtttttctgaaaattaaaatatactgactaaatttccaccacatgcgcttgagtgaaacaacctctagctaccttctccgatattgctaacttgccgctgcaaccaaaaacctgtaaacccgatttttttggaggatagcccaaagtatggacccggtagcaaaatattacggctgccactagcaggactagcaggttttcgaattcctccctgacacatgacgaggttgaaccatatgatatggagaacattgcgtgagcagaccggcatagccctatgtatgtacctgatcacgtgacctagaacttgaattaattattctttttcaaccatatattcaacttaatgacacgaaatactattaggccaactatatggaaggtggttgattccaccggacagtgaaattctaccatgacaaactgattacgtttagctttgacggccattaatttttcagcccccaacctgattacagaaataacgattcatctagtgtcagctaaccgacgtgagagacttacgcttagttcacaatcgctatgttttttcaaacaaatttgtcaatactctgaccataaaagttctttataacttaataaattataagtggaaaattgctaatagtacaacagagtcaataatctgaaaagagaaaggtattacgtcgtttgctctgttcaactaaaaccaaatcatactaaggtacgtcgttcggagcgtcacattttcacgtccagttgtctgccaatatcgagcagcaggcacggagcaaattttcgacaagttgaataaaactgcgggtgcaaaacagcggccggccttatgctgaattatttgacgttattgcaacgacagatttttttttaatttagtcattattgccggccggtctaactcaatataggttattttatatattcaagttggtttcattattactgtccctgatgctacaagtgtagaagaaaactgtgcacagtgaaattacactcttagaaccaaagccaagtatcttttattttactttcgataacatagttcctatagattttaacaaagttcatttatattatcgtgtagaatattttctatttcgtattttagttggataccataaaaaaagtggtggagacttgtgccatacatcaattcttttatttatcattttagactgtccataggtggaagatgttataaataaaagaaaagcagtggcgagcagattgcctgaagccttaaaactgagtataagcacattgcgcttcaaacaagagtttacaaaaataaatttcagaagactcgggtacatctaaggtgcaaaagactataggtattttagcatgtgccatataatcccgaggattataatactagtgttttataaaaaccacataatttacgtgtactgtgtgacataacttattggttattttatatatcttagatcataatattgatggttttctgcaatttacttttttttgaaatgattatattgctcctcgcacattcgtaactgctggcttattattgaaaacaaaattattaagctaaaaaaattccatctataaaaatttgaatcagacaaaattgtttgacacaaaattggaaaaccaaatttaaaattgaaattggaggggaaattacacaaatcagtacttctccgcttcttagaatacaaaaagtagtattcttttaataattaacttcaaccaaattgagatgaacataccttttagaatttcatcgaatttgtttaagattcatttcaggatttattaattttttgtttcaaattttggggccaaataattgtacacccttctatttatacccaaaacatgattgtccataatcacgaatccaacaagcattacagaatcctaattacttaggaaatctctcaaactagggaatttctatacaactccaaactccaatattttcaaacatgaactccaattttcatgccgtgacaaattcatcccaaattaaaaaccattatctaaatggaaaaaagaatttattaaaaactaaaaagaaattagaaacaacaaaatacgtacaagaaaattttaaaatttaaatgtagcttgcagtattttcattaaattatccatagtccaatacgtcctcgtgttttacttgaatttttattccaatacgtcctcgtgttttacttgaatttttagagcaccaaaaataattattacacaataaaaacaacgtacagagttttctaagcatagaaactgaaaataaatcatccctcctccttgtgccatgtctagcccagtcttccatcttccctcctttcatgcggcctgcttcggcctccctttctctgggcctcctccacatcatggcccatcccgcctctcgtccccagcccacctgcactgcctccctccctccgcgcctgggccgcctcgcctcccggcccagccgccggtcgtcttcctcctctggccgaccgttcctctctcgctccttccttccttcctcctccattgaagccgccgccaatccgccccttcctgtggccggctctcctccccgacctataaaacggagcctcctccctcccctcgctccattttgccacctcccaaattcctagctgcctccctgtctccaccgcgccacccgagctccggcaacccctgccgccatgctcgttcgccgtcagacgttgtcggttccttccccggcaccgggacgtcaacctcctcgccggcctctctgcctccctgcccgaagctcgttggatccgcgccctcgccggctcccgtgcctccaaccctctgccaggccattgctcctcgccggagtaccgcccggcctcgccgccactcccgtttgcggttgcatgttcctccttggctgccacctcccgagcccttttgggcgccggaacactgtcgacgccaagttcgtccatccttcaccgtgtcagctgtcctagtagcctaccaaagatccctgatgcgtccataatggactctagcatgatacttggcccaacgggcctaaagatggtgacataacacccggacagattctggatgcccattgtttcgatgattttcattgacttcaaaggggttttaatatgagactagattcattagaaaggcggtctagttagctttccatacttgtacagaacgtcgaaaatagagttcagatgagataagggtgatgattttagtgcgggctgctccagtatttttgagatggacttgaatttgatatgagatagacctccatcttgacttgaacgcccatcttgaccttctccatctcctagtctctagttctctccatagttcctaatcatatttaaatcattatgtaataattagtcctcaaaatcatataaaagaaatacctaggaacgagctcacatgtaatttcaattgttgggcatgagctctagtgattagatcttgcatagcaacttgaggaatattgtgtgtatccaaattgttgatgtctccatcatcatccccctcatgaagtagagtcgtcctcgacccaagcttatcttcttctctcaaatatagctccaaatcgaaaatgttaaatgtgggactaacctcaaactttagaggcaattcaagtttatatgtattatcatttatcttttccgatattctaaaaggcccactggctctagacgccaagtacaggaccgctggttagataactctacattgaaatgtcatttttgggagttaaattgctaatagtgttgaatgatgaatatattaatttgaaagcacgtaaagtttttatgagagcttcggaagttagagaagcatgttgattgaaacaatacaagcaatatgattttacatgccaatttgacctccctttatagtatgtctgattgtggcaacatttatttaactgtaaaattattgtagtgaaccagcgccgctacggctgggaaggaaaccagaggtgcatcgctgtcagcactggcgtcctgtccctgcatcatttgtccgcatcgcgtgcctgcagcctgttagagatagaggtttgttacatagagttgttacgtgagataacaacgcatgagatgataagataggaagagattttgttttctgttttgtaaccaatcttcaccattgtatgcgccactttgggggcttttcccaaacatatattaacacgtacagcggcctctaacgaggttagaacgcttctgccaacttatatggtatcagagccaatcatgcacgcgtgagatcgcatctaccaaaaatggcgagttcctccaattccaccaccaatccactctccggccaagttgtcccagagaagctcacaaggaataatttccttctatggaagacacagatccttcccatcattcgcggtgcccgcatggaggggtacctcaccggcgcgactcgcgctccgtcggcagcgatcgacgtcaaggaaggcgacaaggtcatcaccaagatcaatccagcctatgaggaatgggttgtcgtcgatcaacaggtgcttggatttctccttgcatctgtatcaaaggacatactcacccaagtcgtcaatctggaaacggcggctgcgacatggagagtgatcacaacgatgctctcctcacaatcccgtgcgcgtgctctgaacacgcagcttgcactgttgacgacccgcaagggcgatctcagtgtcacggagtacatcggcaagatgaagacgctagctgacgagatgtcatccgccggcaagcccctcgatgacgaggagatgatgtcgtacatcctcgccggactcgacgacgattatgagcccgtcgtctccactcttgtcggcaaggcggaggctgtaccagtcgccgaaatctacacccagctcctgagttttgagagccgagccaagctgcgacagcaggctaatggttcctccgtcaacagcgcacgacgaggaggcaagggaggcggcggcggcttcagcaacaacgtcaacaccggcaacaccagcacgtttcgcggccgtggcggtggtcgcggcgatcgcggaggccgggggcgaggaaacggtggcggcgcgcgcttctccaacaaaccgcgccccacctgtcagctatgtggcaagattggacatgtggtggcagactgctggtacaggtatgatgaaaatttcattccagattcaaaaacagcagctgcggcttcctatggtgtagatacaaattggtacatggacaccagagccactgaccacatcacaggagaactggacaagctgacaacccatgagaagtacaacggcaaagaacagattcacacggcaagcggtgcaggtatggacattaagcatattggtcattctattattcatacccccatacgcaatattcagttgaaaaatatccttcatgttcctaaagctaaaaagaaccttatctctgctcatcgtttagccgttgataatcatgcctttgttgaagttcatcctcgtttctttgccattaaggatcaggtcacgaagaatcttcttcttagaggaccgtgccgcaatggactgtacccgttgccaacatcttcattcgccacatccaagcaagtccttggagccatcaagcccacaatgtcaaggtggcatagccgtctaggtcatccttctctagctattgttcaaaaagttgttagtaggaataatctcccatgtttaggagatgtcaatgagtcaggagtctgtaatgcctgtcaacaggccaagagtcaccagctaccctatccaaaatcctttagtgtgtcaaataatcctctagaacttgtgttttcagatgtgtggggacctgctcctacttctattgggggcagaaagtactatgtcagttttatagatgatttcagtaaatttacttggatctatttgcttaagagtaaagctgaagtttttcttaagtttcaagaatttcaacaacgagttgagcgccttttcaatcgcaaaatcatctctatgcaaactgactgggggggagagtatgaaaaattgcactctttcttcactaagattggtatctcacatcatgtttcatgtccctatgcacatcaacagaatggttctgcagaacgcaaacatagacacatagtagaggttgggttggctctcctttctcatgcttcaatgcctctgaaattttgggatgaggcgttcctagctgctgcctatctcataaaccgcacacctagtaaggtcattcagtatactactcctttagagcgcctccttgatcaaaagcctaactattctgctcttagaacctttggttgtgcttgttggcccaatctccgtccttacaacaaacacaaacttcagtttcgctccaaacaatgcgcttttcttgggtatagcaacatccacaaaggttttcagtgtcttgatatatcaactggcagagtttacatctctagagatgttgtatttgatgaaaatatttttccctttgaaaggttacatgcaaacgctggagcaaggctgagatccgaaattcttttgcttccttcctccttatatcaaaatattgcaactaatggggttgaacataatgaccgcatgcctaatgtccctgagcaatctaatgtgcctgttgagcatgtgacagatcaggagatacaattcggagaaggttcagaaaatacagcacaaaatgatcacagttctgcagcaaatattgaaggagatgcaccggatctggatgccacagaagatcctgaggacatttttcctggcagcagcgatcccgagggaggatttcagccctcacctgtgcacacgcctgcactgtcttttcccgacgatgaagaaatcggcgaaaccggtggcttgacgtctctgcagcagggggagcagtcgcatgcagccacgtcgtcaagcagccatcatgatggggggagcggcagccctctgaccggcggatcgtctgcacccgacacagccgtggctgagcccgcacggccggtcactcgtcttcagcgaggtataagaaaacagaaggtttataccgatggtactgtaaggtatggcatgctgacaactacaggagaacctcaaaacctagatgaagctttgactgataaaaactggaaagatgctatggatgctgagtttactgctttattagaaaataaaacttggcacctaattccacctagtcatggtaaaaatgttatagactgcaagtgggtctacaaaattaagagaaagtctgatggtagtctggatagatataaagctcgtctagtagccaaggggtttaaacaacgctatggtattgattatgaggacactttcagtcctgtggttaaagcagctactatcagaactgtcttgtctattgctgtttccaggggatggtgccttcgccaactagatgtgcaaaatgcttttctgcatggataccttgaagaagaggtatatatgaggcaacctcctggttatgaaaataagagtaagcccaactacatttgcaagttagacaaagcactttatgggttgaagcaagctcctcgagcttggtattcaaggttaagtactaagttgattagccttggcttccaagcttccaaagctgatacatcattgttcttttataacaaaggaggtgttacaatttttgtacttatctatgttgatgatataattgtggctagttctagacagaaggcagtatctgctttgctggcagatttgagtcaagaatttgcactcaaagatttgggggatctgcattacttccttggaatagaggtcagtacggcaggtgatgatattttactgaaacaagaaaaatatgcctatgatttgttgaaaagagcaagtatgctagattgtaaacctgttagtactcctctgtctgtatcagaaaaactgtcagctcatagtggaactgctctaggagaaacagatgcaactagatatagaagtatagttggagctcttcagtatctgactttgactaggcctgatatttcatttgcagtaaataaggtctgtcagtttttacatagtccaactatagatcattggatggcagtgaagaggattttaagatatgtgaaattctcagttgatcttggtcttaagataagtcgttcatcatccactcttgttagtgctttttcagatgctgattgggcaggatcaattgatgacagaagatcaactggaggttttgctgtgtttctggggtcgaatttggtttcctggagtgcaagaaaacaggctacagtatcaagatcaagtacagaagctgaatacaaagctgttgcaaatgcaacggcagaggtaatgtgggttcaggctctacttaaagagctaggaatagattcacctgaaactgcatgtatgtggtgtgataatctgggagctacttacttggctgttaatcctgtgtttcatgcacgaactaaacatattgagatagactatcattttgtcagagaaagggttgccagaaagcaattagaaatcaagtttatatcttcaggtgatcaagttacagatgggtttactaaacctctcggtgctccacaacttaggaatttcagatacaatcttaacttagataagttatgattgagggggagtgttagagatagaggtttgttacatagagttgttacatgagataacaacgcatgagatgataagataggaagagattttgttttctgttttgtaaccaatcttcaccattgtatgcgccactttgggggcttttcccaaacatatattaacacgtacagcggcctctaacgaggttagaacgcttctgccaacttatacagccatcccagtaagatcccgttaatcatgattcacttggggggaggcaaagcaggaggaagatgatgccaaatttgcattcattttaatagatgttgataatttgtttcacctctctgctggaaaagtttaagaagcattcaatgtttaagaattaattttcttttgaaaagaatcagataattaactacgagcaaagaattcagcaaacttcatgtcttcatcttaacaagccagcccaaagtttttagatttaattgatcaagatttcattctgtttttgtttttaaattcactgaaatatttgtttttggttgtatgcatatatattaggttcagtttagtagaacaatcctatatgcctggagtttcgaactttcgatggcgacatggcgtgtttgcagtccacaagctttcctgcttctgcttgtatggtttgcttttgattgtaacgattttggagcaaatagagcactgaccatcgtgtacagtactgagatccgcggaacgaaccaatgaggcgcgcatcggcaatggacctctcgccctcttcaacaccatcgccgccgtcaaggtactgcaatatccacgatccaacaggatggcagtgagttgggcttgctggatgggatcatgtgaagcttcccccacacatgtttttcctacatctctattcattgcaaaaaaaaaaaaagtgggctaccttggcattgaattagcaattactagatgttattatgagaatcagagagcgagaaatgaaattatccttagcaatattgccagttgactgacaattctaattgtgaatgaaggaagtaataactgaggcgtacgtgctgccatgtatatgaatattcatgtagtacatttccatttagtttatattttttgaaattttgatatactgcatttggaaccaagcttcttgttttatttaacaaagagattcaagaacagtttctgttttatttttgacataacactcagtaatattttgaagaacagttatatcactgtcgttatgaattggaccttatcaaagtaacaacaatactcggttatttgcctcggtataagtgagccgtaacactgttgaatctttcctagttcagtagatttctctcagttcctgtaaaacttttgattgaatactctggtgatgttcactgggcaaagagctaacttccccataacctaccttggaatgcccctcacgatccacagactcagaaaggtccacgtgcagtacctcctagacaggattaaggcaaggctcgcttgatggaagaaaaaattactctcagcagggggagaagagaattagtcatagcagtcttaagttcaatgccgatctatatcatcacagcgctcaagatccacaagcagctcatccaagaaattgacaaagctaggagaaaatttctttgggacagaggcgatgagatccatggaggcaaaggcaaggtgaactagaaaagggtctgcaggccaatcaagtatggtggacttggaatacctgatttgcaaaaaaaacaggacacgcaccctggctgcgatgtctatggtacgagcggaccagcccgaacaaaccatggataggcacgcccacaccctagatgaacaagataaggagctctttgctgcctccaccgaggtcctcgtgggggacggccgaaaggcactcttttgggaatcaacctagacctcgagcaccccccccctaagaacaattgcctcaaatctatacaagcactcaagaaggaagaagcgaatagtggcagaggccctaggaggagataaatggatggatgatatcagacacaacctgaccacaacactcgtcactgaattcttcaaagtgtttgaatgtctgtggaccacaaacaccatactaactcaagggactgaagacaacatccgctggaagtggacagaatcaggggaatactctgccaaatcggcataccagatgcaattcctcgacggagttccctcgatcacgacaaatgtggtgtagaaatgttgggcaccaactgcaaaatgcaagtccttcacatggctgctccttcaaaacaggatccggacgacagataggctccaacaaagagaatagcccaatgaatatttttgtcaactttgcttgagaaaccttgaaacggtgcaacaccttttcaacgaatgcccgatgaccaggaaaatctgggatgtggtggcaacgcggatgacctcccacagctgaaaaccgcaaaactggttcgacacgtcatccctcgaggaatggtggtgccagagtgtcaaggctgcaacaaaggagaaaagaggggggggcatcaattagatcctcatctcctaggaaatatggagagagcggaatagtcgcgtcttcagaaaagaagaactgtcgctgcaacaaataattgaacggatcacggatgagatctggttatggccggcagctggtgcaaagggcatcaagtgtctgatcccaaacacccaagacgctatcagtagcctgtaacaaaacatatgtaattttaggcatgctaggcatcccgtggtcgcccttccctcctccctcctctttttctttccttccttcttttaatgtaaccttctagcccttggctattgtacagtttttccccctaccttaatacaaaatacaagtacaccccgacggggtttaaaaaaaataccctggtgatggtagtaagattatgccctttctattttggattgagatgaacatatgcttgatcatgttcacttcaatcaaaacaggtgaaatgtgtgggatattgtgtgagaaacaactttgaatgtgtacataacttagctttccttgaatttaactttattgagttttactatggtgctcaaatctcttttttcatgccatcagtggttgtggacatatattatgattaaatatgtattgaagtgattacacataattgtgatattaaataaactttttcaaacaaaaatatgatatgttttacttttccttaaatatatttcatattatcatatatgacccaaatcaagtaaagctcatttggactgattagagaaaaattaatttgactaacatgcaaattaatagtataatttattagccaaaatattattgtgtgtagtgttagcacagtatattaatagtcacaatgtaaaatgtgacgacgctagcatagttttaattttgtacgaatttgaatatcatgtacatgaatagatgaataataatgacgctatataaatgacatatttgtaattgcatggattaaatgacatatggaccatccctattttttaatcacccaggtagacatccacacatttattcagtggcggagctagaaccaaattgagggtggtgcactgcttcactatatagatggtggcaattactctaaataatggtttttgaccatttatagatatctattgacaccaaatcattgagtagcaagtaaaagtgtttacagaaatttaagatgaaagaaaccacgaatggaaacataaagaaagatatacatcctcgacattaaagttgtcaatgtcaatatcatcgatagttcatagcctacaataataccagaacataagttagaaacatcttaattttgaactaaaaatttatatccaatgaacatgtaaaaaacataaaaataaatatgtttagggtttagggtttatgttccaatgaacacaaaaagatattgggactatcgggcgctttcctcttgagatacttgtccataacatgtcaattaaataattttattatgttagactatacgtgcactgtacaatagaacaatgtacgcttcaaaagcaatgatagtttgataatagcatagtgtcacagtgtgcttacaattttactagtgatggtcccttcaagagagatgatcaattaaaactgaaacatccagttcttcaaactttaaacggtttaaacactagcttatataaatctggacaattgaaaaggcagtatatgtcaacaggttacaaatctaactaatcaacaagttacaagagaggaggataaattcaaagtttagaactaatcaagagaattagagaatgaataatgataaataccttcatcaatttcaatttggctgtgctgctgtgcattgctcggctgccctagtgccctgctttgcagtccagctgctactgcctgctgcgagcctccgctgctccctgtctccctgttgtctgtcgatgcacgcagccacgcagccactgcgatggcgcgatgcacattcacccgccactacctgcggcgctgctgcctgtcgatggtgcagctggctagagagactaggtgggcgacggcgatgctgcctgctagtgcggcggaatacggatgacgaacagacggggtatcgtggagacgcggaatcgcggtgggaaaaagaaaggaaaaatataaaagaaaaacgggagacgaggagttcagaggtgcggtgatcgagcgagcctcgcgggtcgcggcgcgtcgctcctgggtgcgtgaggtgcgccgtgcgcctcccagctttcctcatgggcctaaggccttcacttgttcgctcatgggccatgggtggtgcacgatcttgagctaagaggttagtccacttagactcccttaaatgtcggccgaatctaaatcgtaacccttaaccaaccggataaaatgactctccgacctattgaaaccggtgcaatttgactccctgggtggttttgcaagcggttttggctgacgtggcgcatacgtgacggtgttgacccggtcttcgtcccacatgtcgtcgacgtgtcgcttacgtggaattagagtaaaaataaaaaaacaaaattctgtaggccccacatgtcattcacacaaaaaaagtgggacgctcgtcggcaccaccatctcctcctcgtcgtcgtcgagcaacacctccgaactccggccaaggagagctcttccagagcaagagtcgacgacgacaccatgcgcgtgctccatcgccgcctccattggtgacgatgtcctgctgcttcatcgccgcctccagcgcccacgccgtcgggccgctgcggggagtcttggcggcatagccagcggacgaaggaggcggcctcgcgagcgcggcagcgcaagaggaggtggccaccgccgctctagcgcccacccccctgcccgtcgcagttgccgccacgcccgacccctctcttcctcttgcagactcgcacgcaacaccggccccggaaggtaaagagaggggggccactgccgccgtcatcaccaccactccgcccggccttcgccaccaccgncgctagcactggatcttgaagttgcggggctacggccgcgccaccgggaccaggaaaactgcggcggccaggggccgcnccgagaagaccttgccacccgccggtctagcggccaccccccctgcccgttgccggccggtggcacccccaaccccttttttcctttttgaaaactggaccgcacaccaacccccgggaggaaaagagaga

SEQ ID NO: 17116 - DNA, 6238 bp, Oryza sativa
caagaggaggtggccaccgccgctctagcgcccacccccctgcccgtcgcagttgccgccacgcccgacccctctctttctcttgcagactcgcacgcaacaccggccccggaaggtaaagagaggggggccactgccgccgtcatcaccaccactccgcccggccttcgccaccaccgccgctagcactggatctggaagttgcggggctacggcggcgcaacgggacgaggaagctgcggcggcgaggggcggcgcgagaggacgtggccaccgccgctctagcgcccacccccctgcccgtcgccgccgctgccacgcccaaccccttttttcctctcgcagactcgcacgccacaccagcccccgggaggaagagagagatgagggggggggagacgccgccgtcgtggccaccaccaccgtcgccatcaccaccactccgcccggccttcgccaccgccgccgccaacaccggatctcgaagccacggtcaccagcgcatggcggagggagagagataagagagagagagaaagggagggagggaggaggaaaaaagggaggggaagaaggattacatgtcgggcccacatgcctgtgggtcccttttttgaatgacatgtgggcccataattttttgttccacgtaagcgacacgtgcacgaaaaccgggtcaacaccaccacgtaggcgccacgtcagccaaaaccgcttgcaaaaccacccagggagtcaaattgcaccggtttcaatagttcgaggagtcattttatccggttttctggttaagggttacgaattagattcggccgacatttaagggagtcaaagtggactttttcctctggtaaaaatagaggggtaagtactaaaatataaaaattgggctgggtgtatgtgaacccccttaggtttattgggctccgcccctgcatttattgcatgttatctgaatgattatgaaaaaaattgacaagatagatcaatatataatatatcactacacaaatatgcaagttaaaattcaacatctacaaattgtaacaaaagtaacaaaataaactcaaattagtaaggtaaatttgcagttaaatttgttgtttttattataacatgtataagttaaattttaacttgcatatctgtggagtgatatattacatattaacctattttatcattttttttattttttttcataaatacaccatcattccaaattgatcatgatatatatttatgcaccaaacccaaaaataatttaaatcacatcaataaagacaccatgcacacattctctcacaatgcatgtatcgattaaaacaccatgctaattacatcttagcatatacacattctcccattgctatattatctgtattctgatgaaatccgtatccatatgattatatgatgatcaatttagaaaggagagagtatttagttgacatgtaataaactggtgaaaaaaaaaattggatagaagaagatagagctgacacgtgggttttaggtattttggttaaaccagtgaaaccaaaatatatggcatcagtggagggtggaacggcgaacaggtcaagctccatggacacgcgttgcgcccgcgcgcggcgaaggcgagttttcctccgcaaagctacatggagtgcgcgccgccctcattttcttctcccgcggcctttggagagagagagagaggcgacacccttcttcctcccccaaccctttcacccgcccaaactcatccatccatcgatcgccctacctagctactctcgatcgatcgaccgcccgcccgccatggacgtggagtacgacgtgatcgtgctcgggacggggctcaaggagtgcatcctcagcggcctcctctccgtcgatcgcctcaaggtggtctccttctccatctctctctctctctctctctctctctctctctctctctctctctctctcccgcccggatcgatctagctagggcatcgcgtcatggatggaggattaatttccatttctaattgcttgatcaatcgatcccctcccgtttctggctaaccaatcaaataccctttcgtcctttgtgatgccatttttggatttttttttaccgggtaaaattattcgaagaaacgacagatctgatcgtgaatcgctttgtgatctgattaacaatcacaaattcacaaataatgatgtgaaacaaaccagcaattttttttatgttttttgcgagtgatcttgaatttgtcattattttgtcagcgaaaaaaaaaattctcatcagaaaatgatgaaaaacgtgtcccatttctgttttgtcaccaggtgctgcatatggacaggaatgattactacggtggagactccacatcgctcaacctgaatcaggtgacaaggcttcaccctccgtagcaaaaatttgccaacattatcttacctacctgtctgccaacttctgttttcctgacgtgctaagggatgttagaaatttcctcatcaatattagtttcagacaaatttgtgtgaggttggttacctatcagatgaaattatctgatcaagctcattgtttatgtatgccagctatggaaaaggttcaaaggtgaaggtactcccccggcgcaaattggggctagcagagactacaatgtagacatgattccaaaggtcaggcccggctccaatttatatttgattatattctggagtttgtgtgtagtttgttgggcttagatggcactgctctactttattatggagagtggagacatacacaaaaacttattggaacttgggttttaagtgtcgcacagttaaatattcttcgcatgcgcatatgcaaatatttataggaaattctttttagattgtgtgatgattaatttcaccctacttcctttctagttactgacatattgtgaaatgctattttgtctagtttatgatggcaaatggtacattggtccgtgtacttatccacactggtgttaccaagtacttatcattcaaagctgttgatggaagctatgtcttcaataagggaaaggttggattctaattctaatgcgtgtagatcactccataactcaattggcaaatctataatacaattttgtacatgatatttggatcacagatccacaaggttccctctactgatatggaagctctcaagtctccattgatgggattgttcgagaagcgcagagcagggaagttcttcctttttgtccaagattacaaggaaaatgatccaagtacccacaagggatatgaccttaacaaaatgaccaccaaggagcttatctcgtgagtacccatgtttactgctgcttttctacctttttttttatttcacgaagaataagtgcttaattttattttcagatgtaagtagttgatttggtttgtttgtgaaatttatatttgggtcccatatggttcctgtatgtactcagtcgtatcttcagtgtacatttataccacctaaatgatccatgcacaaaggaattgtatggttttatttgtttatatacatatataataccttagaatcaacaaaagtcctgtcaaaaaaaaaagaatcaatgaggggcctcaattgcttttttatatgctctgttcaataaatctgcaacatggtacagtactacagtggtactcacatacggatacattcaggccaacacatacagatacatcaatttaattcctaaattttcataatgtacatccacatggatcaaaaatagctccccttcattgaaatatataaaaacaattatgccagttccgcagctgcacttattttatcatcacagagccatccttatacggtacacttcttcagttcatttatagataagcataagaattaggtgaattttattcattagcgatgaattgacacatcaaacttattcatacaatctgatttatgtttcatatatattttctgatattttggtctatcatactatttgaagaacctgaagttgtagtgcctcttaatgattcaatttattgagacttctctgctcccctttatttttttccagaaaatatggtttggatgataatacaatagactttattggccatgcagtggctcttcataaagaggataactacctgacagaacctgcaattgacactgtaaagcggatgaaggcaagtattgagtctttcaacttcaaaatattagaaaagaagctcggatcaaactagtcctgacagtctgatgaaattccacatcacactttggcgtacatacatcgaatagaacatcagctgggttatctgtggacaaaactaaagccattttagtcacaatatattgctggaaatcacaactatgaacatgacgtgtctctgtcaaccaactaaaccacttcttccaacccgttcgaaactagacattttactgctgttcccatgctatagttagcatatatggtcacttcactttcactcccagatattgccttttacctaacacttctttgaattattgcagctttatgcagaatcagtgggtcgttttcaaggaggatcaccatatatttatcccttgtatggcttaggagagctgccacaggtcattactattaaactgtgtcatcaattccagcaatcacagagatcataaatggttgattttctaacttgtttttatttgatccagggttttgcaaggcttagtgctgtctatggtgggacatacatgttaaataagccagagtgcaaggtataatttgtgttgttattgtgagttgaaccttccaaataatttctttggtgatttgggcatggtgatcacaatgtgaaatgaaaattttaggattttaaggtgcaaaagcaagaaaaaaaatttgaggggggagggcaggagatctgccaatttcattaaggaggatagaaatgatacaagttcgcctctcaaaggttccatagaagaaaaaattaggaatatgatgattattgctttgaaaaggaagaatagatcaagctgtcagagtttgacaaaatatattatgttaacataatccaggcttggatttcaccagttgtatgcatggtagatgctagtgctaatgaattgtggcatgacaatctaaaaattgttctagaagctgtaatgttaaatccatttcagtggtaaatatgtgattttctgatcaaacatacatgggcatattcagatagaatttaatgatgaaggaaaagtttgtggtgttacgtcagaaggggagactgcaaaatgtaagaaggttgtctgtgatccatcatacatacctgataaggtaaaacacttttttttcatacaaacaaatagttgccctcaaagggagtatatcttagtgattaccttcctaattagttaattatactgtacttttcttaagattatttgaaggagacctactatgtctgataaataaattgtcctttgttgcattaaatttatttattacttattcagaatcaaatagaagtatgatgcaatttagtgtctctcatgttagcctcctcagctcttctgtaaatataagtcatcctagaacattgaagtacttctatacagtatctttttcacttttgtcctatatatataaatgatactgttctcatggataaatgacttatcttttgcattctgaataacaatcaagggtgagttatttagttaatttctaagtcccagttctgtttttcaactccaaacttcaatttcctcgttttccgttagcacgcttttcaaactgttaaatggtgtgtttttgacaaaaagtttttacatataagttatttaaaaaaacaaataaatctatttttaaaatttataataattaatacttaataaatcatgtgtggatgatgtttctcgttttgcgtgcaaccaaaatctgtctacaaaaccccacattgaacggggccttagttcctattcacaagtccaaaacaacttatgcttaggattagaggacgtagaagtttacaaaatgttggtactgattagaattatctgctgttatatcaggttagaaaagttggaaaagtttttcgggcaatcgctatcatgagccatccaatcccaaatactgcagattctcactctgtacagatcataataccacaaaagcaacttggacgcaaatcagacatgcaagtattctgtatatcacctctggtttttatccattactgggcattacacctatagattactcttggt

SEQ ID NO: 17117 - DNA, 6209 bp, Oryza sativa
  unsure (1)..(6209): unsure at all n locations
catcaaaagggaagttcatcgcgttcgtgtcagcacaagcagagagtgaaaatccagcggcggaattgaaaccagggatagaccttcttgggccagtggatgaactatttattgatacatacgacagatttgaacctactaatgacccatcttcagacaattgtttcatctcaacagtaagtcatcgcagaaatatcaagtgtatgtaggttagacatatgaccaaaaaactgcatttgaaataaacatttaattcgatttgcttttcagagttatgatgccacaacacactttgagtctactgtgatggatgttctttccatctatacaaagatcaccggaaaggtacatttgttttctgttcaacttttaatggctgcactagagtacaaccccaaccttctgaattgaaccttaccagcactaattgaaccttaccagcactatgagttcaacattgtttgcacttgtgctattctaatcttgtattccacgtggcaactataatcaatctattctatcatgagaaggaaatgggcttttcaattccacagatacagtgctttataaaaaggcagctagttgagtagcaaccttgtaagaatatcagtatataactcttagcatcatattcagactgtatcaatcagagtaacttacattccaggatcgcaaagtgataattgaactaatattgcatttttcatgatcttgtatcaacctaaaaaaacgtgtgtttaatgttttaaatttcctttgtctcgatagtgatttcctagttgcttatgctaatcgacatgccattttatccagacggttgatctcagtgtggatttaagtgctgcgagtgctgctgaagatgatctctaatagttattggactgtcctttggtgcacagaggaaaagatttgtgcgttgtttttccattcatattaggtttatatatgattttttttcttttattccaaactatagtggctgagttttattaataatttgataatgctgtatattctaggttcatagcaatttagcctgtgagtaaacagctgtttttgttgttcagtttacttaatttcacctttaaatgttgtggatagtgctaatgaacaccgaactggtacctccaattattttgaagaataccttgtaagatttctataaaatatctttgcaaaacatgttttgagatgcaaattgtcacgtaagagctatgagatacgcgaccatggcatcaattgatcattactatttgtgtcatgcatgtgctcaactgctcaggaaaatcataattactcattccatattgtgaaatatcaggaatttagcatgtgcggtataaattgcgacttgatttccaaaaaaaaaaaaaaatagggcttcagctgaatccccataccccttgtttggtcctcctcagtacgtactgatgagctttatttacagtttactatcttgctttttctccattccatttatctaacatcaggctacatttttatttttgaaatttcatattttcagcgtagttgcaatagagaaactggggttcagctgaaccccatacggtcataccccattattttttttatttatcgtcgacatgactatggtctgatgtccaatctaagccgatttattgaaaggtcaaatgttcactgaggctgtgctcctacgtggagcgttgcttcgttgcgctagcgggaagattcattgacacgtcggcaccatgtgcgtcccaactgagccgctcgggccttcgatgggggacgagttcctcgctcgcgctcaaggacgtgcggcgaagaaacgaggatgcgctaggcagaaataacttggccatccgtattgtagaggtcctgccctggcatcatgtttccatcacatcgtgcgtcagactatgcagaggaggtcacatgcactgtgaagtgcatggcatacggatgcttttggtttgatttcattgcacataccagctagagacacgcgatgcatagtttgcactgctactgccctaagagcaccacgcaacaaaggtgaaacatactggaaacagtaagatacaaatatagtgaagatatgttccaccaaatgtgatataaaaaaatatcgtgcgacttaaaaaaacgtaaaatatctcaaaagcaattggtgatgagcatcgatgtcgtcactacataccacattattgtgattgtgctggtcaaatcatttccattatggtggttttgcaattgtgttgtggtcttcatggaatacatcatcgtcaacacgaacatgaacataggtcgttgcattaccaaaggtcgttacatcacccttgttatttagccttagttgtgtgattactcttcaccatcgtgaatgctacctagcaacatgctctagtcttatatgacttataacaagagagcagttcttttctccaacaaaaactaggtaaacttttagataaaagtggcacgctttttaaactgctaaacggtgtgtttcgtatgaaaactttctatatgaaaattattctaaaatatgatatatatatatatatatatatatatatatccatttttcaagtttgtaataattaaaactcaattaattacacgttattaccaccttttttgcgtgaaacacttacaaacaccacctaaaggtgtgttggagaatactacctccgtttcaggttataagactttctagcattgcccatatttatatagatgttatatgtctagattcattaatatctatatgaatgtgggtaatagtagaaagtcttataatatgaaaaggaggaagtagcagtaatgggcatggaggattgcgctctagtttgtcttcgtcgagaagaaatatcacttcagcgaggaagtgagtgtgaacataacttttgttcgactcaactaaaaattgtctgatcggcttaagtaaaagtaaaaaacacttggttaaagatagcaaatatattattatattctgacatgtttaacttataggtctatctttatcttgcgacttatacattatgatactatctccgtcccataatataaggatttttagaatagtgctaaatcaaacattttttttaactttgactattactagtgaaaacataaaaaaatcaatcatataaaattgataaaattgatgttactagatttatcattgaacaaactagattccgtaattctatttcaaaaaagagtgagactcaatctccttatgccatcccaaaattgatgctactagatttatcattgaacaaactatcataatatgcaactctttttatttaaaacatctcacttttatatatattgttagttaaagtatacctcgaaaatcgtttcaaaatttaaaaatacttatattttgagacgaactaagtacatttcaaatttttacgatcacccggaagatttccctactccaaaatcttacaaaattttaaccatcagattggaatccaacgtcccacatccatccgccgccactcgtctcgtccgtctctctctctctctctacgaaccacgcagctcgactcgcgagctctcgccgccgccgccgcctcttcccccaccgcacgcgcttccactccgccgccgccgccgccgccgccgaggctccagcactgccgttctccgcctccagttcttccctcccccgtcatcttcgtcgtctcgggtgtccggtgccaccgcgccgccctcctgctccatctccggcggctcctgctgcccgccgcctccaccgactaccccctcctccgccctcccgatctccgttccccgcgccaccgcccaccgcggggcctccgccgccccggccgcttccgtctaaccctggatccccaccacgaaacctaactagtaagcgccggagccgccgcctcctccgcctaagttcgctacactcgctggagatggagaatgttactggagaaggaatctcggatcagatagagaggttagcgattattaagattttgccaccattttttttcagtcgaatgttgtgtagcaaaccgattgattttcctcttttttctttcagatttcaaacacagctacaaatggatgggcgagggagaaagcacaggattttgatggtgtcagatttcttctttccaaactttggcggcgtggaaagccacatctattatctgtcgcagtgtctccttaagcttggccataaggtccctaatctcctgaatggtctatttactgccttgttcttttcatgcataattttagggactatattagggtctagatcaactcatggatatgcttttgattctgccccagctcacttgttatatgtagtttaaatattggatttaatatctttctgctataatgagttgatgccaataatggttagaggatttttgttacatatcttatccaatcgttaaatgataggcagagccacacaacggactaaattagtgctactgattttgttgcgaatgtttagacaacttttttgtttgattcccaggtgattgtcatgacgcatgcatatgggaatcgttctggagtacgatatgttacaggtggcttgaaggtttattatgttccatggaagccattcctgatgcagaatacattgcctacattattcttgacatttccgattgtgaggaccattcttattcgtgagaagatctctgtggtgcatggacatcaggctttctcaacattgtgccatgaagcactgatgcatgctaggacgatggggtacaaagttgtcttcacagatcactcgctttacggttttgctgatgctggaagcattcacatgaataaggtgctgcagtttactcttgcagatattgatcaggccatatgtgtctctcacacaagcaaagagaatactgtcttgagatcagggatatctccagagaaggttttcatggttcctaatgcagttgatactgcaatgtttactccctctccagatcgcttgagctgtgatgaaattgttattgttgtgataagtagattagtgtatcgaaagggtgcagaccttcttgtggaagttattccagaagtatgccgtctttttcctaaggtgagtcacaaccatagcactctttggagtcatgcatgaaataaaaagggtgaactatgggtatggtagaatcatttcgttatatgacatatcaacataaagcaaaatgcatacacaatagttgaactctccttatattccatcataactttcccatcctttttaatgttcacaatgttttggatttagtaaatggtcatatttgatcaagtaagcaactgtacgaactgtcaggttcgctttattgttggaggtgatggtccaaaacgtgtgcgaattgaagaaatgagggagaagttttcccttcaggatagagttgagatgttaggagctgtgcctcatgctcaagtgcgatctgttctgatatctggtcatatttttttgaacaggtagctatttaatattttcattgctttatgttgaaacttttttatttccttagttcctttttttcatcagggattgttgatacacgtaagactgctttctgtctatccctttaaattaaatatcatctttcataatacataatgttaactagaccctaatatcattacaaacatagaagaggacatatcccggggaaanttttttaggttttaagcccgggctcaaatttaatgtttgtttggggggttcttttaaaaactcccttgcggccttgtaagtttgagattcttttattgcccccccaaagagcttgagatttatttgggcattggtgatcactgtgtgaaatggttttcgtttcaatttcccccgtaatacgattcggggccttatgtgtaaattcttgggggcctaatgagtaacttactccccattaattggggttgtgtttaatgcccccctttccacattggtaaacctggtcagcccacttcattaatggatttgcccaattccctgggggaggctgtttgcgttttgggcgctctttcgtttcttttttatctattttgtgtcgctctgatcttttggttgttggcaatcgtattactttcacttaaaggttgttatttcgtttttccccaaaatctctgtcatacctcttggtaggaatatttttacctaaacgccctgtcaaggggtctgaaaccttttcaatggtcctgctgtcctgggttct

SEQ ID NO: 17118 - DNA, 6263 bp, Oryza sativa
agtttgaacttgagatttggtgagaatgtatttcatatctacacctatctctagtatttttttcatgaatttacaaaacttttaggtatgattttcacgagttttcaacacttagctcattttcaccggatatgtccccaacatagaaatgaacaagtaatatgatatgatattttaacgatggcaaaagttcaactatatggatgatccacaattacgctgaaatttaatctttgccattttagttcgcttacagaggccttttgtatagccattttggaagcagcaagttgtggattgttgacagtaagtactagagtcggtggtgttccagaggtatgtgcatatatgtttatacatttctcttgtagaaaaccctgtactgtagttaattaggaaatttggagttgctgtcaaataactttttcctttttcaggttttaccagatgatatggtagtacttgcagaaccagctcctgaagatatggtacgagctgtcaggaaggctatcgatatgcttcctggcatagatccccaagttatgcatcttcgagtgagtctcaactcttgcatgttgcatgaacttgctgtgcatctgcagtttaccgtttcagctatgggctctgtgcattacatttcctttttttttctttagtttttagtggaaaagtgatttgcaagttcatttatattgatttggttgtttctaatatgtatctagatgaaaaagctttatagttgggacgatgtggcgaaaagaacagagattgtgtatgatcgtgcaatgcagtcaccacaaacagatttgctagaacgccttccacggtgagtatattgcttttgaaacattaacctatttttgtttacaatttttatgcactggggcatcaaatatatagggatgcagtccatctgatttttctacaatggtgtagatacctcagatgtggagcttgggcaggcaaactgttttgtcttgttatgatcatcaactacctactatggtgcctcctagaatatctgcaggtgaatttctgcccatacttttatcatcttctggagatctggaggaaatctaactagttcttttcccctcagcccactgaaggtattgaagaggtcccagatatcaggccagtacatgctcgtttagaatcagtagatgatacatgtgaaactcaaggaaaaggaatttagaatttgccattatcgaatcattgaccagcaccctttcctggtctgtagaatttaccttctctttttaattttacttgccctgaagcccaggaaacattttcgacagtagagtacccatgacctagtcaccccacatttggggaaatcctttgacatgcttttgaaagctatgttgtttgtaaatatcagtggtaacaccactattttgttatgtaagtggatgatccatgctcttgaaaactatgctgttaacgatcaatcgacaacatcctttggatttggaatacatgtactaatatttgttctttgtatgacgccaaaagcaccaaaaaaacaatttggagcgacctcaaaaaacttatcattaagaaagtcccattttgtagacactatgcataatgtcattaggaaaaaattctccagctttgatgaaggctgattgtctaagcacccaattctatgataatcaagattgtaccaacttcaatgatccttccctacgcctgccaattcgaagggaaacgaaccaaacagggtgttcaaaggcaggcaaatgaccggttggaagtgaacaattcctcagtctatatgccccagctagaacggaacaagctataataatcagattccaattccagtggaaaccatccaatgatcattttaaaccagagagtttgatcaaatgttgctgcaaaacattaagaaaattactgcttttggtggacgtagcggttacaaacagattgtttgtgacgttggaactgttaagatctgtgtaacgcaaaacacccgcttgcctaagagccaaattggatggcttatccgtcgatggataagttgatacaaacaaccctaaacaactgcctcaggccagagtgagcatcttcctgtaaagtgcttgctgcaaaataatgttacacttatcttgcaatttgaacgctaaacctaatagtttgccaacatataaatataatgttctatgccacaactcatcttgatttctcagcaactaagtctaagccaatctcaggtacaaccaaaactgacagcacagcaccccgtggcatatgcaattgaagccagtgctcgcacaactcacattcgcgtccttcgtctgatacccatgtcatcatctcgttccacctgttccatacaaaaaaaggagtgtaaataaagcacgtagtatgcccacttatcactaccaattagttttaacataatggaataacaaaatctcaagggctgatgctactatcaatagtagaggcaggtctaacgcaggagacaatatgtataatgtcctcaagaaacagtattgagattgtggtggttgctagctctttacctcagtgataagcttcttggattttttccctatatttgatctcaaatcagaacctcgccctttaggtttctttgctaccggttcatccaaaagatcatcttcatccgtctcacctgcaatcatattttagattctttttcttagtgaaggtcaaattggaaatgacaggctattaaccattttggctggtaaaaatccaacagatgtaacatattagcttgccaaggcatatcaaaatttccttcacatcatcacagtactctgaaatatgttgaagttgaatcggaacaaagggaagtaattaccatcattatcatcatcttcatcatcatcaggaaggcctccaaaatcttcaatgtcttccatgtcatccatttcatcatcaccttcaacatactccacctcttcctgtgttaacaagtgaatccatgataaatggatagttcatgcaaggtgagatgagcaagtctgcactcagtaacaatgcttacttcttcctcttcctcagtaggagctacatcatctttttccatttcaagaatagtgtcaaattctttgaagggatagttatagatgtcaccatagacacctttcttcaaccgttccttcaattcactttcaatattctgcatgacaacaggtacatgttcaataaggcaaaccatcaaagggcgtggatagcatcagaaataataaccttttccaactgagcggccttttcagctttatccattcttctgagatggcgctgagtctccttcctgggcattgtcatcaccttctctctgataaggggagaggaatatgattaatctttccattgcatcagagagaacagcagaaagttcacaaaaagagtatacatcaacaagcaaatcagattataatgaaactattacactaaattataccaccaaagtagaaacttgtgagatattgctaccattattattttttccattagttttaaaaagttctgcaacaatgtgaacacagtgcatctaatacaatcttaagaccatagaacaagtcaacaaaatgtgcaacttcaaaattctgtaattgaatataaccaaacactgagccagttcttattcttaaatcctagtacacaatttggcactgacagtagcgctggttgtggcagtatgaaatacatagaatgcctataagacaatcaaccaaaatcggatccccacccccatctaaaagcaaacctataaatcaatagagttcaatctacagaaatctgttactttatactactatgtttcttttttaatgacaccctacaatccgcatcttcaacctttcaaaagttttactgctaatatatttggaactactgaaaatcacatcattaaatttgtaattaggaatactttcataataatataattttattattatacttaatgcaaaagtataaaaataaatggtcaaagtcacatcttgaagacagaaaagtaaaacaacaaacaagtaaaaaggaacaatgccctttgcaaccaaaacatgctaaacaggtaagtacttcagcaaccatcttcccacatggcatgtatctcagaacagttgtcccagatttaagattttcaacctgatgagttcagcactctaatagaattttatcgtgttcagcttaagaccataatgaaaacactatggaaataaacctaagagcctacctcactttcagttgaagcttcctcattcttatccgatactgagtcatttttgtcaggcgctgcttaattttgtgcacaagtaacttgggccaaaattcctacataatgaaagaaagacaagctatgagacttaaaataaaagttcacatccagatcgaatgacaaagctcgaagtgcatacaagatgcttattgatgacttccattgctttctcataatttctgggtagtttgaccctctcccataatttgttcggaagatgggctctttcagctgttttcatgtataggtagaaaatacctgcaaggccagaaaaaagagagagaaatgaaacagaatgtaacaaaaaaaatattaagatggtatacataagttgggaaagaaccgggagcaaaacaatgtgcttaacaagtatgcttagactgcaatctgtatccttggacgaaaggattctgaagccctcatgtttcatccagagagcaccacataatacagcgattcactcgtaaaaatgtaactttctgcagtaccgagttcttgactttaaaattaactaatgaaataagcttccatggtagaccgcattatcttaaaacagtcattggttgtgtttgaactgagggtttatcccatccatagactcacaatatcatcttgatggcagttaataataacgatcacagtcacgactaaataatttccctcgaataaagaccaatcgtctcccaataacaactgtaaatgtaacccaatgtttccaatagcaactgtaaacataacccaatgcttcctaaagctattgccacaaagggcgacacagtgcatcatcgaaacggttgagctaaaaagatatttcgccccgaaaaatggaggaaagtgcggggtagtagtactcaccgtcatggtcccggatggtggcgtaacggctgttggcgagagggcaggagctccggttgcatattccggtggcgttgtacgggttccggcagaatatccccgtcgtgatcctgccgcaaaaccaaaaccaatttatcgtcagaaatcaaagaacaccacagcgacgagagaaagaagataggattgctgctcgcatacgtacttggccatgaagctgcagtggttgtgccggatgcagtgccatatcacgtcgtcgctcatcttggccgccgccgccgccgcgggctcccctccttcctaagatgctgctattggtactagaggctggttaggcgagagagaaaagcttccagatctacaagggaggagtgagcaagaggatgggcgtgggtacgggtggtcacctcaccggcggctggcggcgcggcgcgggatgcagtgggaaggcggcgcggcgcggcgggcgaacgaaacggggagtcgagggcgcggccgaggagaaggggacatgacatcatcatcatcggctagggcaaattaatactgacaggtaatgggctttggcccactcaaggcccatttattcttagagcggcccaaatccaaccctaggccactatatgaaggaataagtccactttgaccataatctactctgtgatcatgcaccacaaaactagatatcttgacccctatatggtgctgacatggctaacacatgacacctgctttgcttctttctgtctcttgctcactcctccattgtactacctccgtcccaaaaaaaattgcatttctagctctaaggctttgtcccaacaaattgattcatctagataagtttccttaagttctctcagcttgtaatttaggtatgctaattatatgggttaattctctaaacttacttttaatcatttgtatatatgaaatatgtgcatgcaatgggttcattaaataaggtcattgtggtcatttttcaatcctactgttttgtcctaaattagctagaaatgtaatttttatgagacggagggagtattataataggaaaaagtacaaattaattaccccctcccgaactatcacggtcgattaaattacccccttaaaacataaaaccagacatctcacc

SEQ ID NO: 17119 - DNA, 542 bp, Oryza sativa
  unsure (1)..(542): unsure at all n locations
ccgtatgatgtcancctactctgnacccactcatcatattatatgattttttagctaaggacgcagtattaaattcattgacattgagagtgtgctccggatgccactatatataaatatataaatagacagagggagggacagggagagagaatgggtatctcaaatgctctgcaatggtgggaggagtggcagctccgggttcttctcttgggcagcctcgctttccagtacttccttttcattacagcctcccggcataagtttcctatccgatcctacctcagatcctttatctggtttgtatacctcggtagcgatgccctagcaatatatgcccttgcaaccctatttaaccgtcacaagaaacaggatgttggtcacacacacaacaacgatgtcttagagattctttgggctcctatcctactgattcaccttggtggacaggatagcataactgcctacaatattgaagacaatgagctgtggatgcgacatgttctcacggcactgtcccagatcaccgtagccatctatgt

SEQ ID NO: 17120 - DNA, 2316 bp, Oryza sativa
aacacgctagccctgtatccatgcctccttgggttgtcttcttccccccattttcccaacgcaactatcttgttttccacgcgcacgcttttcaaaccgttaaacggtataatttatgcaaaaattttctatatctaattattttaaaaaatcatattaatttttttaaaaaaataataataaatacttaattaatcatgcgataaaacgaacttcgttttgcgtgccaaaaaggaagggttcctaaccccctcctccgaacacattctttggtgggtcgggggccttgccttgtgccaagctgcaggcatcgaatgtgaggcggctcaaccaggaagagttgaagcctagggtagataagaattaataagagcatatccaacaacatctctaaatacaactttctaaatacctattttgccagtttgccaaagagttggagagtcaaatttgcatttcactccaacgatctctctattaccttctccaattttaatagtgggtcccacatgtcaatctctaccattcttcatttcttttcacgtcattccctttccccaccctcccgccggtggatgcgcaggtgatggcacagcggctgctgctgctcgaggcaagagggctcgcggcgatgcttggcggcggcaggggcggtgatgcaaatggcgccgcaccgctctaggaggcccctggcccatgtggcgcctgcgtggaaccccttggccgcgccaacaacagcctccacgtcgcaggcgacgtccggcgggagcttctggaggtccgtgaacaagggttcatcctcctcgccatcaccaccgccaccggcatggcaggaattgattgggacttgcgattcgttttcctcactgtgcgtgtcgtggtttcgccttttgcggtggcgacggctctacgtgaccgtggcgcagcgacaatgacaatgactgccgcggcgaacggtggcccagacgacgatagtcgcggcggatggtggcccaaacgccggcggcacgctcgtggccggcgtgtcctccggttcggccccggccgatgcgctcaagttgctgccttgctggtgggtagacagaaagagaggaaggatcagactaggagtggtggtgggacctacctttggccagtggaggaggctggctacatttggtctgtcggaggagcaatttggtcatccgaatgaagaatctgttggagctcattttttctctgtgttggtcaaatttctgttggagatgctcttattttgtctaaaaataaatggagtaacaacttagacataatcaattattacgaatatcggtatggttcgtagtatcaagttatatctaatttagttgtagattattttaacacagaaaggtaatggttgcggttattggtcgatcggcggggcacaccgccacagtcaggttgaagcagctcgatccatgcgtggcggcgagatgctgccgaccgaaacgttagggtctgtctaagaagggcgacgaatcggtatggaagagactgatttgcataaatatcggagatttaaatgcataagttaggaccgctcccgcttgtaccgaattacccgatcctaggggttctatttgcgtacgattgatagcgattcgaattagggattcgtttgcacgaattcatattcatgtggtcctctgtatgggtaatcctactggaagccgtcggatcagcacgacagtcgacagcacctgtgagtcctgtgacccttcggcggcggtggaagaatcatcaatcatccgcgaggatccctggggcggagctcgatcaacccgactctccgcccatatggtctcatgcattcatggtgccgcacggccgcgcgtgaatgaatgtaggggacaccgggacagcggccaacagctgcctcccggtcactaatcatcgtttgttcagatttgaaatcaagtctattgttaatttcgaagtgctgggagttcacagttcagtcgggaagacaggacctctcgtgagcaaactagcaaattgaggtgtaatctactaatcttgtattagttatgtactacttgctcctttccaaaatgtaagtcattctaatatttttcatattcatattaatattaatgaatctaaatagatatatatgtctagattcattaacattaatatgaatgtgggaaatgctagaatgacttacattgtgaaacggatggagtaccttcctcttaaaaatagttatttttctagtatttaaaatgagaaaaatggacatttggccacgttcaaaaaacggtttcgttggaatgccattcccaaaactcgttt

SEQ ID NO: 17121 - DNA, 1034 bp, Oryza sativa
atgttgttgtttcactctatccttgtcttagtttctctctctctctctcataaaatgtgtcctgttgaaaatgtttaactgagtttttgtttatttgccttgtacaactgtacttgtcttgtagagcatcatacctggtattcttcaaggagacaagtccgattcccttctgtatggttccgttgataatggcaagaaaatatcttggaatgagtcattccattcaaaggttggccaatatgttccttttagcatgcaaaatattctctgtacaggagtaatgaattttcttcagtatatgggctctcaaaacttatgttctttagttgatggtggtgttatcttgttgctagacgtcgtacagttcacaactaacgagaatttgcaagttaatataaactggttgttatgttaattaagatgatgttgcttaataatgatcatgatgggtgcctgtttgatatattttgataataagtggtgatgctaaaactgcatgttgtaccaagtatggtgactaaagaactattcttgatatttgaattcttcgatacttatatacttttacttttgtttccctgtcaagtttttcacaagcttatcatgtggcttgttagatgaaaatttaatggtttgcctgacttgtgcacaatttgattttctatcaaacggtaatgcaatttttgatgttagccttacttagtggcacttaatttccactgaagatcattatggaaattggaatagcaagtcaagaaagattttttttttgtagccatacttgattcttggtggtagtgattaaccactctgatcatgttatacagcagtggatgtactctgtgccttgtggtattcaaagactatccttatttcttgatgatatctattattttaggtggttgaggctgcaaagcgactccatgtgaaggagcatgtggttttggatggttctggtaatcctgtaaaattagctgctacggttgaatgcaagggaattgttggaagtgatgacaggtcaaaatctatatcta

SEQ ID NO: 17122 - DNA, 1885 bp, Oryza sativa
agaaagttgcagatgctcctggagaatctaatgggcaattggtaagtacttctgatgctacggttggtgcagaaatttattatggaatactttgtgtttgttcaaaagcattcattcctaaattagtgttacagtcaagtcaaactggatatgctattttcctttataacctaaaacacattgccacgtttttatttctcactttcatatcttcccttattcagttgcatggtaatgatttgtttgtctaaactctaaagttctaacttatccaatatcatgaagcaaaatgattttcccatttttatttaacagtttatgggtgttcaatttcccttgtggtactcatatgcctaaaattctttaaaaaaaatgtggttattcttgtttcaaatatgcaaactggaaacttagtccacctatttcaggctacaactgcggaaggacctgccaaatctgatgaaaactctgttcctagacctgataagtttgatgaagactctggtcctagacctggcacatctgatgacagctctgctactaaaccagctgaacataacgagtcaactgcagaaatcctttttaatccaaatgtgtttacagagtacaaacttgctggtagtccagaagttagtcttagaactactccctgcttgatatccctgctctaatttattgacagcctactctttgctttcttaggagattgcagcagatgaagcattggttaaaaaggttggttcgtatcttctagacacggtgataccaaagtttgttcaggatctctgctccctagatgtctcccccatggatgggcagactttgactgatgtgctgcatagcaatgggataaatgttaggtatcttggcaaagtgagtctctgaactgatccagctggatgtgagttcattgcattttatgtatagtatgttcattatctaattcttttctcaggtagttgacatgatcaagcatttgccacatttacggggtttgttgttttttgagataattgttaggtcggcaaagcatgtggtcaaggtgatagatctatcttaccagctgtctgttcccatgatggaaattctccgcatttatttctttaataatttctaaaggatgagtcatactgtcacccagactcatcctgctgtccattcaaacaaatgttatatggataagattattcatcaaaatgcataactttcctgttttaccacgtttaataagaagtcattggaaaaactatgccaatttgttgaccgtactgtttgttgttcccatcccaggaaatacttaggcaaagcgcagatcatgatattggaccagccattgctcatttcttaaattgttttattggcaatgttttggcaccttccacaaaaggtagtgttgacagtacggatacaaaaacccaaaaggtatgctattccacgtgtaagaaactcatgtcatcacttgtattctaactgcaactaatggctattcttttggattttcaaattggtagggtcatgagaagactcaaaatcaaaaatctgccgagggacagaaatcaagcctttctgcttcttcaaagaacattgtgccaacattttcccatctaacatctgatgggatttggtctaacattaaggagtttgcgaaacataaatatctggtagtggctattgcttcttttgtttccgtagttttctatagatgccatcaatataacactccttttatttagtttgaagtgaccgatgatgctaagactggtgctaaaagagttgcagtactccgcaatctttgccaaaaggtttgctttgttcagctctatattcattgagtttgctattctctttcagagaaatgtttaatagtttggctgcaagtagttcc

SEQ ID NO: 17123 - DNA, 2864 bp, Oryza sativa
ttattctgacacagtccaatgctggataatggtcctacaatccaaaaagcatgaagaaataggcaataccaaatcatggacattctttttctgccaactaagctaggcagtaccgaaatacgattccagcaaaaacgacataattttatgaacgaacgaacttgactcagcttttttgtgtgaaggcagaatgcttagtcattttatctcatcatcagtagtctatcaatgtcacaacaattgtttcacttcattctcgtttgttattattgaactcatcctaagaaccccttcaaaaaaaacaaacaaaattactcttccaccatgctggcgtgacaattctatgtgggtaaaaaactcaaagcaccctagaattcaaaaattgttggaaataaacctaccactgatgttactttctatgacttctgctttgatttctgcttcttcaactccaaggaagtccctaatcctactggtgtggaaccaccggactttttagacgatggcccgttggtattccctgcagtgccgttttgtgggggtccattcgattgctgaccttcagatgcattttgagtgctggcagtagcggaagtagcagcggcagtggctggagtgctaccagaagcagtaggcgccttcgccgagcccagatagttgagaatttgagatagattagacatgtaatcaggcgcctgcccgcttcgcacattaaggcctctggcagcagctttcttccgaacttctgcagttgcccgagcagcccgctcatcaactcctcttactcgaggaacaccttcaccaactactgcagcattaagtgatcggttgacatttgctgatccttcaccaggttgtttcgcagctgccttcagtgctctcaccaaatcaggatttgcctgtcaaatcataaggtaaaaactggatgtcaaaagaaccaaatacaaaatactgagatgtctaatagccatatacatatacttcgttaacagtgacaaggagaaacccaaaaaaaagtggcaatgtaccatcaccttcaaacgaccaagcgtgccagggattaatccatgtacagaatagcaaacaaacaatatagggacaaatattggggcaaaaagcttccataactaaaacaagagaatgtcaattcaatcatactgccagtcaattcaatcaacatcatctgatgcaacactaatgttgccagattctcaaaaggaggttttcactctgtacttcctatgacaagctaaaaaggaactacgagtctacggctatctattctcctggaattgtagggttgtatcaaaggcaaaacggtaaagacttcaagattgcagcaactaaacttaccttcaacaactcaataggattagcaggtgggttagtaccctgctgacctttttgcttctgggcattcacctgtacagcaaaatgagagttacgtcttctatggacaatgcaaaaccggatccagcatgaagataaaggtatgcaaagcagaatggaagattttcttacacaaaggttttgcattgcattacttggtacttcctccgtttcacaatgtaagtcattttagcatttcccacattcatatttcattaacatcagtataaatgtgggaaatgctagaatgacttacattgtgaaacggagggagtatattagatgtacaagagatacaggaccaaataaaaaatagccgtatacattttcttaagaaaatacaaaactacaatactatgccatacataaaacatgttgcatgcttgttaaaagtatcacaaatccaaatacagtttaaacttatacctgctgttctcgcgacttaaatgtatttaaccaactttctgcatccttagtccttgaatcatcactccccaattgtttcaccagtatatcataggtcttcttttcatgctgccatcagaatcaatacatgagatcaatgttttcaaagtattctttttaccaatcatctttctggtgaactgacctgaattgaaagtttgaatgcacccatacaactgaatgcaatggcaagggcatgatagcagatagctgtttgaatatgatctggtcctagaagcctctcgttctttgtgagtgcttcctgaagatacctaagagcagtactcatattcccagcatcctggtacatcattgcaacatttataagagtcgctgcaacatctggatgattaggacctgatgctaaacttagcaaaagcaacgtgcgagacatgtgacgcagagcaagttcagtttgattaagcccatgatagaacaaagccatgttaccgtagctgaaaaagaaaataacacacaaggttagttaatataaaagatattaactgcacaaattgaaagaaagaaaatgatgttgtaaattaatatcacatatgacaaagatacattcattctctagttggtttaaagatttctagtagatgttgggatctaggatgggcggtcagttttgtatcaataacgtgaaatttagcttcacaacaaggacaagatcaaaattctatagaaaaattgaaattgaacaacatgcctgtgggctgtatcaggatgatctagaccaaggcatcgctcatttatgataagttctctatgttgctgcacaattgctcctggtatatcgccagcatggtacaaaaccatagcaaggtaccttcagtcaaagggaaaacaaattaaaatccaaagattttattatggatgacttatgtacataaaaacaaaaagagaaatctagaaaatgccagatgcctaaacaaataagctaatgtgttaccggcaacagtttgcggcatccttatgcatgggaccagtaatctgttaaaggtcataaa

SEQ ID NO: 17124 - DNA, 2034 bp, Oryza sativa
ttgaacaccaagggacaagtctcactggttgctgtacatatgtatacttcgatggggtggctttgtgctcatacagactgtggagtgcattgtagtgtgatggagcttacatagagtataatttttggccggtgaatagtcttgctgtttcagcgatacttagttcgaacactgttgattgtgttgggaggagaataacagtttcatgtttgatttcaagtatgaaattcattgccatggattgcaaagcccatatctttcaaacacctggtttggaagttcaacgatactacgtatatactttatttgcacgattactaataccaatttggcacattcaataaaaacaacctatcttcattcaaatattccatttggaagttcttttcttcccaaatgcactggagaaatggggcttcaatttcactaagaagaaaatttttacaaattacaaaagaagggattcctttgatcaaagaatccctcctactaagaacacattcccaaaacggatcacccacaggtgaagcccgtccaaacaccccgttcggaagttaaagagtaaatattttatttgcacaattgataccagtttagtacatttgaagagagacaatctatcttaacaagaggtttgaagcatggacatgtacgggctgtgcagggaacaacccaacagtttcagcatgtgagcctccagcaatgaagatacatatcagcctggactgttgttccgtttgctgatcatatgaattgtaaggttaacgagaaatctgcataacgtctagaatccattctttcctttcagattgattactgatagttcctgttcgacgtagtcgccagcacagattggtggataactatgagcatcggatgcttcagcaaagtggcccaatggcttaagggttgcatcagaagcaatgtgtgcaaacagctatttacataaataggcaaatgggtaagtcaatagttcaccagagcaagtaagattaaattgatggaagtgcctcatgaagtaaatcacatcgagaaggagtggttagcacttacggttgatgaaaccctccacaagcttctattttgctctcttgctaatgctattgcctctagtgttctcttggttaccactacctcatgcattccagctaaacactccccaccagtaagccattccagctgcagttaaagaacaaactatcctctcaacaaatgatgtgaaccaatgaagccgatggtagcagaaaaggatgtgagcaaattcaagcaaaaaatcaataccagcatctaacagacatttttttaagcttaagagtgatccttgttcacagcacgatagcatggagtatatatcccaaaaggttgacaaacatgtcaaaattccaagcgcttaagaaaatgcagtcttgaatcatcaacagtagataacaaaacgctaaagcaagacttccaaatttgctctcagcatagtgactggaatcatggaaatatgcactaagcgctaactgacagataacaatgaaaagtttactcctcatcctcaacaaccttggttcccaaacccttgagaccctctgcagggatctcagcaactgtgaccagagagtagagctcctccttggcgtcctcctcatcgtttctcttgcgagagattctaacacggactcgccttgggacactccggataccattggtccagatggccttgttaagcttcacgtcgatgcgtatatccgttgtgcccatggccttctgtgcaaacttcctgatctccttgatggcattcggcgccttcttcttgaaggtgctgtttatcagaaagaattatttcattatagggtttatttcaacaaatcaagacttttcaagattgcaaaacttgtaaacaagaatctgcatttatctaaaaggtcaaatgtaatatgaactgtgaagttggctgctttataaagaaaatatgtgcaacaacaattagttatgcagtgctaaaaagtatgaaccacaatagatgaatgaccagaattgattagcaga

SEQ ID NO: 17125 - DNA, 999 bp, Oryza sativa
taagagtagtcatttgacataattaggaaatatttgagagcaattgaaaacctttcttgaacttggcactgattttttgtagcagaccgactagggtgctgtcctccagagcctgtttgctaggccttggatccagaatacttccattgctagagttcacataaaatgatttggagtttcctgtgatacagtacttgtttccttctaaggtcataacatcaatataaatgagatctccatgcaatctgaagaaaggatcaacgactgtgaattccatggagaatcaaaatactaagcaatagccttatatttgaccaatctttctaaggtatccaaataaatgacacaagtgcggaatatgcggtcattagagttacctcctataacttggcggaggattaaatgaagaaaaaactatgctacccacgcatttgatctctgctggtacagatggcaacaaattaatgacagcaccagtactgtcctccatgaaattcaacccatcaagctcttgattagccgtttttcccagaatctcctaagtaaagaaaagacagaacatcaaaacttgcgtgtaaattagtaaactaatcagtgacatgcaaaaaattcctaataatatagaatgtcatcaataaactacacagcatagggcaaaaccaagggttgtacctgcagtatctgcagatttttcctgtgcagattcttgctgaagagcaagggatgtggaaagtgatacatgaagactagagagggatagcaattccctgacacgacggagatgtgacctaatagatctctcatcatatatcgctagaacaaaacccaaatcgttgcgtcaaattttaaaaggaacaactgaagagaatgatccaaaaaagataattttgaattgcataccagcaacaatctccaatgaacagccaccagcagttatatcagcaatctcagcaatttcattatagtcctcaagctcatgagttgagccatctttagtgt

SEQ ID NO: 17126 - DNA, 2873 bp, Oryza sativa
ccccctttgtaacaactttccagttgacaaccctcggttgtactgcactaagaagttcaaggaaaaaccgtccatttgataagctcttgtcctgagagaagataagaaaatttattaactggagttatctaacaacaaattaaaactaattaaacagaaattaataacaccttgaagctttccatttgagatgttcttcctgatgctttcactttgctgtttgcccattttagtatatcagcatcagtaatttcttttccttgggatccttgggagtgggatctcagtctattcaacaattgaagcatattaaatctcatcaattgccacagaagtgctgaaaaacaacagatatggcttcaattgtgtgctaaacagataacatcaatcagaaaccactaaaaagacttgattcagtcacactcaccaacaatcaatttcttgttaccctgaacaatatcattcccagctaaatttactaaggaaaactttaactcctttccgatttttaccacttgattgcaattctccaatttcctgaatggtagtttaattggaggtttcgaggccagcttccaattgacagatcctggagaaactttgtccagtacttcaagaagtacccatctgcatgagaaaggatgtaagtgcccaattcatttggagacagacacaaatgctcattcaaataatctcatacccatggcgaacatcttcaaaaacattgttcacgtaagagtcaaccccaagactgttgatccacatccgaaaggacctttcttctctcgataatagaacatcatcacgtgatgcagtctgattgagagtaacttgtctggtgtcactagttagaccattcctgtgcatcatggaacaatagcattcaagtgataagcagatgaccaattcatgggcagctagctaagaaacttttaaagtgaatatacttgcacatggggaaaataccttagctagctttatgataaaaaaaagaaaagttaatgcctttggagaaacaagaaacatactacttaccgatgctggaatatttgtgccacaaatgcaagattcaaattggcagaaccctcagtgatatccttaggagtcaagtatcttttgcaatccaacttctctgcttgttcaagtaccaatttagccctctcactaggatcctttgtctctaatgtggtttcaggggaatgctctggagcaagagcttttagaaggtaagcatatgcttcaccatcctgtacagaactaacgtatgtgaacattggagattgaagtaatattaattaaatgaatgtagtttgattcacttttcccacatacgcatttagaaaggggatttccagcataagagtgagtcataaataattttcaaagccatctgttgcttagtcaatcaacccaaatgcaaagatgttgcaagccaaacagtggattagcacaagggcagcttcttttatcaaactgcacataatcaattaattataatgtcactttgttctatgtcatatgcaccttcacatctgtagagaaattgctgacggttttcttgaagccagcttttttcagatgatggttcatccaccgaagtagcatcttttctggtgacaagctcaacacttcatctatatcctgcataataatcagtaaaatgaattttgttctaagaacatgtgaattaaattaatagaaggacagaatgtttatttaccttgctgtcatcaaacaattccaccagctggggtgtcttcttgagattcagatcagccaaaagttgaatctgatgataagtgcaaaaagatctttatatgatgaggcaggagtttaaccatagtatgtcaaacatcaaaatgcaaaactcagtgcaacatttacctttatgatttgagatatcaatccaagaattaaatgaggctgcaaaaaagaagcatgttaaccacaacttaacttttagtgaatttcttgaattaaatagaagaagtcacaaagggaaggcggctgaaaacatctgacacatggacaagcatatcaaagaataacacatacagcaaatgagcaaggaaatatgaggtggaaccaattagcaggttatacagcgaaggataaaatggtatgcagcaaattagtggtgacaatgactaattgacagcatactttgtacccaaactacctagcacctacagggcattaaagtatttcaatgtagtcctgaatgaaaattagtggtaaaaataatttgcatagactacaatgcaccatgaattactaaaaagaatttaaagtagggaatgcgttgcatacccttccctccaccaaatcttgtgtaccaatgtttacaactgtacatccaatggccttggcagagttgaggcacagggtgtgattttcattcctctcccatgggttaagaactcttttcttatttattgctctctcatcaatggtcccaggtacagctaaattgatcaatttactgagcaaatgatccataaatgagcaaatatcagctatgactcaagggcagtttctgttcaacgagtaaatggatatgcaccctttggttagctgtaaagaccatctctcaccatagcataacaccgtccctgacaagatcgaacagctggttgtcggtaggctcgattggtaaatacttcttcagaaacgggtcttcacgaaggtaggtgttgatgtgcgccacataagacgacttctccgcctggttgagattgtgcagcaatgtagtggtactggatttgaggaaagatgacgcggttttgccacccccgccaccaccacgtgcgcattttttggcgctcacccttgactgcagattcaggtattcctacaaacgcaccacacataat

SEQ ID NO: 17127 - DNA, 2088 bp, Oryza sativa
acccactatttaagtcttggtctctggttgccacgaatattatatactcacagctatgtttttaatgggattttagtataggaattctcattggtttctgtctttgagtatgtattagggagtaaatttattgatttgtgtatgtaaagtaatgtctatggcctatgggtatatgtctttcgtgtaattgcagagagaagcacacaaaatgggaaatttgtaagggaagcgtcagatacagtcccagtgtttacaagaaatgcagctgcgttgctctgaactcaaacaggcagttcgatcgaaacaggaccctgacagagtgacagaagctcaaacacgcacactgacataacacatagcataacatcaacttgaactgacaaagcgtacgtctaacacggcgttaacacagcaaacaaccgggacagacagggcaacaatatacaaaagaaccctagggtgaatcaaaccaaaaaaaaaaatgagtggataagacgcaaacgagacgaaaaaaaaaatgtccacttctgctcccaacggtgacgacagtaacacacagcatgaatgccggccggccggcgcctcacccttctactcggcgaccaccaccggaaaaacggctcagctgatcattagctcaacgccggccactctcggcgtatgtcgaaggtgtagttgatctccaggtaacatttccggtcgtcgtcgaggaactgcaagaataaattaacaacacattgctgagcgactgaaccttgcaggtttcctgaagcagctgatatctgacaaagaaaattcgcgtcatgcgtaccttcgtcctggccgagtaggatcccctcgcaaacatgccggacggcgtggtctcctccggcgtcacgtacgtgtacggctccggctgggggctgaacgtgccgagcatctccttgtggctgtcaactgcacgccccaacgggaggaaccaaaaccatgagtgcgtttgcacaaattcaaacgcgctaaatccatcggattttataaaattttagtagtaattaattgttcatctattggagacctaattaaatgtttttcgtgtttgggtatacctttgatgccggtcttccagacggcattggtgtagcggaggccggagacgatgttgttgctgacggagaaggtgaacttgagcttgtagagggagccctccttgagggtgaaccagacgcccttggcgttgggctccaccggcagcggcaggaaaatgtccggccggccgggcgagaggatggccaggctcatgatcttcacgtcaggctccaacgtctctgcaccgataaaatcaagcgtgacaggttcagacttcagacctcattattgggtcagttctttttgggacattattgcatcctaatggccaggacgtgtaggccaaatgattggccgtagttttgagtttaaaattctaatggaagacaagcagatgccgaatgaatgatcatcctaaaaccgaccgtgaagcagctagccatcatcctcggattatttggttaaacaaccacaaccatatgaatcatggtttattcaacactagtctaaaaagcatagacaaaaagccaaggttcgctagaattatgcgatgcaaaaatgtgtctttttaggccactattcaaaatccatttgatcttaaaagcaccaacaccctagcatataaactaacaacagaaatgcactgttccccagtattaagatcagaaggcattgtcaatgtcatgatcagatgaaagcattagttcaagcttcaattaggagcccggaccagattcattatcagacaagccgaacatgcacggcaaagtacaggagttattaacaggaccatctaaccggtgcattgaaaacgccggacccgtccagccaagcccaacatatttcactttttcttttgctgttctaccgtattttctacgtacaaatcacaaatgtacggagtagaatgcaacacggagctcacgggggcggtgcatgcatggatgaatactatagacgatggatgaatctagtcgtggcccatagaacgggggctaagcacggacaggtacacaggtgcat

SEQ ID NO: 17128 - DNA, 4585 bp, Oryza sativa
aaatatgtatgcggagtgttccagggttttggcatggaaatactatgaactttggaatagtagtatggcagtcaatcatggtggtttttgcagcacgtggagtcccatatctatttggctccttccttgggtagccgtcaccccgctctcccccgagatgcagagttgcccaatgatgccgcgccggggcccgaaaccggtggagacgcaaacgcgggaggtggcggtggcggcccccggcagccgaagtcgccagcgatccatcatgatgtcgcgcccgcgaccgcgcgacagcatcacccagacacacaccccgtattccccgttccggctgccaccgctcgggggcacgtcccgcgccgcgccgcgcacgtccctgccactcactcccgttccgagagaccgccgtgcccaagtgccaacccaccgcgggcggggcatggtgattctcgccgtggttttcccaaccgtctacgcggcgcggtggcgtccgtggcgtgcggcctcttttccagtcacgagcggtaaaaagtggcgcggctttgccgaaaaggccccagccgcttggcttgcctgccgcccgctcagctcccgcgtcccgaccggagacgacacgagggcgggtcaaggcgaccagacgaatcggcgcctctgatgaatcgcgctatgctttcctctgcgctgattctacagtgaaacctgcatcgatgccacgtctccgtgccaaacctcgccgtgtcttcggcgtggtttagttcccaactttttcttcaaacttctaacttttttatcacatcgaaacttttctacacatataaacttctaacttttccatcacatcattctaattttaaccaaacttttaattttagcatgaactaaacacacccttctagctctagatgattatggtgcgcgctcattgcagcctgatgccactgctgggcatggcaaagcgaaatgaccgacgagatgcttattatacgttggatctgtcctcaggatcagcacatgactggtaaggttagtttggtgctaccgtggtggtggcccattaaccacgttttcaagaccagacagtgcttgctttaaaaatactcttagccactgaaaccattagcttagttttgacttctacacttgacgccctcggtttatttcccaggtttaggacttagccgacacaaaaacgtttggcaatatcgatctatcaaacaaggatacaattcagatgagtttataccaaaaatattctatttttgatgcaaaaatttggtttcgaagtactcctgatgcaacccaaccccgctctacatatataatggtagaccaaattcggttttacacttgtacatatatacataagcaactgtactgtgctgtttttctcaagtatgaatgtgaaatatgacagtatccaaatggagataaaaatgtttagaaatacagctctaattaaaaaacaaacagactggattttcactactcagaagataaggtaagaacaaacctatccagcgttgccaggctaggaacaccgtctatttagcaactaaactgagctgctctaagaggcaaagagaatcaagattgcaggaatttctgctaatatcaccagctgttgagagctctgctacaagcaggccaaaatagtattcagcttggaagagcagctgaacacctgttggtgtacagtactatcagttcatttgttttgcctcaacattggcaaaaccctgagcaatcagtacataattttgcttacatttcgcagcattgaggaactactgaagagaagacgatgagaaaaaaaaaatgaagtctactgaatactgaaaaattgtgtagatggactcacttgcattctagccctgcctccgctgctcgcctgggcttgtttttgcgccggcttccaatctgcctgaatccattagtcctagttgattcatcactgcttgatcgaacactggaattactctcttccaggacaagattggagctttttttcagctgcctgcctctcttgttaccagcagcagatgcagtggtgttcttgtctagccttgatgccttcagcttaacatcatcaccttctactttttcgccatcaattacattgtctacaaaattttccacatctacttgatcaatcttatcggagaagcgcttttgtggccttcccctcctctttcttgcaggcatagcttcttcagcgccgcttcctttgttttcatggctccggacaatcgttagcttttttcctgtgcctcttcctctacccatctatccaacttagcagtgacaagatttattcagacaatcactgaagctgcaggctctactgaagttgctctatgtttttctctagttgctatttggaaggaaagtactcaatatttcaccgagatacctcgcgatggcgacaatccaatcaagaagataggctagaaatctgcagtcgtaataccaagaacaacatgctgttacatctaactagttcatgatgaaatgggttcttggggtgcagaagcaataaagtttgaggtctattgagatccatatcaataaagaagttgcaaatccagatcaagcaacataaatatccagatgaaaactatacaaaacagcaagcaatacgcatctatcaagataagtttaacaaaaggattttttttttcgatagagaacaagaaacataaaacaaggaccgattcaatatcggaaccattctttccacggatgacaagcaagaaactcaccttccatatagctggcgtccactccaagcagcatcatgcatcccatttcttcatgtttggtagccaaaaaagatggaatttttcgcaggtgctacaggaaaagaaacgctgggtatccaatggatcggcggtaatattcggtttgcgatgccagaagtacccgcggatcgggaggtttcagcaaagattgggatgtggtgttcaggaagcaggagaggactcagggctctacaaatgaacaactagtgctctggggtctgggagttctggatggttgggctccaatagcttctggggtagcagcagcagctgcactggctggggtttgtgtgtgtgagagagagagagagatttggttcttctcatgaagcttttttaatactacctacgtttcaaaataagtgtagtcgtgaatatccatcttatttgaaaaatttatgaaaaaatttaaaaaattttgttacacataaagtactattcatattttatcatctaatagcaataaaaatactaatcataaatttttttcaaacaagacgaacggtgaatagtgcaaaactgcacttattatgggacgaagggagtactgctactcctgtactagtactactactgaggagtcatttgctgtttgtttatgcttttatttacagcttaccaaccgttgaaaaatactgagagagagtgtgtgttcttggcttcttgccattttccagattaaaaaagcaaagacagaaggatccctagccctagggaagcggtttacttttaccatgatgggatttttgtttccatgtttctggatgtttaaacacctaggacagccagtagtaactcaaccgggcaacacctgacaccctgacgtccaaggtcattttgctttcaaagcgatgccacagttcttgattggctccagcttccaggcgagcaatgctcctgtactgaacaggtgtttatttcagatagagatcaatattttgttcatggcctttacctaagaaaacttcgtgtttataattcatttgaacaggtcaacacagtttttgttcatctctactccgtactgtgcttcctagtgcaagtcatgcagatgccctcatacttctcaaacagtgctaagttaaaaagtttagcagtatagtatttcagagtaaagaatgatcaggtctcttctatttactgcaataccatgaagagacaaatcttagcacacttcagctgctgcagcaagtggctgtattaaattataccgtatcctgacacatgctatacttttttattgtattatctcttttactttgaatttgaattcatctttttatacagtttcttatcaaggtagccaaccaggaggttgtactgatcgctagtgcaatagcactactgtatctctgtattactgtactgtgtatcttgagatgattctctcaagcatttatacagaagacgtacatgttcctcttgctgtcaggtcatcattatataccttctcccaattaaccgtccttcaattctcaccgctaacttgcaaacgaggcatgcttgttttgacaagagcttgttgaacaaacggaatttatgaacgctgctagtactcatttgaacaaacggagtacattataaaagatatagtctatcaattatattattaaattatattattaagacagtttttaaaggagaaaccacgttcgctgtgggcaggggtggatccacagtctaacgtccggggtgatctgacaccgatgacatccagcgaaatgcgcggtgatgctcaaaattctaccagctgtgaccccggcataagatggtaaatgaccccagcc

SEQ ID NO: 17129 - DNA, 716 bp, Oryza sativa
tcttatttggcttagaccccggatctgaggagcctatcacacttctgccagatccattttgaccatttggcttctggtcctttgggagttgctcatagtcggagtcaacagcgaaactaaagaaaatattgttgtgtacatacctgaaatataataagagcataggtaagcatctctaaatgggaattaaaacatcattaaaaaacagttaagccagatgactcaaaccaaacctgatgagcaagtgcaaaagagaagttcctaacagtcacatgcaacacacacccttccgagagagaaatttcacataacactagtccaaaattccatacaaaaaccaaacaacactcacagacataagaattgtttcgctaacagttcagatagtattatatttgagcttactcacatatgaaaacattccggatcagttggatttattgggggtatacacctattaatgacaccaactgcccctttaactgcagcatcaacgaaatcacatgtcaccttataaagtgctctgccacgcaatatcctacaatagccagaaatatttattgtagatgatataaataggcaatccaagaatgcaaaggtaggtaacaacctttcttgaggattgctatgaggaaactcctggcaagactgtaattcttcattccagtctctttgcatgccaatcaattcggttccatatgacagcacaacagaat

SEQ ID NO: 17130 - DNA, 2174 bp, Oryza sativa
tcaaggacgagttaacaagatgcaatgaatggcatgacggtaaaggtgtactacctcctcggtgcggctaatggcgaagccgagcttggtgtcgccggcctcgagggtgatctccactggcatctcaccggcggcggcggtgtaccagacgcgcaccggcttcaccacgccgatgtccacgccgtggtagtcctcgaacccgtaaaggctggcgttggcaaggttcgggaggtcggccagtgaccccgagttgaccgtcgcggaggccgtctcgccggagatctgcccaacatgcaagatatgcatgtcacgcacaacacctactagctactaaaacatttactctaggcaagtttgatcgctgttgaggaaccttggtgaggagggcctcggtctggacgttgaggaaggagatgggcacaccggacgactgcgaggagaggatccaggcgttggcgcgggcgagggtgtcctcgacggagttgtagcgggaggcggcgcggtcgagcgccgtggggaggacgagcatggagaggaagctgctggagttagggatcgggagcgcctccctcatcttcttctcccacgggtaggccacgtagccgtcctgcagctgcgccttgctcagggcacacaccaccctcgaactcctcgaccctggacgtcaccgtaaaaaaacagaaaaaagaaaaatgccgatcaattctcaggttcagatcagaaactcaaaaagaaaaaaagaagatgctgcattctatgcagttctgcatgatctttgctcactgttttacgagcggcaataagaaatttgaagaagaaaaaaactctatggaagatgactgaggaagtaaagtcaaccagggaatctgaatcgcattggaatttagcgacaagttttttccgagtcaggggagggaagattcaattatcatcaccgccaagtggcgttctgtataaagaaatcaaaatgcagattccaaacaacgtgcaccgccgtgtctgttgcctggaagtatgcaacttgagcttagactacagcaacttggtgtttttcttatctgaaactgacgtgtttgttttacttgtggaagcagaacacccatcaaatgcaaactacccaggtttttaactcgcttaataaatatcttatcttatgatttttttttctccgagctatcttatgattttgttattgctgtagttgcgtggtttgcagtaccagtaatctgccataggctactgtggattcttccatgatagctcaaaagtgttcaaccgtgactttcgcagcttgcacacggaagaagcaattaggatcgttaaatagagtagtgttctagtaaagcctttgttcaacaaacaatcaaacaaacattgtagccatgaataacctaatggaattcgttcaaaaaacctggactaatggatggccatattattaatttgtgcaagccaagctactctagaaacttcaaatttcccagacaaaccagctgccctccaccccccaacaccaacaacaatgttatcaccagctcttgcaatcctgactctgtcatacatcaaacctaggatattctgatcatatccccagactgagcaatcacaccatgtattgcaaccacaagatggcaaatttctgattatcaatcagcattgatccaagtatatgccaatcgaaaacgataccgtgatcgatcacgccaaaaagatctcctctcgcgagagagagaacgataaagaaggtgtcacctatcaagctaccaccatctacttgttaacttgtgcacaaaagtcgtatgcagaaggcacacgagccctatcctccttctttgtctgtttttaattaaagtccaacatggcatgtaacgaaagctcagtcgcggacttttacttttcttggttggtctagagcttgcacaaaccgaaggaaagtggctgtacggacggacatggatcaaaaaattcagcgaaaaaaaaaatctaattctccgtagtagtttgcatcgtgatgaggaggaacgacatggcgtatgaacgtacctcgaatggcgatgcactcgctctccatgcggtcgacgaagccgacggcgtagtttgggtcacggatcgagcggagcacgtactggcggctgcggcccacgacgggcattatcgcgccgccgcccccgaca

SEQ ID NO: 17131 - DNA, 1740 bp, Oryza sativa
gtatcagttttactaaaggggtagtactcagacatctcacgaactgttaactttgtttttacctctgcatatcaatcaatggttatctacgaagccagcatgtaatgatcgtatttgtaatagtcttgtctttatttcaccaatcaattagtaattttatagttcagtatattggctagaaagactcatgtctgttaatctggaaatgcccaattggcaggaaggagcatcccttctgcgctcatagctggttcttgcctggcttttacatctgctgcgctggacgttggcggcaacactaccagagtggacaatggcaaagagtactatccctacacagtcgagaataagcccgctcattgactgaagttctgtacgtgtagcccaagtcctgcaaaaccgtcagctcggtgaattttgaagctgatgcttactttcatgtctgttttgttgatgtactagctcctttgcaaatccttggcattgttgtgctcgagagagacctatacaacagtctcggaataaatatttttgcttgctttatcgtgatcatcgatcacaataaacgccttcacgatgcttgaaacatctggttttgcttgctttctcatgatcataaatcacaataattatttcctagcctcgaacatcatgtgatactgaaattttcatactgggatactggtcctcccgtttgaaatcagaaaatctagagtgcggtgcactttgggccaccttttagtttcacattggaccacccttaattcaatcttttcactttagattatctaactttagtttgttacactttgaaccatgccgactcttttctctagacatgtctatcctaggtggaggatttcattagcgtgccacagtcaacatcctggaggtcgttgatgtgttaaagtggaggtttgggggtgatctaaagtgaaataaacataaacttagctagtccaaagtgaaaagattgagggccagtttggtttgtgaccaatgttggccttaccaaaatttggcatgacaggtaaggccaacatgtgtttggattgaagccaaattaactaatttggctattgaaatggcctatgttatataggcatgccaaaatttggcttcaatccaaacatacacaattattggtgaggttgccaaaaaattagcaagcctaatttaggcctcaaaccaaactggccctgaactagctcgtttgggaagcttctcatagctacagcttctcccagaatcaaaagcttctcaaatagtttagtttttcgtctagattctgataagctatagttgcataatttaaaaaattgaactataagctagaaactagaaaaccagaagctagaaactagaaaacctagttttttagattctcggaagctagctacttcctccgtttcacaatgtgagtcattctagcatttttcatattcatattgatgttaatgaatctagatagatatatatgtctagattcattaacatcaatatgaatatgagaaatgctacaaatgacttacattatgaaacggagggaataccaactagttgctttttgtaatcctaagctatccaaacatgccctagaaatggtcaaaagtgaaaaaaaaagagggcccaaagtgaaattcacccgaaaatcttaagaaagtgggacatatagacaggataaattatgcaacgaagtgatacgttcttcttccccgtgttgctcgcaggcatacctcc

SEQ ID NO: 17132 - DNA, 838 bp, Oryza sativa
gaggtagaacatgctctacatttaatttctgttttttgttgttttattatatacaagcggccgtgtaatttcataggttgttgctgagatggctgcagttggatttggattgccaaaggatgcatttacctttttgatgaagaaagtaatgctgtaacaatctgtaatatcctgctgtaatttgttaatctactcaggatgcaagtaaacagtaccaggtcccagcattatgttttacttagctaaaaatatttctgttggttcacagaaattgagttgtttttttttttgtaattatgtaatgaacgctgcattttaatgcattattcagatccattctgcattcatcctgttgacattggtcgattatttgtgtgtttttcatagggaccacacctcctagcaccaactggaagtgaccttgagcggcatggttctgagggcactgtttttgctgggttccattatgatctcaatttcctgaccatacatggtcgaagtagatttccaggcctgaacatctggctaaggaacggcaaaaagatggaagttaaggtccctgttggctgtcttctaattcaatcagggaaacaggttagctttgcccgttttactgcaagtatcttaattagttcatattcgcgcatcaatagaaggtcatatgtatgcatattggtttctgttctgatctctaaattctggttttccatgaaattgatactgttgtcaatcatagaatcaaactttgtatttgtattttgagccttttctgaaacacaaacactaaaaaactgggagtgtaagctagtgaaagatggggcttatttttgacaacttg

SEQ ID NO: 17133 - DNA, 2309 bp, Oryza sativa
  unsure (1)..(2309): unsure at all n locations
aagatcttgatacgtcttgttgccnagagcactcatggaagaggcttcaagtcccaaagttcagtgtgtgttatttgtgtctgtaaagaacactgaaactttcagtatatgattagtcaaaagaaaccattatagaactncagcaagacatcgtcgaattcactgtggcaaaggtaaggttatgaaagaaccagtaaccagtgactctgctcctanccagaaatctgatatggnccgtatgtagtactgtggtggatgaggttcaaagatcggtacattaaaagaaatctttgtaggtgctcctcttgccttcttcattagtgtgaacaactctgaatgataaatagtatcattttcagaatcctggaaaataaaactgaatgttaccaacgcattttcctaaatcacttggtggtaaatacattaatgcatgacataaatatagatagagttctacaggatcaaattaaaaacatataaaagggaatatacatgcttcgtatatcctctaccacttaaaaacaagagttggtggtgataatactagcctctagcactctatactatcacccttctgtgaatttgtaggatcttttgcggggaaaaaggattgcattatctgtagatcctaagtgactacatctatagcgttttagtttctttcaaaataataattttgcatttcttacactcagaatttatgatacatttatttgatatttgtcgtggcccacaacactgtgttagcttttagtataaccgcatgagtgatacagttgatggacaaggttgctgaggaagatggtgagatttataactgtctctggagttactaatttgctatccacgaatcaatatcactgtccaatatagttggaatcctcaaaacattcatactaaaaaaagaggtgcattatccatagttccatacttcatacagtactgaacagagtcaacaaaaaaagcgatctctaacaagactataagagaatatttcatcgaagcaataagacaatcaaaatggtggaagatatgttatgctacaactctaaaatgatgtagcggcaggagcatcaaaataatatatgcaaagtaataaacctcaacaataatccaccatcgtagcgacatgccatgatgacgatctctccacaaaaattcaggagttataagaaggtccacctacaaagcaagagatgaaggcataaataatcaactaatttggtatttctttcagattaatcaattagcattagcccttacttattttgttaccaagaccacagtagaggaggcccccacagctagaaattttattaagaaaagaaataattacaggtcacagtagcccttactttaagaacagtcctggtgattgggctcacagtagcagataagttgacatatggaaagtatccaacatattgtttaaccaccttcagcaaaagaatgtaaatttcattagtcagtactcttcagcgattgcggtattcaaatcaaccttgcaagttacaggtaccacttcttaagtaagggcatacctttcctagatgagaaaaccgaataagagctccgatatcattttcttccatctcataaagacgatccagatcaacatgtttttcctcaagtcttttacatatctaattcagagaacacataaaaaatattagcaaacacataaaaatgtaaattattggtcagctgtagcagataacaaacctcatgagaaaggtctctgtcaaactgcctaagtggatgttgttcgggccatattttgcggtcaacacccttgcagaactctaataataaggatgtcatctgagaccaccctcggcgcagacaaatctcaaataatgccctcataatgcgagccaagctttgactaatgtattgagcatcagagtgcaaagaggagctatcaattggagcacgcgatatgtaaacctgcaaaattgataccagtgattggttaaagaaagttgttaggctcaagacattggaaaaacagtagttatccaatagatacctgtatgagaattgaaattttcccatgtttgtcagttggcccccccttaatatcatgtgggcatgcattcttaaaaagggattctaattcatcctgttcttcttctcttactacaatattctcaaactcagaggaatgggccaccatattaatcacctgaggcagtatccagaatgattagtacaacctcacaagcatcacccaaacaaaaagagataaaaccttacctcactctcattcatgggtaccgagctcgaatntcaatttgcattcatgccca

SEQ ID NO: 17134 - DNA, 1925 bp, Oryza sativa
  unsure (1)..(1925): unsure at all n locations
ccgcgtgttgactnctgcttgacgcctgcaggncgactctagaggatcccccctggaattcgcacaaagttaaactaaagcctagaatttacacgaaggtgaatcaaagttactgtgggattggcaaaattacctccttcctaatccgatcaagctcatctgcactgcagccaacaatcctctctgcctgatcattgaacagagaaagccaggcctcaccagtagggtcggagaccttgatgaccatgatgtacctgaagaaaggaaccagtgtagcattagctttggctttgtatcatctcaaattcaagcatgcacggtgtaattcagcccaaagttttacctcagtgagcactcagcatcattcttctggcacccttcacaccagtatcctgatccaattgcctcagtcaccttcttgttgcaggtcttgcaagctcggtaccacatggtttggtcaggcttgataaggctaatataggcattcagactgaagaacacaggctgcaaaacataacaagtaaatttaggacaatcacaactagaaagtgctaataaactaaacatcaagaacaattccattttctttcaaagattccaagattttaccttatcctgacccaagttggggtcacttgtgatgtgagacagaaaaactctatcactgtacatggatctcgcgccaccaacccttgatgcgcccatatctgaaccaattgatgccattgaagtacccttgccttcagagtcatacctgtttgccaaaataacgtcaaggaccaaagtagatagtttgaaagataataaaaggagtgtttgagattaggacaataccaagctctgagctgttctgcctcaggcaagtcaggattcactacaattgtacttctccccacagttgacagagacaaacctgtcgacattatagtagtaatgctgttagcacataatcgccaattcagatcctaccacatgcaggaaggtaacacaaacataccttggaagtcagatacttttaggctctttatcgcaatgataggcgcagagtctaccatgtccaagagctcctgaccagtagttgtggcaagatcattccaaagagatatggttacagttttgctcctgccatcagattaaatgtaagttatcagcacataaaacataaagagcattcacatcatcaaaagaaaggagttaacaagccaaatgatgcttacgagtcatccgctacaacgatgtcacgctttggaatcgtctcgttgtcaatcttcctcctaacactaagagtaggagatacgctctgaacaaccccaataacatctgcaagtagggtaaaactagtcagaacactacattcacaaagtaggaacaagaacacatcactgaactgaaagcactattgccttacctactagctccctgccaccaacatatggccctagctgatcaatcttgacaaagttgtactgaatctgtgggataaaagtttcgccctcagcttcctcaacaacagcattctcattcagggtcatctcgtagtcattatggacagtcttgaactgcttgttggcgactctgagagatcctttggagatgtagtacaccttccccagctcaaacatcggatagaacttcttggcagcctcgttgaacatggttgcctggatctgggtgccctgtacacagatccaacaaaattaactcatcaatcaacatacaagaattcagaattgctcatgaactgcaattacatcctacggaataaacatttcacggtaggttgcacttacatccacatcagtgagctccacattgaagacgcagccttcaccacgagcattcttgtcgtcctcaggttgcccttgcttgtgacacgcaccttgatgatccagttgccttgtaggggtcagggagaatcaaagatg

SEQ ID NO: 17135 - DNA, 1694 bp, Oryza sativa
ttttggtcttgcaatcccttgccaaaaaatttcaacccacagaaaagatggtaggaactcttccctaagggagaacaagaacccacccagatctgggcgagtttttccgtggcgcggaatcgcaagaacgctcatcaaagaggaatcgcacacaagaaacactcacgtgaagcgggtgccgatgggcttgaggtcgacgacctggaggacgatctccggcaccggcacgccggtggccgcgtccggcgacgcgttctccaggacgaacgccaccgcccccggcgtcactgacggtgccgcgtcggaatccatccccgagccgagttgaaggcttcacgcgggaagattcagctgcggcggcggcggcgatggggaggaaatggtttggagttgaggagaatgggagtgggagaggattggatccgcgcgcctttataacgccgtggtttggcgaggcgaggcgagcgcgcgggcgggaagggggaggagatggcgtttcggtgggatttttgccgcggggtttcgcgttctcctcttcttccccgcgcgcgaacggccgcgtctggtttttctttttttggctcggtttttgagctgtggcgggagaaattttggagggttttcgcgccggtggcggaggcggagtgcgagccagagagatgggccgggccgctttatcatcacgttcgcctgaacgaggtagtgggccgagactaatacggcccaattagtgagatgggggagctgcctcctcggccaggttgggttttgaggcccataagcgtgctttccatgggggcccactattcagcgtgaaggaacgacactacggcggaatcccccctaccgccggtccgccgccgctcgccgtaacctgccttcggccggcgtcgtagttgcgtttcacggccgttatttcagtctcagatcaaattggattgataagccaagcatcccaaattctcaatgtcacaatgtacaaattggcttacggcacagcagcagtaagcaacctgagcttcggcgagatcctcacgaggccagggtggtggtggggcagttgtcgacgccgcaggcgaggatgtcgcggtagtcgcgggagacggtgaagctgtcgtgcacgctgccgtcgcggctccggacgtactcgaacagcagcgccgtgtggttgaaggccgtcagcttggcgaacccgtagtcccggtcctggacgtggctccaccgcgcccgtacgccggcgtagtccgccaggctcgccccgccgccgcccaccaccacgtgcgtcgtcgccgtgaacgcgccgctgtagtggctcgccgccttcgccacgcacacattctgaatgcacacatttcacacacagtaaaacacaagcagaaaatgagagccacagccataaattcacaagaaatacacatactttacactttagctgttctcacgttctatacttctaaaatagttgtccctgtgtgattcaaattttatctcaaaatagtaggattcaattttatttcaaaatagttatcacttcatattactccctccgtcccaaatataacaacttttagcactcagaatttgctccaaaatataataatttcttaactataattctcttcctaaccaatcacaactatccactatctacttttcccacctacctctttctgaaccaatcacaatatctttct

SEQ ID NO: 17136 - DNA, 3061 bp, Oryza sativa
  unsure (1)..(3061): unsure at all n locations
ctcgataagtggtcacatgtatgagtggtacgccttaaaatatccagggttcgtatagtatttcacaaaattcaggggaaaaaatgtcctaccagaattgctcacggttctctgctggcacgtagaacatattctgagctggtacaccgcattcaccacctgaatccaaattcccatagaaggaacctgatccaggccaatctctttcatggttgccgctgcaagcacaaaacaatatcatcagaaacattgtttgaaatttccaccttgtctttggtttgtttctgtcgtcaagtcggagtaccttccaaccatgtaaggcacactggatgcaatgggttcaacttgtgcggtaaattgatcccattgtgacagataaccattggcatagcagatgtccccaatatgtattaccatatcaatattcttcaaatctttaattagctggtaggtcgtgttcagtgaaccaggctcgaagtcattgaactcatttgaaccatcggcctcagcctgtgcaaggagttcaaatgccaattaaggccagaggagaaaagcgaatttgtagcaaataatctctcttgttttagcatgagtagcaggtacttaagtatcttattctttgttagtttgactcgagatgatagaactcataaagagtacaaccttttctaacttgcataattgtcattaccaatttactactactaactaaagataaagacacactttggtggccttctgctaattgttccctatctaatcttttttatataattgagagattttatttaaagcacaagttgtactacatctcccatattaactttgaatagctatggagttccatatcgattcagtgatcagttacctaataatttattgcacttttgggagataaacgtggaaaaacaggcacattgtaagtggtatcatattcacaccttccccatatctccaaaaatgactacacgctgcaaagagtcttcccctggataaggaggtgcttggaagctatactcatgtccccaaataatagagccatctgatagccgatgcccaattctgtatgtatacctgaaatacaaactcacttgtaagacttgttggcacttgcatttgtacaaatgaatagttacaggaccacagagggcacagatgcagacaaagcaaggttgtgtaacactcatttacttgaaattaggccacagatccttgaggaaacttgtatgtatgaaaccaggatcgcgccatccaactgtcctagcaggaggacctgtggtaaaatcatcataaagcatgacaatgttatcatcttattaggttcgtcaaaagttacatgtcaatggttatttgatctacaactgctctgccattataccattattctaagatgtgtttcttttttagttgtcacttgtcagcactaatgggggattattactctgagcaagtaaaaacataatgaaaatttactcaccgcacatagtgctgcgactgaacgtaagggtgcctgcaggaaaaaggctttggatttgcccttgtaggccccatttgacaaatggtgtagcctcattggtgccatatccacttgtccaagtcactgtcatctagaatcacttaacatcagtcattattctgtaaacatggtatgatctgatttgcagaagcactttggtgcccatttgtttcataagcaacgcagacaagcaaacactatttcggaagaaaaaaatatcacttaaatggaacaatctgagatgtcttacattcctgtttttgttgctttgacattcgagctcataaacatattccattaaaaaaataggttacttgcattgaaaagtgctaaaggaccataaacgaaattttatttctgtccgcaatgatattttcttttgcagatcacaggctaggatgctcaattgagactcacttcattacttatggaatacttaacaagatgatacttacttcattccaggattttccttgcgctaggcgtgggtacacaggggcctttgggttcgtgaaggttactctctttgagtgtgcaatgagctttggctgtgaggttatataagacatggcataggcaagttagaccatataatagttcagtcacattgtattttaactagaaaagacaaaatatacaagaaatacccccatggtaactgaatcgttcaacaataagttttcacactaaataaatgaggagaatttggcacatacatttgagaggcctccagaaaacaatgcaaatgaaaaatcctccctctgattgattagctgaagcttcatggatccctttcctgtcttctcatagtcaagattcttgtagtttgcaaatataaactgccaaaaaattgtgcctccttcagcatatgttattggcaagttttctgaagtctcatctacagttcacatggaataaggctaactggatgtaacactaacctttatgggagctgtacatagaagtggtggttcaacccattggctctctgatggacaagtagaatcactggtaaattgccaaaaaggcaaaatataaataagatctcaacttctttcttgctgtcttaattaagcattcaattcaggcatccagcatcaggatgattggattgcaagtacctgaaattagcaggagagaacaccccaatccaatcatccttcgatggcttggggttgttataggtaagagtcacccattctctgtcctgtccctgcaacagataaggtagccaataatttgaatacagtgggtctatggaagttcaaaaaaaaaatcatgattgattctcctataaatcctaatgctgcaaaatgcaaatatatgcctcgaccgactaaattaaggcactattaactgggatcagaactctcgagctttggtaagtggtaatggctgactacatcgaactatataggtccgtacaagaacaaaaaacagcagcgagtgcttaattgaccagctagtagatacagtaggttgctgagaaagcttgagtacctcnaagcccangaggaagcgcnaggcgtctaccgaggcacccgg

SEQ ID NO: 17137 - DNA, 2113 bp, Oryza sativa
  unsure (1)..(2113): unsure at all n locations
atgcgccnttgagatacacctcggtacccttaatgcacataattgcgaagtcaaaatgggatcttatttatgtatcaacacatggttttgttgcattgatcttacaagtcaaggtcaccaaactaacaaaaccagcaacatacagcatccaagagaagctagcaaaaattggcttaagcatcatcagcactctgaatgtcgtgcagacaagtgcccttgccctgcctgatcacactagcttctacaggattatatgtcaaaagaaaaatgaccatcacgtcgacatttgaaccaccccaaaagaaaaggaactggatattgtacatagctcacactgagaacattgagcgatgaactgttagcgtaatggcattgagctgatgcatcaggtcaggcaacattctctacctgcactcaacttgcattggagtacagaacaaactaatttttcacacagcccaaaacggtttctgcccagaaatggaagttgggttccctccaagcacgctattcgtctcatcgatgttgtcctcttcatcgtcatctccataatccataagcttcagcagagtatctgcaaatgaatgccaaagaagttcagtaaagatggattggttctgtcactatgtagaaaacaacgatattatagtgttccaccattaccagaaacagatgccccaccaggtttgaccactctaggctcctttgaaggtaattgtgctgaatacaaatttggtggtgagactgaactcacgtccaaggatctcggaggtgccattggcttgtttaaatctgaacgcctatcctcatttcttgacatctcatttgaaggaaacttaggcggtggcggaggcatgctcttgggaggtgggggtggcatgctcttcggaggtgccattggcttgtttaaatctgcacacctatcctcatttcttgacatctcatttgaaggaaacttaggtggtggcggaggcatgctcttgggaggtgggggtagcatgttcctgggtggtggtggtggtggcggcagcatgttcttggatgcagatggatgtgcagaaacatgcggttgatcttgaagaagcatcccatttgatccaggctgaactttaattggaggttcaatcgatgaattggtcatgttacctaaaccgtctaaacctgtcttaacaaatttggacctctgttgtgagttctggaaaaatgaaacaaaaagacttctccatcaaattcctttgcattagagtaaatagtacacaatgaaatacaaataaaggatgaaatcaacaaaatttgtgcataaacagcacaaatccataaattgaaagcattatgactggtaagcatcatacatggatatcagttaaccatgcagagttatagagattaacttacatctttctaaagttcatataactaaagagcataacggaaacttcataaaaagtgtctacaaagaaataaagcaaaaggtactgcattaatactattgtttcattaggctaagaagtttctgcttttctaggactacttgtgaatgtcactgagtgagaactctttaacgtgcaaaactttaatggttgaacctatttctccaactgaaaaggaaggaaaaaacttgaccaaattgtacctaaacctattaagaaactaccaaatttcaaattcaaggaatggtaaaaatgcagtcctttacgaagtcttcttgtgggcatcaacagcttgaacacaaagggttagtaacaagatagtacaagcagtcatccactttagaagcagaagactgtgccttgctaattcaatttacgggttgaaaaactcatgtagtatcaaaaaatacaagcaataatccaattcagaagcagaagactctcgtcagttaaactccattggtgaaaactccagcttgtaacaagccctgtgaaaaattcacattctattaccaccctgtgagcttcagacaaggtcagagaaaatacctggaatgaaataaaacgtcagtagcagataaatcagtcttggaaaaagaaaaaacgtgccaatctggtaaacattgaaggaccactatgaaaagaaaatttcacatcacattttgaatcgtagattttctaga

SEQ ID NO: 17138 - DNA, 1731 bp, Oryza sativa
ccaaaattttaaaaaaaaaaggggtttgaaaatgaatcaggggaaatgaattcatgggtggatggtttttttagtggtgaaaacataaagatgtccgagataggcaaatgaagtaacactggtgctcatttcaatcgaatattaattttgggcaatagcagtggtgcctattaaagtaaatgctacctgaacttctgtggttgcgccctgtgaaactggtaattcctggaatttcttcatttgtgagcgtttatatgattatgcgtgtgaaaaagggttaaccattgccacagtgattgttgatgtagacgtcgataaaacaacgtgggttgatgatgatgaagcatgcttaagtgttaatgcaacttgctgaaatggagttgcttggggataaatgccccaatagcaaccataaaatgtccaaccatttgatggttgactaggacatatcaggttactaggtggtgaaaccacagaataagacggggccccagattgagatgtcactgaaggagcaactaaggaagcattagctccagtagatgcaaaggaatgtgatgctccggttaacacattagggcctaaagtagggtgtacatctggtattgttcctgacgtttgtaaaaaatccaataattgctgcggaggtggaaaagaaccatatacttttgaagaagaaattctgccatacaaaagaaaatgaaaatatacttagaactttgtggtacgatacaatctctaagaacagaatcaatccatgttttactgatcaggcgagtgcaaatgggttagaaatgtctggatataagaccctctcaccctaatattcagcaagatagataatgcatttactagtactaatattcagcaagataaataaagcatttactggtacaactataatgataccaacaaaaaaggaatagttcgaggcaaatacgaaaagagaagatgaattagtgactaatcatagcataactgaagcatggtatttgtataactaaaatccaactgatcatgtaaaatttcaatttatatttttttataagggcagttataatgaacgatactaaagcaaaagaatccataatttcacaaaacaaaaattccaaacttacagacctggaagcaccaaattcagctgctatagtatctagaaggttttctgctaaaacttttgcagcttctaggttcttcacatgcatacttgagatgtagaggtgtagaggttgttgtgatgctgtagtatagcaatagacattacacaaaggaacagaagtaatatgcttcccaactcacgagtttccaagagctaccaaaataaactacagaccttcagcatgacaattgaccggagtccctgaaccttttcctctgagtacaacagtgacccctgtttcattcatgatgtgatttatgtactgatcctgcataaagaaatcagaagcaccagcagcacaaaaacagtttctcccatcccaattgggatgccagagaaagcttcaagattagttttcttttcttttccacgggtaaacagaactggactgaattcataaaacaatactgacagtaatagcaacaatggcatggttgaattatccaataacgcttaatattttacaaaatacgagaacatacatttggaccacgaacccaagctgcaacgttaagtgatggatctgcatgaaaacccaaaaatattgaggcactaaaaggatgaacggcctg

SEQ ID NO: 17139 - DNA, 7702 bp, Oryza sativa
  unsure (1)..(7702): unsure at all n locations
agaggttattgtaattgtantactgcatgcctgcaggccgactctagaggatccccattgatttgaactagtttttcagaaattttatttagtttataattaccccattagtcaaaagaccaactgtaaatctagtgtacatattagtttttccgatactctgatttggtaaaaagacaaaaaaatgtataacacacactaatgaatgaactgtgtaatttttgcaaatattcaatgaattaggtgtacatcaccatctttgatctactaccagtaagggtcgtctttttagtactgctgctgcttgctaaggaatgcaagccatgacccatgagcattggatacccatcagcaggagttcaactccaatggcgcaagagaaaaaataacataaagactagacccatgagtattgaatacccattttatgaagcatgaatatagcaagagtaccttctcttctccgtgttggctatgctagatgaggtaaccatataacagaagaatttaataactcgttagctgaaaattaagaaataataacatgtgctttttagagaatcacatatgcttgatacttttacagcatgcaatatatatgtttcatttttccctccgtccaaacagaaaaatcctaagtgatttgcacatcagtagtggcgcaaggcaaaagtgtcatgctaattctggccaggcaatggaaaatgcatctcgaggttgaggacccttaacaaagcctacgatgagatgttgcattgttctttttttttcatttttctttttgcttggatgggtgaagagatatcgtagtcatacttgttgcaatatgactggctagagcttgtggaagaaagacctgaccattgagggcggagctagaacgaaatggggaggggtgtcactgcttgctttactctgctttaggccgagtttagactgatatgagtaactgagtttggattgaagggggtgcatatatggtgaaaatatatgaactataactaaaaaccgggttcctgggcaccccccctcttcaatgtagctcccctctcttcacccacaagtccagctagcctagcaaagttcacatttttcttctatcttgcatcatcacacgaagtgaactgcgtgatcgtcggagacatcgaatcaaaggtaaggttctgtgatgatcagcaccatgtaccaccacttttcttttttgtttttgcttggagttatctttctcatgatctgactcaaatgcactttgtgttcttgaatttctagctctcgcccattctgcttgctgccctgatctccttcaaattctagcccaaagaatggaggaccagatggctaaccttcgcttgactgacttcgagttcttcaggatcatcctgcccggatcctccaaaacgaaactggtaaaccattttttttgttgattcttgggtttctagcttcagcctagtgtgtgtttgatcgatccgtggtggtgcagaagctgccttacaagttcgcgagggagcttggggaccgagagctccgggaggcgaggctgcgggtcgccggcgaggggcggcgcccgtgggacgtgaaggtgttcgacgacgacgtcagcggcgacgtgtacctgggccgcggctggcaggagttcgcccgcgcccacgacctgcgtgacggccacttcctcgtcttccgctacgacggcgccgccgcgttcaccgtcaccgtcttcgacgagaccatgtgccggcgggactacccgcggcaccacgacgccgncggcacgtaattgctcgccgccggggncggccgccgccgccctcgctctggcatgactgatacctgtgtgttccgcctgcagagagcggaagcagcagcagcagcgacagcagtgatgccgcggcggcggtggccacggcggcggcggaaggggtcggcgacgtggcgctgtcgcagttcgccgtgacgctgcggcagtgcaacctcgaagacaagcaggcgcagtacttggtgagctcgtgcccacttcttttgctgccatttcttgttgccgattgccatgtgctagctaagtagctaaccaatccgaccaccgcccgtcggcggcggcggcgcagaacgtgccgatggagttccaggaggcgcacgagtacgcgaggcgggagaaggtggtgctgcgaatgcgcggggaggcatggacggtgaggctgaagcacagcaggcgggagcgcggccagcgcacggcgttccggtacgggtggcaccggttctgcgtcgacaacggcctcgccgtcggcgacacctgcttcttccgcgtcctccgcgagggcgacctccgccgcggcggtgccgccgacgaccacgtgctcaaggtcgccgtgcgcaaggccgacggcaccaccctcgagtgatcgatcttactaattaactactgagattaataaattaattagcgcgctctcgtagtctcgtctcgtcgtgtgtgtgtgtgtttaggtgttggttagtcgttctaaatggcccgtatttgtcttacgttaaatcgtctggtacttgatcggatggtgtttgtgggtgtgccactggcagatcgacaggtggccgagctgtgtaccgaactgctttattactctctttcacgaacaaggccctgtgtttcgcattcacaacaatgggaaacaacccaatctcgtcataagactggatggattcgtatcgcaagtgctccctcagtgttaatgtaaaccaacttaatataaaacgtgatattttatatttaaatttattgtattataaaatatctcattctatctctgatttatttattttgagacggataaagtataagccaatgttcaaagctaaaactgataaatcttgtttccgaagtttgaaatatacggacacacatttgaagtattaaacgttgtctaataaaaaacaaactgcagattccgccaggaactgtgagacaaaattattaagcctgattaatccattattggtaaatgtttactgtagccccatattgtcaaatcatggtgcaattaggtttaaaagattcgtcttgcaatttacacgtaaactatgtaattagttttttttcacatttaatactccatacatgtgtcaaaacattcgatgtgatgggtgaaaagtttttgttttagataccaaacaaggcctaagcatctagtccattttctaatatgtgtaactgtatcttctaaaaatctgaatgaaaaactgaaccatccaaacagatccaaagtgtgagagtgacacagcttaaggaacgacactgaaccgttccactccatggcagaaatctgcagactaaaaggattttaaagcccatatagcccggcccaataaaaagcccatacatctgcctggaaacgagcctgctagaccaaggcccatatagttgggcccgcctgtcattttatgtacttttcgttgccgtgttgggatgtgcaccctgatacccggaatcagttgcataaatgaagcacacgatacgacacgtccaggtcaggagaggctccaacggtcacattatcctcgctgactccgccgcgcgccgggtgctcgcctttctcccccttgcgccaccaccggcgccggcgagtcctcgtcaccggagagcgagggggtctccgccgtggtcgcctgcgcgctacgcggcgacgctgccggcttccttccgccggagtcaaccttgggggtaagggtaaggtttcccccgagagagagagagagagagagagagagagagagagagagagagagagagagagagagatttaggggttttcttctgtagtttttgctgtgatttcgtcttgcggttcttctttacatccgtggatgacacgggcagtatctacgaaagcatatgcgagttatctatcagatctggctcccccgatccccttgtgtgctagggttgatgcgcgcgtgcgatggctttggttggtgcggatttaggtatccttagtttgataccaacaacttgataggttagagccccaatgacccatgttttttttattcaaatgcttcagcaactcatgtctaattacatagcagagaaaatgcaatagaagggtatatgttatcaagaacgcacttttttggatgttttggtaggagatagcacatctgtaccttcaaaagttgttattgccctttcccacagattggcattggacgatctggcgcattgcacatgatggtcaatcgaccagaattggacttttggtactcttttttttagataatggatagaaatccggcctctataaggtcttttggtactggaatgttgttgttgccctagttgtttttcacagaaatttactataactgtatcattgtgcttgtcatagtttgctgttcgtactttataaaatttcggaactgcgggtttcagaccaggtagtttgctgttcaagaagtcatggccttaggcttcttttactagttccttttcttatttacattacaaatgattgcttgtgttagggcaaattcttggcaatctcgtcttgcttacacctcgtatgctgttggataagctcatgtggaagaatgacagcatgtgtgcaagatgctaacgtgttgtcttttccaattaactgtggtttttcataaaatttatctcattcaattcactgttcttttccatagtaaatacatgttcttctggatggtgggttagcaatttagccttcattcattatttctattaaacacatttttctagtgtataatttcttttcacgaatgctaggcaataggcatcaccacctcacaaaggtgacatttcctgatgattcccttttcttctgtttccacaccagattgctgcaaacaactccagtttctgaataaagacagtgccgatattaatggataagaaacagacctcgttaggcactcctgtctacaggacaaatcccttcgattctgactctgattctgaagtgccctcaagaccgtcaagggcacaatctgtcccagtgcgacgcacagatcaatctatacaagagctggaggactatgctgttgataaagtagaagaaacatcacgcaaagtaaatgattgtgtcagagccgctgaagcaatcagagaagatgctacaaaaacactggttactttgcatcgtcaaggtgaacagatcacccgaactcatcgagtagccgcggatattgaacacgatcttagtatggtaagttatgttgtggaacccaagtatccttgatcttcttctcatgagtattgctcataaatatgggtagaagctccatagaactttttggatgtgttagtactaaatttcagtcatcatttcaatatttcatccaaacattagactaaatttctatgcacctcaacgataagttatgtgatgttttgcacatatctatccttatctcactatcttaactcccctctagtttatgtttctctatgtcgtgtcaattgctgggctaaaccatggaggatttactaagtactattattattccttttcttgcttgtctagataattgtgttttgcttggcttgtttttaagatataaattacatgatgtattttatttctgaagttatagagattctttgccttgttcttaatctcatcagaaaaaaaaaatctgaaatccaaatttatggtctcttcagagtgagaagcttttgggaagtctaggggggctgttttccaagacatggaagccaaagagaaaccaacagataaaaggaccgatttcacaaagtatgatggtttagattctgactaatttctgggactctcttttttttttgcttaactgatccatttgagttatggcagataattctttcacaagttcagcgaaccacatggaacagaggcagaggctaggtatttcctcaacacgtcagccatctccaaatcaagtacatcgttcacctgcaactgcaatcgagaaagttcaggtctgcattcccatctaaccatgaattgtagaatgagtaatttgttctggaagtttacaccactttcttcttttaggttgagatagcaaagcaggatgatgcgctctcagacttgagtaacatgttgggagagctgaagggtatggcattggatatgggcacagaaattgaaaggtaatacttctttcaaatatttgttaaaaatgttatagaagagattgcccatttcagctgttcacttcactgttcataaaatttgatggagttatcattttgctgcaggcaaaataaatcactggatgctttcggtgatgatgttgatgaactgaacttcagagttaaaggggcaaaccaacggggacgccggttattgggcaaatgatgccatcaggttgtcgaaccacagcaactctgtttctagcagttttctccatcccatgggattcaggacttgtgagtgcgattagcagatgcgcctacttcatctggatattctgtcgtgtctgaattctgagcaaatattcagattcccgtgttgtgttgttgtatgagaaatcgtcatatacacttgttgtatgataagttgatagcttcaattacttggtgtaggacataaccaccattccccttttctcttagaatcttgatgtaatctgtactcctaaatatgccagaacgagatgagaagagaattgaatcaagcgatagaattactccagcaaatttgatgtgtgctccttgttttgtccttgaagctcatcttaggacttggcgtacgcttttgctacgtcaaaacccatgttttgcccttgtcgatttgccgcgctctcacgcttattacgggcttggtctgtgtgctcgcgcgcgggcgcggcgggcggcgcgatggcctcgggtacgacgaagccatgcggcgccgaccgcgacgttggcgtcatctcgccgccggggccggtcgacggaagaggaggcggcgggcggtggcggcgcatcgcgctgtacgactcgttcgagctcaacgcgatggtggtgcggctgaaccggctgctggcgagcgggagcggcgatggcggcggcgcatgtgggggtggtggcgccgcggcggcggcgcgggcgcgcaaggccgggagctggtcgccgctgtgcccaaggcggtactcagcatggtcaagcgcgctctccgtgggcgcggccggcaaggagacggctggtgatgcggcctgtgacagtttgtgttgcttggttggacgcgcctatgtaattttattagtattattattattattattattgctaaagttgcacgagctgcaaaactgacaagcatttgcttttgagatggatagcaactttagttgcataattacaaaacacaatcaaatcttgctaggtaggagtaatttcatcaaattggacccaaaattataacaatctgcactgagaacaccttcagttgtcgcatgtttattgcaccgttaggacactctccagactttgtttggttaatccccgaggagaaaaggatttgaagagattgaggaggattatgtgtaaaataaatcatctcaagagaattggaatcttgtgaaagggattaatcgccacgcaagcgtctctcccacctgacagctgctacactgcaacaccacatcgaccacatttgccctagtcgatgaaactgggccccacccacgatcctggcccacatcccagtgggtcgggtaagaa

SEQ ID NO: 17140 - DNA, 1163 bp, Oryza sativa
ataatttttttattaggataaatttataatattgtgaaagtgcttctcacgagaaatctcgcataacatttccatgttctcaagctaaggattttattaaaattgcatttatagtcgaagtttctgaagtttgaccagatcttttcgaaaacgttttgatcaccttagctgtataactcctagctggaacttcttgcgagtcgcagtgctgcttggccggctgtcatgtaatgggagacctcagaatcagcttaggttgccgacttacttacaatgagaatcttgtagcagtatgcgttttgttcatgccagtgtatggagttatttgtcctgctcctgccccgagtacagcaatggccatcgtagtaactggatgtgttgcgatcaatttttattatcttttaaactggatagtatatttgattcctgatctcttttttgctgcaaccttcgtgactaatgtttctgatcactggaaactaatctggtgttatgtctccctgctgcttctcttattgcaagtgtttggccacatggataaaatgttaactttcaaaagacattctcattttttagcatgtgttatcgttaactttttgagactggtgactattcgccttactaaaaaaaatcatataaatattatcatttattccttacatccccaaatatgtccccagatgtaagaacctacaacctgatgaacttatcaggaatgactggagtctgaccaaatttaaatttatattgctaggacatgttccattcgatttaaggtttttatattttattttgagacagatgaagtaagtattttgttgtgatttcaaaaataaaggttctttaagtataacctatatgtttatatgtttaataaaattaaacaagacgggagatcaaacgtatgaaaaaacacgtcatgtaaaactagtactccaataagaattgtttctggttaagtgctccagcctccggattggagcatatcgaaacgtcaatctagcaacgggccccctgtaatttaagggtgggtgggccaattcgccggcccgccaacgtgtatgcgagttacccatgtcgtctatgctacagaagagaaacgctctctctttcttctcaggcgagacgatggagggcgggcaccccgacccggccctccccag

SEQ ID NO: 17141 - DNA, 4592 bp, Oryza sativa
  unsure (1)..(4592): unsure at all n locations
cgcgcgccattgatttgccacttggtatccaacacaaacacaatctgctcgagatatctgaaggaatcaaacgcccttttcgttcctgagaaacagcctgcaatcaaccgctcgagtatgttcctgcagcaggtgtgacaatccacgacgactccatgtattgcagataagggtccaattcctttgctcaagaattcgactccaatagcaccttaataatggctttaatggcttggacactcacagagtaacacatgctctttaaaaatgctccttccataccatggaccagctctgatgcctgtcagctcccttgccctttcctcctttaagaaacaacaacaacatccaaaaaaacaaaatgctcactccctgatgctactatgagtcaaacccaacacacatgtgcctcctcctcctccttcttcctggcattaaattagccgagaccggcctgatccatttatctcccaatttatcctctcctgtctgtcacaagcaaagcacacgagtagtacccctcagtcccaaaataaaccaacctcgtacgggatatgtggtttattttttatggtgggagtagtttcttttcagggctgcctcacgtaacatgatcacatgaccaaaccggccggtccagccgagtagccgaccacatcgatccatccatcatccaaccagcggcagcacgcgactttgcaggggacattcccgtgacgacgcggcgggcagtagccgatcgatcgagagccaatcacgtcgtcgtactaatcaaatcaatacacttgccaccacacgagagagtatatatgtgttcctgtccacttggcccttttcaatgttcttttcgatgccaaccaaatccgttaattagtttctctctccaggatgaagagtacttgcacgtactaccactacactgccacgacagcagcagcagttgctgcccccggttgtccctgtcaaactctctctctcagtagatccggtcgtgcagctgcagtacgacgttgtagttgtcgtcgtcatcgtcgaggaaaaagtgcagccacagcctcgtgcacaagtagtagtagtagtgctgatgcgatgagaatcggttttgtcacttttgtttatggtttgaaagatagagagagagagggccttaaaaatgtctttttcttttgcttacttgtgcacacacactgcattgcttcagtagtgtgtccaaatcggcagggcttttttgaaaaggccagctcgagtcagtcaacctccgtctaattctcatataagaaaggcagaagagaaagggaacctatggtggagtatatctgatcctgtcacttgagtcacgcacacacactgccgccaaagttcaaaagaaaaaaaagagcacggcgatgatgtgaccatcaaatccactttgctaactaagccagcactaatactaatattcccctaatatttacattcctcctacgcatctatagtaaattgcacggctctttatttttttctcattgaaatatagaaaggaagaaagaaaaaaggttaccatgagcaagaatcttgtatccaagtcgctttaatttccccaagaatcttggagcaagtgcacacaccatgagcagccagacgacgagttgtgattgggcattgggcatgtggcgcgcacacacaacgtcaggctcgcagccaatccagtggcccagtgtgagattgcagtgagacagtatattgggctaacatgtgtgcgtcagtcagtcagtcagtcagcgcggctgctttgtttgtcccgtgctgttgtgttctgtgtctgaatggagtatttgcaattaaccgaggcaacagaacctgccatatcctgcctgcatatgcatgccagtgtcttgtagtagtagtagcagcagggacagagtacaataaaaaactgttggtactgctttggcatggcctgcacacctgcactgcagagaatgttccaagtgtactcctgctgatgctgatgctgcagttgcagtcatgtgtcccaagtcccaaagtcatgtgtgtgtgtgtgagagagagaaaagatttgatgacgagatggaaagcgttttgtactttagtacttctaggagaagtacagcaatgcatgcagtgcagtgcagtgcacagagatatagtgagtgagtgttgtatgatgatgagataataactcccattggcagcttctttgacgcagagaagtacgatgtgggggctcctcatgctggctgattgctgctgctgctgtcgtctctccctttggttttcttttgggagtactgtttgctttagataacagaggccggccgtcaacgtggggactatgccactatatatggtccaggaactcttccaagctgagtacttgacttttgttatactcatatactataagccatgtagagtaagtttggtatttatttatgaacatatgcaccaaagcttccactaatccactcctactgctgatcgagcaagaaaatattctagtggttcttaaataactctattatcataagttattttgtggtatgatgaattctcggattgagccttatgatatgttgttgtgcgagtgatatcatattagatctggaaggtgttcaaatctgtctagtattcaagtaataggatttttaccgggtactatgcatttcaagattcagagaactttattaattttgacaaacaagaagttcaacaatatgcatgtttacactgtagtcagatttgagagtacttttacagcatggtttgtagatttaaacaaactaacggtcaaaattttatttttagcaaccatatcaagttgaacgccgcgacataaaacaatatcaatttgggagcatggaggatctaacacgggggtgctgatggatccctatggagagaaggaaagaagagaaggactagaagggtagggggctagaggaggaggaagatgagcccctccaaacttgtcctagatccgccccagtttgggagtagtggtggccaggaatagacccaggattggctcaagggtcgggctagggctagcccatgctgagttgcgtcttacatgttgaaaaaatgtacatcataatgggcctccaatcctatgccttgggccttaggacggatgccctgaggcctaggccctcccccggtggtagtcatgccgagggggaggggggagggtaggataagtaacttgatatgcttatattctcttatgaacaacaaatggtacgcatacaagtgtatccatccacctaggtttgagtatcagttatatcttaataatattatcatatccttttagagaatcataccaaaacgtactttctatccacatgcaaaagaggtagctctcaactattgagtaactcttaattaattttataaaaagataataataaccactaccctgatataaaagtggtgtactgaaatatattcactacaatgataaatattatagtaagaaaacttagttgtttcaacttaaattttatcaagctaaacatatctctacctaatccaaagtatgatagtttcagctcaagcttcataaatttgctactcccttcacccccattttcatcatcccctaaggatttttatgtcttcccaaaataaacattatctaataagtatctcttccggcctcatcttttagcctatgcttatgcttatcagacaaaatttgaatttccaaccttaaatttgaagttgattttgaggtttttttcatcaaagtttagttttcagcctttgcttttagatagctaagaatacgaatataaaaattttatccacaaattatttttcgtttgcaaatctgtcgttttgcttattccccgaataagcaaaattgtagagtcgttcgtttatttgtgcaaaaagttaatgtgcaccattaagattaatttctattggtgcaatgtcatgcaatattttagatatgagcaatacatgagtcacgaaacgatgaaacaccttaaccaatgagaattaatttaaaaatgataaatattttggtgttcttggttttggtgtcatttgcttagagaaagatcaatctggaatggatggagtactatcttacacaaccacaacaatgatacatatgataaatatacttaaataaaaacaaagcaaaacatctcacccaaaatctatagccctaaactctttcaagcatctctagatggaaaaatccatgtagctcaccggcaaacaacccctcttttaaagtaaaaaccaaccaggtccatagcgcatttactcacaccagtcaccactttccctgcgcccccggctcgcatcccaatacccacgctttcctacccacgcgggcaccccccccccccccccaacaacgtnccttttcctgggtaccgagctctaaatcccctatagggggggggttacaaattactgggcgcggttttacaaccttgggactgggaaaaaccttggggtacccaaattaaatggcttgtgaaacaatccccttttcgccagctggggtaataccaaaaaggcccgccccgatcgcccttttcaacagttgcccaccctgaaatggcaaatgg

SEQ ID NO: 17142 - DNA, 13656 bp, Oryza sativa
  unsure (1)..(13656): unsure at all n locations
aacatttttaacatttcaggctacggaaaaataagaagccggtttcaggttgctttcagcttgaattctgctttattggttgagggttacccttccgtgttagctgtaatatcagtgggatcatcctcatcatcctgaacctgacagatctaagagctgcatgtagtgtcgtttgatatgaaactttggggtttgcatattgccgacgccttacgttttcacgtgcattagacccacagtaatacgttgggaatgtcacagtttcaccctactcagcatggaggtgatagtgattttcaggtgtggcaacaacagatgatgtacaagcaattgcaagagtttcagagacagcagcaggtacaacagcttgatcatggagccaggatgcaaccctcttttggtcagtttcaagctcctgcaaaaccacttccaactgatcaactctcggcaatgacgaatgaaatgccaaacaatgaatctacagcttatgcatggtcacatcaactacatggtagtagtgacccagggttggcaagcaattctcaaatgttgaatcctagcagtaacacaaattgggagcaatatggtggtgctcctggtgtagccaattttgtaaacggttcaatgttttcaaacactccgattcagcccatgagaccgatgggattagctgcacaccaaatgaacccatctttatatccaataaatactaccagcagagatggatctggaaatcagcactctcagttcttagggatcccaactgatccacggaatgcaatggcaagggcagcagcacatcagtccgaaaaggcatcgatgcaatttagctctttaatgagtgaacaaggtccatccagctctatgcaaaatttccttgggaaggtaggtgataatattaaggtgggcacccctgttccagtaaatcatctacaacatggtgttcaacaccaagattttcatggtaggccaaaccaagttgattttcaagcaggcctgcgtgaaaaatcaacaatgcaggtagagtcaggaaatggtggtgctagccttgatcctaccgaggagaagttcctatttggcaatgacgaggatagcaactggggagctctgttgaggggtggcaacgatcatggcagttctatggataatgacaactttggtggagctctgccatctctccagagtgggagctggagcgcccttatgcaggaagcactacagtctacaaccagtgacaacagtcccaaggaagaatggagcggcttgagcttccagaaacaagaacaaattatagccaacaattcaaccttgcaaagtcatgaccagaataaattttcagcattgagtggtgccaatctagaaaatcaacggccttcatcagctcctagctacggtgatggaacaatgcataatccaaagtttgctggttctcagcatgctgcaagaactccttatgagcaaagggacacgaatgcaacatgattctttttatgccactggtaccaatcatcaatcaactgcaggagtcaataatggatattttcagcagagcatgaaacaaaagcaatctgatgattacagtagacaagaacaaatgaacgcatcaaatggcatttgggcacaccagaaacctgaaatgccaagaaataattcacactcatctggtggacatgctacaccaccaagtgcacatggattttggatgtcccaacaaaacagtattgatcataatatcagcagagagtctggtagcacccaaaatgactggaaaagcaaggccccccttgtacaggacatcaacagtaccccaaacgtctttaataatgatgggagcttttggaagtctagtggaggcaatgcaaattcagtccacaggcctcaacagatgaagcctgatataagcaccatgcaaatgccaaatgacagttcggacggtaaaagcactagtgcgatgggctcaaacatgccaactttaaatcaggatcagtatcaatccattattggtcgaactggtgaacatgttgggcaaaaccataatatgggacgtaagggtccagagattacaggatcactaggaagaggtgcagagcaaaagtcaaatgaccacaaccaggattacctaaatgtgctccctactgaaaggcaagggcatggttcaaatcatggacaacatgtgagcagtgattttgctaccaggaggcatcctttctttgctggaaaagaatcccaaaatttgggtcaatctggtcagcaagcaatgggatcatacatgttgcagaatcatgccatggataactcaggaatgaacattaggcattcttcaggcaatccagtgcctaatcagtttccatctcagtcgcatcagttgcataataacctgaaacctcgattcattcctagctcccaggcttcgagtaatatggcttcagtaaatgaggtatgcctgccaacttcatgtacataatgaagagtattgttatttttgtttgaatacattttattaatgtacttttagtctgtttattcgtcttatttatgaagtaatttcctttttagaaaatgctgatgagagaggagcaatttaaatctcgacatgttccaaatagctccagttcaccaccctttggaggatctgatgctggcctgcctcaaaatcgagcagttcaaaacaggtatttcctatttcttaattactcaaatcatgtgttgcttgccgaattctagatcttccacttgtaagagtttaggtttattttttgctgtaatttatgcaatttgtttcctacacttgttcctttatctactattataaactaagtgaatgacggtggtgagtctgccatcgcatcaccaccaccatgggattttctgtgaaatgtatactacttgaaaaatcttatctggaatctggataactataccatctgcactcatggtttgtaatataattatttgcctatttcaattaaaaaatatatattcttttaaacttaagagtttatgatgtacgtattctaaatcattgcaacacatgggtatttggctagttatttttaatgaagtaagctattgttaccggttagttttggtgccctctagcattaatgagcgaactcaaatttgtggagaactgtatgctgcctttagcattaagataacatcaatgctcctttcaatgtagaaatcgttgcagcacatggtatttggctgtgtttttaaaaatgaaatgagctattgtaactggttagtatatgcgccatctactactaatggagtgaactcaaatttgtggggccctgtagcctttaacataaggttgcaaacaacattaatgctcctttcactgtaggactgaagcattcctttgctttatattctatttgggatttattgcaggactgattaactcttttgcaaacagtgtattttttccatgcatagttcttcgatcttttttttttctgtagccactttatgcttgaaattcttcataaggcactgacacatttgtgctttatgcagtcaacatatgcttcaacttctgcataaggtggacaattcaacagatagcaatgctgctgctgatatgccaaacagttctcctgataatactggtactgttcagcaacagcttaatcaatcttctctgcaaggttttggattaagactcgcaccaccatcacaacgacaattgactccaggccatgtatggtctactcgtgctgatgttgatggcaagcaacctgagcactcaacaaagggagaagatcaaacacaaccttccgctgctagccagtctttgccacctgggcatccaagttcacaaccgacaccgtttaactcttcagaaatagatagtactggacagcaaactgggcaatttcaccagtttggttcaggccaacaataccctgtctctgagtcaagatctggttctgtagcgatgcctcagcaaggcagttctgcaacagtgttcaagaatgtatggacaaacatatcagcacagcgtctagccggtgtgcaacctaacaaaattacacccaatattctccagtctatgatgtttcccaatagcgctgcagataccaacttatggggctcccaaaaggcagatgatcaaggacagagagcatcaactccatctgatgttgccacaagttctaccaattcacaaaatcaagaaacaaagcaaggtggggacagtgatgcagggttagcctcttctgagatggtaaatcttgattcaacaggagctactatgtcgagagaatccatacagaagcattcgtcagacgggaattttgccatgcatgtttcatccttggcacggttgcaccagcagggaatcatgaaccctaaacaaggggagaaccctgcagcgaactttcaggctatgaagacttctcagaacactgctattgggttacatggaagcccgacaccgtcaaacattcagcagcagaattactctttactccatcaaatgcaagccatgagacacgtggatgttgatcccgcaaatatagctggaaagaagcttaaatcacctgaaacaggttctgatgcttcacaggttgactggaaatctggtcagaggtttgcgcatggaaccaataactcggtcagatcgtctgtagataacattggcaatgcaaatgtcccagggccattccctgctgacatgaagatgctaagctttgctccaaggaacaatgaagatagaggtccaagcataccttctcaattcccttcaagagaacctccctctcagggtatggcagttgcagcacaaactgagcagcaaactcaagttcagccagcaaatgcatcatcagatttaattgaaagaagtgagaggcccaggataaaccctcaaatggcaccttcttggtttgagcgctatggaaaccacagaaatggtcagaatctttccatgttcaatttgcagaagacacctgttccgccatataatgtccaaaaaccttcttggaacatggacaataattctgctgagcaaagaatcgattctggccaatctgttaagcctgggcattacatttcatcgaaaaagatggaagtttcagtcccttccagtataatgcaaaggaggccaaagaagcgcaaatctgcagaatctgatcttgtttcttggcataaactcattgagcaccccaaaactttgagaaacatgaggtaattccccaccctttacaggtttagcctgtccttagttgttactttttatcactagtttctgtgacaattgtgtttctatgttgaattgctttaatttatggtcttgatattgctctctgtcgtgacaatcttcaattggcttgacagcacaactgagatggactgggcttgggcagctaataggttaatggagaaggttagtagggccttactgtttctaccttttaggtcttgagcacaacaatctttatttggtactgaattaagtttcaaaaaacaggcagaggatgatgcagaaaatctagaagatgtccctgtaaattatttatggcgcaaaaggttaagattgaccacacggttaatccagcaaattcttcctgctataccagcaaaggtcctcaaagcacaagctgcatcagcttatgaaggtgtaacctataacatcgctatgttcacactaggagatgcatgcaacatggcatcatataactctcgcactcttaccgatcatgaaaataagtaagtttctgtaaattgaatgagttttgttgtgccttatttgcttattctcttatgagcatgatagactgatttatttgaataaacccgttgcttaattctctcgttctaagcctggcactattcggcagctcatctgaacaaacaaatgccaagaaaatggaagacagattgtcaaaggttgtggaagtatttactggaagaatcaagaagatggaaaatgactttgtgaggtacacacgtttgactcccacctgacgaatgcagacattaatgctattcctttatttatgcacaaaagttttcattatgcaacatctgtcgctaaaagagttccatcatactccatccatcaaaaagtcttaagacctattccattttttggtttttccaaaggtctaagtcttatttgtagtcccatgtgctaaattaaatttttgattggaacccaagaagtcattttagtacttattggttgcatgttcattggtccacacagtgaatgaattaattcattaccatctattaactacacaacaagatgtgatctgtgttgcacttcttaaaatccctgacaccagcttccatcccatattttacttgtcaggacagtttgtttacttacacccctgggatgctgtctaaactagattgatgttaattcttatcatctccatttttcattattgcagcttgaacaagaggtcttctatgctagatgtgcaacttgaatgccaagatttggaaagaatttctattgtaaatcgtctgggaagattccatggccggaaccatgcggcgggagtcgaggcctcatcggcttcagaaatgattcctcgcagaatttttcccgaaagacatgtcatgtcttttgcagtgcctggaaatcttcctgaaggggtgtactgtttgtcactctagtgcattgattcctcccatcgttttttacaaactactcaccctgtgatttccagtgctccttgttctcatgcaaagcatggcctttcatacagagcaaccaaatccaggggtagtcgaaaaaaaatcgaaaccatcacataataccatggtgatggagaagccaaggggtgcgtccagccgatcaactcagtgctggctgccgttgttcctcccttgtatcaagtataggtcctgtatattgtggaaagcaagttgaaactacggatctcgcatcatttttctgatgaaggaagagtattagcttcatactttgttagagagcccagtgctttgctagcttagtacatctggcgaactatgtagctatttgtcatctttttatccatgatgatgaagtgttggctggttagagggggggaataataacgggaaccttcctctgggttcttttgttcgtttaggatgggatgcaaattggctagtgtgtccagtctaactgaccagtgttagtcagcagttaattactagagttatgtagttccgaaagcattcatggaacaagtggcgggtaagggagcttggaaacttgttgtaatttgaatccccgtgatgtcgaaatctcaatgggttcttgtaaatttaaaatgaaaatataactgaggtaagaatgctcttgtgcttcatgtaaccttttgtttgaaccagatgctcgttttattgttagttgtattcttaagcggatgctgaagttggcattgatatatgctttcaacactggatagtcccatcatttgtctgtttttgttgcttcctgcgtgagtcggttcgtgagaaaggtaataattttggtaaagtctaaatttcacgcgtttttggtgcgcgggttaataattagagaaactctaagcataatgaaatttcaagaagaagattaatatttactccttttcctcaaggttaatactcacaaaattttagaccaaaggctaatcctcgtgttttaggcatagtgctaaaatcacagttttttaaaaaatggtaatattcataaatttctatgtccaatgctaataatactcatgatttttttggacgaagaccagtgctccttcgtttttatgcttgatgttaatacttgtgaaattttatgtgaaggataataatattcatatgttttggaccctaaacctatactttctgaatttttgggtcaaatgcagtggcggagccaggaatttaaacctgtggggtcaattactagtgattagtgatttatatttaagtggggtcatttctctaaattcttttggatttatacataaaaatcaaagtttatagtatgtttttcaaaaagctgtggagttagccgaccccacagaaatagtctaaatccgccactgataaaaaatgctaatactaacttgttttgaggcataaggctaaaatttactcatttttgttcccaaggttaatagtaatgctaatattaatgcacttttgggtgtaagattaatacttacaaaattatggcataaacactatcactaatttttttggccaaggtaaaactcataaaattttggctgaaggctactattggacagctttcaaccaaattctaaaatgcatgcatttttgtgcccaaggttcataatcatgaaaattttaatcgcatgcaaatattcattctcttttactattcatgctaattttaaaatattaaatgttcatgattttttggccaaatgctaagattcaagggtttttggtcccaatgttaatactaatgaaacttttgggccaaaagataacattcatactcttttagcctaaaaaacaatactagtgaaagtttgggccaaagtctaatactcatgtgtgttttttttttttttgcctgaacgctaaaattcatgcatttttattcccaagacaaataagcatgaaattgccagataaatagccagtgctccttcatttttattcatgtgttttgggccactgaaccatgtacttttgagagagattaatactttctcttcaaaaaaaaaaagattaatacttgtgttttcagatcgggtcgaagaaccatactcatgcgtaatctggcaaaatctaatatttgtgtttttttacccaaggtttggactttttaagttttaggcccatggttagcatgcgtactaacatgaatattacacatgaaagtatgttagtttcatgatgttctcaataatactcatgggtgaatcattactcatgtgtattaacggaacttcatgtgtaatattactcatgtgtatttaactcatgaaattttggactgaaagctaatcattcatttttaggtcaaaggtttgtactcacgaaattttatgccaataactattactcatgtgcttttgggacaaagtctaaaattcagcatttctggacccatgttgatcacgaaattttaggcagaaggataatattatattgttcatactcaagaaattttaagccaaaggcaatgttcatgcaattttggacccaaaatctatagttataaagtttgttcccaaggctaatattcatgtcttttttggctaaaattcatgaatttttgttcccaaggaaaattgtcatgaaattttaaaggggtatattcatttgttttggggttgaaggctaatgttcatgtgtgattggtcccaataaggttctcatgaaactttggagcaaaactaaaactgatttattttttaaaaccaaaggcttaatattcatgcgtttttttggcccaaagttaataatcacaaaattctggacaaaaggataatatttatgcatttgccaaaggtgatgctcatgaaattatgggccaaaagcaaatattcacacatttttgcttaaggctaatacttattaatttttgggccacaataattgtttatttttggatccaaggttactaatcaaattttctgttaaagaataaacatcacgtgcccatggttaaaatgttaaatattcactccttttcgggccaaggctttcatgcattttggacctaaggtgaataattttggagcgaagggataattagcatgtttttcccgacccaaggccgaacgcaatttccaaggtaaataagtaaataactatatacacgattctcagcagatggatgatattcacgtgtttggggggacagtttattatcatgaaaatttatgcaaatagctattcatgtgtttttttgtggttaatactcattgaattttatgtcgaaggctactcatgttattgagacgagggctaaaactaccttttttgcccaagcaaaacgttttgagcacaaagttaaaactaccgccttctctaaaatagaacttggacagtgattcaaagctaaaaggacactatattatggacgaagggagtgctcacgaatattgggacagtctaatactaatgtgtttctgtgccaaaggtcataaaatttcctgcaaaagtgtaatattcgtatgcttttgggcctagagtgaatgcctatgaaattttaattctaaactcaaggccaatactctttaaaactttggaccaaaaattcttttgggtcagaggttatgttcatacatttttcccaatattaatactcattaaattttggaccaaagccttaatactcatgcttttataggcccaatgttaatactcctggaattttagctcaacgactaatagacactcgtttttgagcctaatgtttaattctcatgaaactttggaccaaattactaatacacgaatatttccaggccaaagccaaaattcatgcattgttgaagcaaatgaagcattcgtgaaattctaggctgaggttaatacccatggttaatactaacaaaatttaaggccagaggctaataaacattgactgttatggctggtaatagacaatgagatgaaggagaaatgagatgaatgagccaccgccaccgttcatttcataatattcgcggcccgtcatactgtatgtaagctcccaagggctcttaagataagatatgctgaacaactaaaccacggcaagatcggcactgatgagtgttgggccctacagtagatgagcattgcattggtaagccaacaagagcatcacacaccctttgcaagatgcccaagtgagtactcctgatcaaacccaaggtaggaatccgacaccaaaattagcttcgtctcctgaaaaagaatcgccccatcagtacatataaaaaaggttaataaggatcagtggaccagctaagcacacagtttgagctagatctccaacaacgtatctaactctcccagttatttttgaaaagacaaaaataacagaatcatccagaacagtggcacggaaagcttagtttagtggtactggtagttctttttcccagttttttattgctttactttgtacacattcctctatgttgcttgctaaaaattcaagaaggctcagaaaattgacacaataggttgaattcgaataatgaatagagtagtttcgacctgtaactggcaaggagtaaaattccaaccattctcaatctgtccagctaagttcaaggtacatacaacttgtctattcctcaggttcaacaatatacatcatcctgaaatactgctagactaacattttctagctgatacacaatgaaatatcacaaatgacaagacaaaaggtaatctattaacgatttggtgtcagctttgagatgctgaaggctcgttatactaagttgctaatcagtttgtcattgctattgcctagaactaaaaatcaaaagaatcaacaagccaaaatatggaacatatggaagtcacgggcacagacatcttgaatcactcaaaacagtaataaaaatctttaccttgagcttagcttagcctagaaaatttgcacatggtgtagtgttttaatacctgtatatcaaacattgctggcaattccatccgagtgttaaccacccgatccataaaattaattcttttcagaccatagagctctgaacttctaatgttcccaaggaccagccaccaagcttcttgttttgcctacagaatacagtatcaaaatgttgaatacagatcagcacacagtcccagcacataattctatactttgtattatgaatcattcacttagatttccataacatatatcaattttgcagattataagttgatttgtttctttcgtactgttatgctgagccagtattaatttacaattctcaaaggtagttattcttcaggcatactcttgcatggatattcaaaatagttaccccttctttagttgttgtcctagaatgcatgaagtaaaaaaatcatacacacaaaagtatttagatcagacaaattatagtacaatcttcaccaaatcttgtactcctatttgttttatataaaaaccatcatataataagaataggaaacaatcaagcatattcatcgaagaggtcatcaatgtcaaaaagtgacaaacataaagaaaatagtaatataagtaatattaaaaccagtagcctggtacttcactgtgattagtgaactctgtacatttcatgtaatcagtatagttactgaccttgggaaatctaggggaaaacgctcttgatgttgaacggcgcgcatctttcatttgcaatctaatgcttaaaattggaggcctggactggtccttatcttcattctgaagcttaagttttacatccacacaagggaaatgctgcagatcctgcataatgcaaaatccagcattcattcatgagttaatgatgtgatgacatctccatcgagaattatgtggataaaaaccaatgagataattgcaaggaaactatttttgagggaaacaagtcaaacaactgcacagaaactacaaaattacccagctatacaaaatgtaaaggagtgacacggagttttgacttgctacacaatagagaaaaccttaggatcctgagacattttgttatatcgtacaaaatattcaataactacaacagtaaatactgtagagctagaaaatttaaagttctgctgagcacggttcaaatactgctggttatcagcagaaccggatttcccactgaggtccagaatttgcatcgctcctgtgagtgttatctactgctatttaatgttcattagactgagggtacatacatatttatgtgttctttgaagctgataattctacaaacttctaaagtaaactgagataaaaacgagtatggtccatgatttacttggtaaagttgaaaaaaatgtccaacccagggttttaaccctggtacaaagcatagtgataggtgggtgaacctaacacatgatatcttaagcaggattgaatagcagattccctagcattcttctcatttttagaatacagtacatgaaacaataataacactaaaaatgttgggtggtgctgatttcacaacagtcaccacattctgataagagaaaaaaagaatctgctctgtttgcatttcctcttggctgcaaaaagggctgggcaaagaatgaaatacagcgatgtgattgcaaataatctgttttcagctaccattgtaaaataccaaaaaataaaatcgttcttccaaataaggttagtatgtccaaactctcaagcagtacctggtacaactcagaagcagaaaatggttgaagcaacctatgtaattcttcacgagagagacctagtaaggctggaattgttgaaactcctctgcccttcagatgatctagaagattatcattcatggatggtagcatccaaagagatgaatctctctcaaaccagagaccctggcaaagttaatgaagtctagttcaaaacaatatatctatttgggattttgatacaggactaacaacaaattcagatagggggggggggggggggagagagagaaatctgagacaatgaaattgacctgtatgatcatttgggngggtncaagaggtgtctacctggcg

SEQ ID NO: 17143 - DNA, 5282 bp, Oryza sativa
atgaagctcatcaaattctgcagaagctgacagtatgtgcacaaatgcctagaaagcaatttaggctgttagttatataggcattccaaatcaactagcactacaagcaggttgaactaataatgttgcaaacaaatggggcagcacttttacttacctctaatgatgtgttggggcctatatttgtcccgaacattgagactgtaaggtaactaaggtaatactgtgacgctatctttcccaaaatcaagtactttacagagtgatcatccacttttatgcatccactgtcctcaagatcttcaaatgttgtttccactagcctgtttagataaatgtgagaagtaattggtctcatgtgatgttatagctagtggcagatgagatctaagacaacagaagtcatcatcatcaccttgagaggtagcaattcaaggtgtacgtttcagtatcttccaatccatagtaagctgggttaacaacctgccatgcagaaaccaaatgttggtaacgaaccaaaaggaaatacaatagattcatatgaacatataagaagttacactgaattaaagtctttagtcatttttagctgaaaacttcaaatagccacagatttaaccagtgtaataagaatgtcgacagttcactgcatcaattgtcaactactagccatatgatttatagtaatgattctgttttcaactttacaagagtaggaacggtttccacccaaataattgagttgagatagaacacaaagcatgctgaaaccagattgactaaatacttttgtttcttcaatgtaagttacaaggacataaagagtaaagaaatggattgcacgagataaataccagtcttcggtacaggtatgtccaagtaagataaatgatcgcctcctctttattactgatagtgccggaaacaatctccgcatttatgtgatcatgcaagtgctcccttagattactttcaacagggaatggttcatacaggaactgagaatattacaatattcattgttaaacttcagataaatatgcattagaatgtttgttaggcagacaaagtgaaaaagtaatatgaaaccttcttataaaagcttttttttggttcatgaacaagaataacagctttgccatgttggtcatattgtggtcgacctgcccgacccatcatttgcagaatatccgtgatatcataatcgatgtatctttttgttttgccatcgtagtattcggttccctataacaaacgattaaatgagttctcaggaaaatgacaattgaagacaaacaaaatatatagcattgtgttaccttaattatgaccaggtgagctggaagattaacaccccaagccagtgtgctagtacataccagtacctggaaaaacatcaagcaacaagaaatgatgtttaaattagcccaggtatgtaattagcttgggttgcaagagaaatcgcaataatcttacttaaatgtaaagaatagcatgtttacaggaaaaaaaaaacactacttgacgccaaacaaacctgaatcttgttgtttgaaaagagttcctcgaccaaggatctatctctatcatttagacctgcatgatgcagacctattccaaattgcagagtatgtctcaaattggtgtcagagacttgtgaaagaatcatgtcgagagagttatctgccatgcttaggaactgccttggtttttcatctgatgcagcaagctgtaataagagtacagtaaatgtataagatagcagttatctatatatccattaaataaaagaatccaaaacagcatccacctggatgagatcaagagcagtaagtctagtctgccgacgagatgatacaaaaatcagaactggtttgtctggtgaatgagtacatattgctgcatatgctggtttattcatgctattcattcttggacagtagaacttcccaggatatccctgttggtataaaacaaaggcactatgaattgatgatagagatgtttacacagagtaggaaactgaaagtaacaaaaggtggcccatcaagcaaatactcttaaaaatagatttctcaaatgcttgctaatgcatttcttaaagaataaaatgaacggaagcaccaaacttgcaaagtggatggtggaataagtcacacatcttgcattttgatcaaacaagtcacccaaaatttgatttgttgatgcaaactttgtcactgatcatgaaatgtgggctaatatagctgagttggatggctacacaggctgaggggcactaatttcgcaaagtaagcacactcataccatacccatcaatgagataataacatgcattctgcattttactttcctgcagtcaaagtatgttggttcatgtacatgtttatctcgcatccgttaagcaactagaagaggtgcaaagcattacttacgacttacaagcatttcacaccaccctcattaggtttgctcactaaaaatcaaatgtagtgacctgcttgagcaaaatgcaacatggacctagttgtaccctctttttagtcttttctcttttcttaagaaccattcaagaatacatcaaaacaaatactaatccattgtaagagaaatgtgcatgtgtgtgtgtgtacatatattgaaaacaacagcttgatgcattttccaggtaaagttagcaatacaatggggcaaatggctgtgctaaaaaaaagtctgtgttagctctttttgagccagaataggagcttcagttaatgtgaaaatcctacttacctggatatgcacttcaagaggtacaggcctcacgctgggcttgaaattgaatagaccatcatctctcacgcccaaccaatcagctaaatcactgaagtaccatgacaaatggaaagatgtcagccaaaggaaaatagtgcacaagtgcacagtcaatacaacctttttggagttctgcacgggtattaaggaagtaggtgaaattaaatgaggagagggctgtgattggttgagatgaggatggtggggaaatttaattagagatcggttgtgattgcatgagatgagggagtaggtggagaagttgctatattttgaggcaaattttgaacgctagaaattatatttttggatggaggcactaataaaattttcaagagcttaaaattcacaccaatctaacacaaaaatcaaaatcaaaatcaaaatcaatgtaacattgatcatgatcaggactccaacaaccagggttaacaataccatcaaccacaagtaaggcagtaaccactcataacagttgatgtgactagacttctgcaatccatggagcaaaaatacatgtatagaaggttgtggacagcatacagatctatatagaactagtcatgtagaaggtattcctatgtgataggggataagaggattgcatgccaaagtttcccttagtaacataccgagcattggctaatgctgttgataaaccaacaaaccgaattgaacgttctgtttgtgatgatatgtatcgcattcttgatacaatgacctgaaaaaaaatcatcatggtaaacaattggcaaaaagataactttgaaaaacaagcacagcatgaatagatgggattaagatgaatgcagaagacaataaattatgttgccctgagatagagttaaagtaaatgaagttacttatggaccataacatgtgttgcatgtctttgacttccagaaatgatacctcgagaatagggccacggtcagctccaaaaaggtgtatctcatctaatatcatgagcccaacctattaacaggcttaacaagatatacttaatagaagtgttatttatcacaaagtaaagcaaaattacaaatcagcaaatagttaaagctaatgtagaaagtgaaaaactcataccttcataacataacttctactatgccaactacgactaatcccatcccccttttcaggggtagaaattatgatgtccgctgataatagggccatcatatctggagtgaagtcgccagtcatctcaacctgccaaagcacattacttgagataagttatatatatattggtgtattggaaaattagaagaacagattgccctttaccatcttcttcccaagctgagtaacaagacgttgtctccaatcattcattctttcccgtactatagcctttaatggagcaatgtaaactacctgaaagggtgttgaaaatcaattccagaaacaatcttagctcattgtaagtatttaatgaactaaccttcatgtctggttgtgtgttgaaaagatgaagcattgctagttctgcagaaatcgtcttgccactcccagttggagctcccaagagtacgttattgtcgctgtgatagaggacgtgaaaagcctgaaaaaaagataacatcagattataaaaagcaaacatataaaaaagaaaattcaagtggagtctgcatgcattaacagatatatgcattggccattatatagtaaaagaaattcacagcatgagcttctggttgttttttcttgattctttttttaatcaaagttttttcttgattcttgattttatgagcctttcataatgaagtcttccacttccagccaaatagaaaggttatgcagtgtaattacagtcatttttataacatgcagatgtaacatggacaactaaaacgcaagataatttgattttcaatcgaacctgtgtttgtatcgggttgaaatgggaaaatctgtatagatcttgatacgtcttgttgccaagagcactcaatggaagaggcttcaggtccaaaagttcagtgtgtgttatttgtgtctgtaaagaacacctgaaaacttcagtatatgataagtcaaaagaaaacattatagaactacagcaagacatcgtcgaattcacctgtggcaaggtaaggttatgaaaagaaacagtaaacagtgactctgctcctaaccaggaatctgatatggcccgtatgtagtactgtggtggatgaggttcaaagatcggtacattaaaagaaatctttgtaggtgctcctcttgccttcttcattagtgtgaacaactctgaatgataaatagtatcattttcagaatcctggaaaataaaactgaatgttaccaacgcattttcctaaatcacttggtggtaaatacattaatgcatgacataaatatagatagagttctacaggatcaaattaaaaacatataaaagggaatatacatgcttcgtatatcctctaccacttaaaaacaagagttgg

SEQ ID NO: 17144 - DNA, 1520 bp, Oryza sativa
  unsure (1)..(1520): unsure at all n locations
gcgtgcattganatgcagctcggacccacatgatagaaacgatcgttagtaaaatacagataatacgtcacatttccacaagtgctaatgcataaaaagttagtatacagcactgcattcaattcacactgcaaaatacatactttccagaataagcttatgcaacatcatttgcatcgaatatgtaaacaagggaagaaaaggatacctcttcccaagctattccatacaccagaggattagtcttcatccttataaataagtatgtgtagccaagccaggcacaggcctccctgacatttgtaacagtgcccaaggcaacctcagcattcaaattatctttcaaagatccaaggaactgcacgatgaacatggccacaattagtcaaattcaaatcaaaccgaatgaacatgcaacatcaaccaactgaccaccagccaagaccaagaagcaaagggaggaaagaaaactacaagatgtatttccaaatgtatctatgggccttactagtgtatgcattatcctacccatctaaagcgctatgtatttgtgccgaagacattacaatgaatctggtttttgaatatctgattggtttggatattagaaattcacagtagtcttaaagcccgtttgtcaatgacagtagtgcaggtacccacatgtacatgtggaaaaggcattccacataactatgcaattttttcaaggcttcataaataatcttaagaagatactgacatggtaaacaaaaataggtttatgtgaaaattagtcaaccacctaggggttaatatagacaaatgggaagtgtgactgatttatgtttggccatggcatattcattttctcaacaattcaatgttagggccatatcccctgaatcttttcttcgccccataactgaactaagataaaggctgactgatattttccgcatccttatttcaatactctccgaatcaaaaagtaatttgctaacctggctttctatcggaagctgacttgttaataatcttaagtagtaagccaatttgtcgtgtgtcgtgataataattccttcgccacttttgtcaaactgcggtcgtccagcacgcccgaagatctaataaaaaataaaattaacattagaaacatagactttagctagctagaaatgaatatagcacgtcagaatcaaggcaagttcaaagcggtacctgcatcacatcaagcatccccaaatctcgccatccaccagctttaggatcatatagttgtgttccctgtttgtgggaagtcaccgtatttattagtgtttcgtttactaaactggaggaaatgaattctaacacttgacatattaacagtatattacaatttaccaatacagtcacaaaagtaatcataatagatgccaggaaactgggtgttgccgtcacacgtctgttttggacccaaaaagcagatactgacctttataacgactgtatgagccggtaagttcactccccaagccaaatgtgcagtacaaacaagg

SEQ ID NO: 17145 - DNA, 883 bp, Oryza sativa
  unsure (1)..(883): unsure at all n locations
ccgttcccacaagtattcataataaatgccaggaaactgggtgtgccctcacacgtcttttttgaccccaaaaacagatacttggctttataccgactgtataagccggtagtttccctccccaagccaatgttccagtacaaccaaggccttaaaccagaatattgttccaacccttgtcaaaactgttggttggctgaaaagaatagtacttactttcaggagcccatcagcaaacaagcgctccttcaactttctatctgatcgaatcattccagcattatgaatcccaaaaccagattcaaaaaaattctgcaacttcacgacttttggttttgctaccatctttctgcagccaaaagactagttgaatcataactagtagattcaaattaacgctacagataaaggtaacaacataccttgattaatgcatattggggatggtcagcacatgaaaataactccaattctcctgcatttgcagctaggtcgatctgcatagcatgtgaaaagaattagaaaccagaatactcaaatgaataaattatataaacacagcatatttggtactacaaaaacatgagtccagaatcacttgctacaaacaatcttcaataaggaagaacttaagagcatgcattctaacacttgataaatagtaatatccatttggattcatggcttgtaatgtaacatgtaaattattcttttaattatnnttnnnatagggtgcatagcagaatgtncaatcaatcactgnggggggnggnaagnaaagatnnanatacaaataaaagatgncnnnttcgaaggaagatgggaagacgtgtgangagtaaananaacattagtattagaataatccataaacacagtctcg

SEQ ID NO: 17146 - DNA, 859 bp, Oryza sativa
  unsure (1)..(859): unsure at all n locations
ttttgccatcattaagcataaggaccctttccacatcaaaaggaaaaggagaaggggctcctttaaaaagactgacctggcgaagagtccgagcaactagcgcctcaatgactgaacctctatcatcatttagcaagtgcacctcatcaatgattataagcttcaccaacattgacagtgacatgtcactgcttttccgtgtaataacatcccacttctcaggagtagtcactatcatctatggaaagcaccaaatattacagctcagacctgcaactgaaaataatgaaacaaagttgcatacctgtgtttcttcaatctcatttttggtcagctgcatgtctcctgtaagttctctaacaaccaggttcaacggagataatcggcgactgaatgtggatgttacctctgcagccaaagcctaaatggcacaattttgcaaaaatgccacaacaatcagaacattgaacaataacatagatcaggtgacctggtaaaaaaaacatagaataggaaagaagaaataccttcataggggcaacatagactattttgaattcgtttttatgcaaaatgccatctctgaagtgttgtttgacctgcaaaagaagtgcccaacccaatatttaaggttcccaactagatgtttaacgagcagataaaacagggggataatggtagaaatcagcagcttgtagaattgggtagcttttcaaggttccgccaatgaatacctcatgaagaacagcaatcattgcaatatttgttttgccagcacctgttggagcacaaacctgaaaatcgatggggatcctctagagtcgacctgcggcnatgcacaattgcgcactcaatcacc

SEQ ID NO: 17147 - DNA, 1187 bp, Oryza sativa
  unsure (1)..(1187): unsure at all n locations
gcgccctttgattacctgactgncaccctaacnnnnnnanaggataaatttataatattgtgaaagtgcttctcacgagaaatctcgcataacatttccatgttctcaagctaaggattttaattaaaattgcatttatagtcgaagtttctgaagtttgaccagatcttttcgaaaacgccatatattaataatcacagagagttagttcattttcaaactggtagttacttctgcaaacactatcatccattggacataaaacaatatgtaggcaaatttaatattttgattaatgttccctgtcctttcatctaccaatttacaagattaatgtgtatatctcgatggaaagaaattgctattcaaccagtttgtaaatgcattatgatcttagtcgggcctgaatttagttgttatcatggtgcaatcttttgttgtattcaatgctctttgctgattcaggataacttgaaccgaaccctgtgtggaaaagtcccgtactcagttgatcagcaacaccttgatgacccacatgttaaagcaaacttactctttcaggtaagtagatttgagcttatgattggaaatttggagtatcatcttatttttgtactggcatttttatgataacatctgaatgcacaatgaatggttattaccccctttttttcccgagtgaaagcgtgctggcacaacattttccacacagaattcccaactagtgcctatgtcactgattcgaaatcggctcttgatcaaagcatacgtattatacaggctatgattgacatatgtgccaatagtggatggctttcaagcgcattgacttgtatgcatcttctacaaatgatcatacaggtcaatttcattgtctcagatttctctctctcccccccactccccccctgtcttaatttgttgttagtgctgcgagcagaatcaaattacttataggcggtagaactgtactccataaactatgggaatacctcatgaaagacagagagacaaaatgtctcgatacatggcatccatcaatgaaaaaggctctataccatccgaagggcataggattttcaacaattccagacttactaggaattctctcgtgaagaattacataggttgcttcaaccagttttttgtttttgagttgtaccaagtactgattgagagtttggaca

SEQ ID NO: 17148 - DNA, 718 bp, Oryza sativa
atctatatatccattaaataaaagaatccaaaacagcatccacctggatgagatcaagagcagtaagtctagtctgccgacgagatgatacaaaaatcagaactggtttgtctggtgaatgagtacatattgctgcatatgctggtttattcatgctattcattcttggacagtagaacttcccaggatatccctgttggtataaaacaaaggcactatgaattgatgatagagatgtttacacagagtaggaaactgaaagtaacaaaaggtggcccatcaagcaaatactcttaaaaatagatttctcaaatgcttgctaatgcatttcttaaagaataaaatgaacggaagcaccaaacttgcaaagtggatggtggaataagtcacacatcttgcattttgatcaaacaagtcaaccaaaatttgatttgttgatgcaaactttgtcactgatcatgaaatgtgggctaatatagctgagttggatggctacacaggctgaggggcactaatttcgccaagtaagcacactcataccatacccatcaatgagataataacatgcattctgcattttactttcctgcagtcaaagtatgttggttcatgtacatgtttatctcgcatccgttaagcaactagaagaggtgcaaagcattacttacgacttacaagcatgtcacaccaccctcagaggtttgctcactaacaatca

SEQ ID NO: 17149 - DNA, 2780 bp, Oryza sativa
ttctattatgattcagtgttttttttcttaaatgaagtgtgatatactgtctaaagtctgaactaccaagtttgaaatttttttacaagacacatgttttataattttgtgtgcattgtacaaaatcttgacctatttttttgcttggtcacaggaaaagatggctggtggctttagggtattgcatcttgtcaggccttttctggctttcctgcctgaagtacagagtgctgataggaaaataccatttagagaaaaagtgatctacactgttatttccctattcattttcctggtatgcagccagctaccactgtatggcatccattcaactactggagctgatcctttctactggatgcgtgttatccttgcatcaaaccgtggtactgttatggagctgggtatcactccaattgtgacatctggcatggtaatgcaacttctagtgggatcaaagatcattgaagttgacaacagtgtgagagaggatcgtgctctgctgtaagtattatgagattaacactatgttctttactattacctgaaccttgaaacttagtgccttatttactatggtctgctgtttgtagcccaccatatttcagcgaatggctattgattaaatgctactacgtatctgattcatgtttaccatgtcttttgattatatttgttacgctaatgtacttttttacccaggaatggcgcacaaaagttacttggtatcctgattgcaattggggaagctgtggcatatgttttgtctggaatgtatggcagtgtaagccagcttggaactggaaatgccatcctcattatacttcagcttttctttgctggcatcattgtcatctgtctggatgaacttctccagaaaggttatggtttgggttctggcatttctctctttattgctaccaatatctggtgagcacattgaactttgttcttctctattgttgacattttctattcaacttgacttatggaaatctttctctgtagtgagaatatcatctggaaggcatttagccccacaactatcaacagtggccgtggtgctgagttcgagggggctgtcattgcattgttccatctgttgattactagaaccgacaaagtccgtgccttgcgcgaggctttctaccgccagaatcttccaaatgtgaccaacttgcttgctactgttttagtcttcctcatagttatctacttccaaggcttccgtgttgtgctaccagtgagatccaagaatgcccgcggtcaacaaggctcatacccaattaagctgttctacacttcaaacatgcccatcattctgcattctgcactgattaccaacctctatttcatatcccaggtctgaacttcaattccactgctttagcaagataaatctttaatgtttgtgtttagcattaacatgtttgtattgctttggcagcttctctacaggaggtacagtggaaatttcctagtcaaccttattgggaaatggaaggaatctgagtactctggccattctgttcctgttggtggtcttgcttactatgtaactgctccatcaaggtgaagaatcaatttcatcaatgaggccttcatctctttgtgctcgcaattttagtttctgttactgtttgataaaatttacttttaattatacttaccttggcatatgcactggaaatgttgcagtttagctgatgttctcgcaaatccattccatgcactgttctatgtggtcttcatgctgtcagcttgtgctctcttctcaaagacatggattgaagtatctggttcatcagcaaaggatgttgctaaacagctcaaggtaaaataaaacaaaactattttctatatctggtctggaatgcagaattatcatgcaagagctacctttaaaccaccaacctttgcaatttaacaggagcaacaaatggtgatgccaggccatcgtgagtcgaatttacagaaagaattgaacagatacatccctacagctgctgcatttggtggagtctgcattggtgcattgactgtcctagctgatttcatgggtgcaattggttcaggaactgggatactgctcgctgttacaatcatctaccagtattttgagacattcgagaaagaaagggctaccgagctaggtttctttgggttttgatcaccttagctgtataactcctagctggaacttcttgcgagtcgcagtgctgcttggccggctgtcatgtaatgggagacctcagaatcagcttaggttgccgacttacttacaatgagaatcttgtagcagtatgcgttttgttcatgccagcgtatggagttatttgtcctgctcctgcccccagtacagcaatggccatcgtagtaactggatgtgttgcgatcaatttttattatcttttaaactggataggatatttgattcctgatctcttttttgctgaaaccttcgtgactaatgtttctgatcactggaaactaatctggtgttatgtctccctgctgcttcttttattgcaagtgtttggccacatggataaaatgttaactttcaaaagacattctcattttttagcatgggttatcggtaaacttttgagactggtgactattccccttactaaaaaaaatcatattaatattataatttattccttacattcccaaatatttccccagatgtaagaacctaccaccctgatgaacttatcaggaattgcctggagtcttgaccaaattaaaatttatattgcttgggacaagttcca

SEQ ID NO: 17150 - DNA, 9474 bp, Oryza sativa
  unsure (1)..(9474): unsure at all n locations
ctgcgttgatgacctcctcttgctgcctgcacgncgactctagaggatccctgagccttttactaagattcctcagacagctacagcatgaagataaaggacttaatcagctagtttccacatcaaatcagctagcaagaaatatcattgcacttttaattaactagggagtaaaagagtgtttcggatgttggagcaaccaagcaagacaaaagttttgaccttggagaccataagtgacaaatgtttttccccactctgaaacaatcaatctacgagcagatttgtattctttcacatagaaaaggcaatacataacaatctaaaaatccttacagatccttatgtatgtcagcagaaaattttaagatcaagaaattgaagacgtgtttcttacagctcggtgacaactctgtaatctccttgctgagaacaggtcacaccagaccaggggggcagatcaccatgcccgcaagggtcatcaccaacccatgagtagacaactctccatcctaacgaagatttgatctcattcaatgctttcactgcagcataaaaaattgttttctttcagtcggttccaacattctacgaaccatgaaattactcaatggccgccaaacattgttaagtcagactaatatccatgtctctatgaagagataaacctctccacctgatgcagtgtcagtcagtgtggagcctaattagtatacagctaggaaatggcaaaactagatagtcacatgtatacaatcacagagtaatttagacatctaagacacaagccaacaacagatcccaatgctacacaccccaaatgaggcagctaaccgatcgagcaggtgcccaattcacagccatgagcataaaagaatgcaaggcaccagatggtcagatctccagcagggaacggccaaagaaaccaaatctttcccaaattccatgtcgcggaatcgcgcatcacgagaccagtatcactcgctcaattcacgggggggaaagaaaaaaaaaagaagtgcagagaaggatgagcggagcagccagctacgtaccgtccctcttgaccgtcttgccgcttgcgacgccggccaggacgaggaggaggaggaggagaaagagcgggcggacgggcaagaaccggggggcggcggcggcggcggccatggacgtgtggggaagctgcggctccgcgctaggatggacagtagcggggcgcgccgcgggagaccatatgagagagagagagagagaagaggagagggggaaggtggcgccgcggcgggggcggggttggggatggaagtgcgggagaggggagtggagtggagtggagtgggcggatgggcactcgcactccccccgcacagccgcacgcacactgactcgctgcctgccgcgtcggtgggttggccggttgggcgccgcgcaccgggactgcgacgactggaacgtggagtgtcgccgaaccggagcggaatacagtattttactccatccatcgaaaaaaaataaaccatgacttttcatgtaacgtttgactgtctgtattatatgaatttttttataattaatatttttattgttgttagaagataaagcatgattaattctttatgcgtgacttgtctttttaattttttcataatttttttcaaataagactgatggtcaaacgttgggcacggaaactcagggtttgtctttttttttagacggagggagtaggtatgtggtagagctctaacccctaaatttagctttataatgtgggtttagagtggagttgtggagcagtcgaaacctagctccacttctcagttcattttgtgagagtgctccacccagctccgctcccattttagctagagtttaaattgtttggctgggctccagagctgaaacggtgccaaacaaggctgaactatagaggtggagctggatttaagctgttccacaactctgctttagatctaactcctaaagctaaatttatgtgttggaattctactaaacagtctcatatacatttaacatgttaatctaatcatacaccaatttacttgtgtgcttcatttatacttttaaataaaaatttagagtggaaactattatcattttttttcaaatacaataaatctcaccacaatatgtggatattgtaaatcttgaggtaaatactatgtgctgtaagttacactagaaaataaaattgtgtttcctaaaaaaataaaatgaaaataaaattatctaaaaggaaaacgataacaaaagtattattaataagctctgttaaatacttcatctgtttcacattatacgacgttttagattgtcgatagattcatacacgaatccatgtacatattcatatgtatacagtatgggacgggctaactagctaacgtgccaaagaccgcaccaatttcttttttattagggccaattccctatatgcccatataatttcacccaatcccttctacgcccctgaaatttgtttgatatcttatatacccctgagtttttatttggatcccttacatacccattccgttagttgaccattagtttgaccgttagttattgtagaaattactttattgtccttgttatattgttaaaagctagaaatgttttatgtgtaaattttttgagttgtgaaaaccaataaggaataaattactaaatatttgttatgaatttttgaaaataaaacattatttcattaaaataaaaaaagatttattgtaaaaaaaagttctgcataagatttgaaaattacttttcaacaaatatttagtgaaaaaagattcgttgtgaaaaaacaaaggggatataattagtttatcacaaattagaaaacaaatttaaaatttttaaataaatttcagatcaaatttgatgaatttcgtatatcttcccaaaaatttaaacctaaataacatttagtttttgctcttaattttctggtgaaactaatgtatggatttaatcataatttttaaaaaataaaaaataataagttttattttttaagttgggcattaaatgattatattgcttgtattttgtataagtttatttttcatatgaaaatttattgggtaggtaccacacatatgtataggatgggtaatatagtcattttaaaatatttaacggtcaactaatggtcaactaacggagatgggtatagaggagatcaaaatgaaaactcaggggtatataagggataatgtcaaattcaggggtattgaagggattgagtaaattttcaggggtatatagggaattttctctttttattagcacatggacgggcaactagcgactagcgagcacgtcaaatttgcacaggcaactcttggaagacggttgatctcgcaaggtaacaacgactaatgtgtacagcgtactacagataatcatgagtttgtattgaacattttgacattattgtaaagtatggtttgtcaacggtttgtttaacttttgacctagttaacgtgaaaacggttatctgtcgcgattgtcaggatttacgtgggccgcattgggggcgggctaacgagcaggccagcttcgctatctccggccggccgggccacccgaagccgactcgaggggcataggcccaccacaattcgcacctagcttttttttttttcgttgcagcaaaaggttttctgaatctactgaatttatctagtcacatatttcctcccttttttaatatgtaatgttgttgttgttttagatacgtataatcatttgtcatattaaaaagtttatgtaattattattcattttattgcgacttgatttatgctaaaatgttttttaagtgtggcatatttttttatatttacataaaaaatttaactaagacaaatggtcaaacatttgtcagaaagttaatggtatcaagtatttaaaaaactaaggtagtaactgaaatatagagagtgtgatctgtagcaaaagtgatcagtactacaactgtttggaaatgtaatcaaacagcgttgatgaaatactgaagctggctttgatcattgcaaacgctaacagaatgctatagcagaacgcaacccttctcatgttgttggtaagagccaagaaatgcgttaggcatgtcctgctgcttaacaacttaaattaattgattacataaaaacgttaactcatccaggtatagcaaagtattattgaaagggattaccaatgtaaatattaaaattgtaatataattatagtgtaacttacacataactataatataatttgtttaacacattatttccactaaaggagtacacgtgaccaaattgcatcacccgtggttgcgctatgattttttcctttcccgcttgcagagtcttaaagtaaatataccagattaaaaatacataaaaagttacatacatattatattataattacatacaagttataatattttttgaacgactcgcataagacggtgcgaagttctattgatagagcagaagaaaaattataagattacaaccctggaagttgtaactaggaaaaagggaaaaatataccaccacccacacaccgacaacgccaaaacactgaacaaggagaaggctagcaccggaccggccaccactaaccgtggccgacctccgctaggccaacaaagaaaacacggtcgggatcgcccaaaacccaactcttacaatcaacacaaagccccgctctatccaagtattcaggagttaaggagagagggtgagagagaagaatggaactcctctccccttaggccctccgacatggccagcttgtagagactagttaggatgccgccacaagaggatgtaatctagagtgagtttgtactaattggttgggtggttttagctaggggatgcctaaacgatggatcatagcaaaaccgttacttgaatactgaagctacctttgaatctttgatcatggcaaaagcttaacagaaggctagagcaggatacaaccctttcgtgctgttacctgtcggtacgagccaacttagccaagaaatgccataagcatgtcatgttgtttaacgaattcactagcttagtagtagcttaattaactgcctaaaagataaaaaggctaataaaacggttaactcattcggagacaaactcgtactgcaaagcctacgtgaaaatcgcgtttcccgcgctctcgtggcgcaccttctttgtctgtacaagaagtctattatataccccccatcctggccaagaccacaccttgccgtcgccaccaccttcctcgccgccggcagccgagcgggtcggtgccgccatgcaatcgccagagaatgcggcaccgcgcgtgtactttatcccgttcccgacgccggggcacgcgctgccgatgtgcgacctcgcgcgccttttcgcgtcccgcggggccgacgcgacgctcgtcctcacgcgcgccaacgccgccaggctcgggggtgccgtcgcccgcgccgccgccggggatcacggatccgcgttcacgcgctcgccctgcccgccgaggccgcggggctcacgggcggccacgagagcgccgacgacctccccagccgcgagctcgcggggcccttcgccgtcgccgtcgacctcctcgcgccgctcttcgccgacctcctgcggcgcagacccgccgacgccggggtgttcgacggcgtcctcccgtgggctgccaccgcgggggccgagctccgcgtcccgcggtacgcgttcacggggacggggtgcttcgcgctctcggtgcagcgagcactgctgctccacgccccgcaagacggcgtcgcgtcggacgacgagccgttcctcgtgccgggcctccccgacgcggtgcggctcaccaagtcgaggctcgccgaggcgacccttcccggcgcgcactcgcgggagttcttgaaccgaatgttcgacggcgagcgcgccacgacggggtgggtggtcaactccttcgccgacctagagcagaggtacatcgagcactacgagaaggagacggggaagcccgtgttcgccgtcgggccggtctgcctcgtcaacggcgacggcgacgacgtcatggagcgcgggcgcggcggggaaccgtgcgcccccacggacgccgcgcgcgcgctggcgtggctcgacgcgaagcccgcgcggtcggtggtgtacgtctgcttcggcagcctcacccggttcccggacgagcaggtcgcggagctcggcgcggggctcgcgggctccggcgtgaacttcgtgtgggtcgtcgggggcaagaacgcgtcggcggcgccgctgctcccggacgtcgtgcacgccgccgtgtcgtccggccgcggccacgtgatcgcggggtgggcgccgcaggtggcggtgctgaggcacgcggcggtgggcgcgttcgtgacgcactgcgggtggggcgcggtgacggaggcggcggcggccggggtgccggtgctggcgtggccggtgttcgcggagcagttctacaacgaggcgctggtggtcgggctcgccggcacgggcgccggcgtcggcgcggagagggggtacgtgtggggaggcgaggagtccggcggggtggtggtgtgcagggagaaggtggcggagagggtgcgcgccgccatggctgacgaggcgatgcggcggcgggcggaggaggtcggcgagcgcgcgcgccgcgccgtcgaggtgggcgggtcgtcgtacgacgccgtcggcgcgctgctggaggatgtgcggcgccgggagatggcggcggatccacggaacgtgaaggaagtatgaaaccatatgaatcacaaactgaaatgttaaaatgtttcataactaaaaatttggaccgattaccaaacgagtgtatatcgggcttaaattgatgactacttatttcgtttcatatttcaagatgtttgactttttttttctagatcaaactctccaatttataaaaaaaaagcataatagtagtattttcaacataaacaaatatattcaatgtgaggtttaatgaagagagaatatagtgtacaccactgagtttatcccagttcaacaatatgccactgacattatttcattctacaatataccggcgactttaccaattagtctacaatacgccattgggctggagatctttttcaaaaatacctaaaatacccttataatcatataatgttaacaattgatttatctcattagaagtttggaaaaaatatgaaattttttatttggcctccttacacgatatgaaagtttgtaatacaagttttaagatttttttcatttatattttttttgtaatataaattatcagttatatgctatataaaatacttttttgtgttgttatttttaatataaatcatctttgatatgctatataagttatttttatgctattatcttttgtgtaagtaatttctctctttaattctacacaaaaatatattgttttagaaaataaaaatatcaaaaaaaaaacatgaaacttatatacaaacctccatgttgtataaaaaggcaacacaaaaaatttcatatttttttgaaacttctaatgagataaaaacaattgttaacatagtatgtctttaagggtattttgggcattttataaaaaaatgtatagactagtggcatattgtagaacaattggtaaagtcaccagtatattatagaaatagacaatgttgatggcaaatcgttgaattgagacaaactcagtggcatatagtagattttctctttaatgaaactaatttggtattccctctgtcttaaaatataacaacatttaaccatcaggatttcttctaaaatataacaacttctccatcgatattctcttcccaaccaatcataacccttcaccattcaattttcccacataccttcattacccatccaatcacaacgctccaccattcacttctatacattttcttaataaccgcgtacaactataaaacttcttatattctgggacggagggagtatactttagatgatgttattttttttataaaattgattaaacttaataaagtttaattaaggaaaaatcaaacgatttataatataaaatggagggaacaatttcttttcaaatagcgcacacacactctctctctttcttcgtaataaatatttgatgtttggagtaagatttaatcaaacctttttttgactgaatcaccgggaggaggggggcgagtttccccacctgaatatattaagtcaaacgaaattacacagggcaggctcggcctacacaagcgcaggtgccctggaggatagtagcagaggatacacagggaaacacaaagaagagaaaaacaacagagagaaaaggtggccctccgaggaaaccaaagacggttttcctgcaaaatcacccagccacaaaccataaccgcctaaaagctaacttcctagatcaacaacaaacaaatcctcaagcagccttggaatccagaacgccgcgccaaagggcagagtgccacgagcatgccggcaggggaaagtggtgaccaaaaggctatggaagtactagaccacccgcatgaagccttcaagaatccaaacattttcttgttgcagctagaacagtgcccgccaacgccctttgggggaaggaagccccagagggggagaggcactgaaggttgcggcctagagccgcctacatggagtcgtctttgatcaggctaaaacgaattgcttgttggcttcacgccttccaacatccattaagggaaggaagcctcaaaagagggaaggcagcgaagcaatgtgatagaggacatcccaaggaatggatggagatgaacagggagttggacataaagggggatggctgaggacaggaattccacaaggaagaaggacatcaatgggagacaacgggaattggcacaagattagaagcttggagagcaaaagggcgaagcaggagggggcacgcttgcgtcgatgcctttagcaaggaaagtgacatccacggacgccaccatcgacgaaaagagcatcgggcaaatggttgcaggtttggttggggagactaaaatcaacgcctccagggaggtatacggcaccaaaaggcgtcgccgtcgatcgcacaaccgggggtgtgcacggctttcgccctctctccccaagcccaaactgcaggcttgcatatgccaaggtagctggctagcctgccgagcaggtcaccgaagccaggtgcggctgctcctagaccttctcgcccgcaccggcaaggaagtggtaacggagggaaatgagggcaaggagggcgttgaggggccggcgaggacagcggctgcggagggcgaggatagcagctgcggagcacaaacataaatcagaagcacagaggggcagctggggatcctctagagtcgncgtgcaggcagacatgagtatagtataatcaacgcgt

SEQ ID NO: 17151 - DNA, 4364 bp, Oryza sativa
ctgcgccggtgaactccacctggtacccggcgccgcgcgcccctgccttcaccgtcgccctccccgccgccattgccgtcgccctccccaccgccagtcgccatctcgacagcgtccgtgcgcagctaggggagccagcgccggcaacgacccgtcgccagctacgccaggtcgccgccgccccggacccgtcgccaaaccctgccgccgagcactccaggtcgtcgccgcccccgacccaccttccaaccccgccgccgagcagatcccgccatggaggaccggattcggcctccacggcgccggatctggccgccgccgggcgcttctcctcgtcgccggcaccaagcctgagctcctgtcttgccggcgtcccgtacggtttgaccacgagcgagggagagggagccccgccgccgccgtccttgcagccgcctggcttcgccgacggtggctcgggcgacggcgatgctggggagaggaggagaagggcgggggccccgcgtcgcccccgggacagcgccctcgtcaaaccttaaaattttaactattaataatttctcaaaccgtttggttttgaaaatctctatccgtagatttccttttttagaaaagtactatcataagatcgtaaactcgttagaatttatgaacatgtctgatgtaaaattgtgggacaaagttataaaaattattaaaaccaatcttatcctttaaacgtcgaacatttggccgatttctcccgtggtcgtccaactgtccaactgtacagcctgcttttacgcaacagaaaacggccgccaccgtccggtgaggcggtgagtagagacagacagctgggccccaccgagcagtgagaggacgagtagtacagatcccaccaaagtcgacgagacgaccaagctcttcttcctccctgcgaacaaaaaaaaaaatctcctccccgcgtcgaattcgaaggggagagagcgccgcgagcgagcgagtttggcggcgagatgggctgctgcagcagccggagcgcggactcgccggccagccgcgtcacgcgctggcgctccaccgggatcgtcgccctccgcgacgccagattgaaggttcctgttgattgatttttcctgtaaatttagtaccattggggattctgtctagtctgctagttggggcgtggaggaatttcggtgctcccgagttcttatcatctgatgcttagtgattcgggtacacgatgacacgacaaatatgatgatgcatcctaggatttctgttaatcagccgaaggggtctactgccacataggcgttaggttaagcaaaggtgtgatttttggattgcttgcgggtgttttaatcctatgggattgctaggtggaggtctgaaggaaaggcacaatcttgccgttacaagtatgtaatcatatgtggtgattggtgaatggtgatggcctgatgggttaacttggccaattctttttcactgtagtttcagggaatgctgatggttaaaaactttttgcccatggcacttccacactttatacttaccctttattctctctctctaaaacaactgctgtactttctcctctatttgcataatggagctactgcctatcaataattaaattcttaattagcatgggaagtactttttgcgactaaatatttaataaacactcaccagattgtaagattttagtgctttgttccatgtccagaagatagaggtgcattttaatattggcgttagttctcattcatttgtttgtcctcatatcagtatgtgatatgttctactatctcatctaaaatatatatttatcctgcaagtcaatgccaatttatatttaattttcttcgaagaacgaagacacaaggttcttttactgtgaaattgaacttttcttccaaaattgttaaatgtcaatgttaccatgcaggtagtaccaaatgaagttctacaagtagggaattccctgaggattctggatttgactaacaataagataggtatttggactttagaccatgacccctggatacttagaagttctgcaatgctagtatcaatattttctctctttttttttctcatatattgtcaggaagaaactagtttggagtcgttcattgcttctttctttcttttattatgcacatcagtatcagatgggaggaaaaaaattatgcacaccccttttttttcacttggcatcactaacaaatgcatatacttgaagcaagtcagcaacaattcgacaagttattttttttaccttgcagggtttctttgacagtttgggtagaaaaaaaatccaattgaactgcacacactgtatttagatgtttctatatcttgagaaatatcaattaaatatatattttatgttgcagctgagattccccaggaagttggcacactcgtgaatatgcaaagacttgtaagagttaatgttaatagaaatcatgatttggttcatcttaccaagttactagagacatgtatttttaagagtggttcttctttgcttgacatttaagtttactatttcttttctgttcctgtaggttttggctggtaatttggttgaaagcatcccagctaacattggatatctgcggaatcttaaaatcctcacacttgacagaaataagatctctgtcttacctgaagaatgttagttcataaaaacctaatgctatctttatttatatgtttagataatatttatcatttgtccacgtgtatattcttaatcctagcaacaagttagtagagatttattgacttttgcaatattacacttcacaatttcccacgtctaagtcctaacttgtttcttccattctatccagtgggttctctatcaaatcttcaacaactctctatttctcagaattctttatcacgcctgcctaagagtgtaggagatttgcgcaatgtaagtttcttattcgattcaagatgttaaattttatatatctttgaaaagcaacttttctaggcacaaaatatttttttgtcttctcaaaacttttttttggtatagcatgaatgccttcagagttacaagctgttccttctttttattttcctcttcagaatcaaataaactcttgattctatatttcctcatatgaaatttacgcagcttgttacattccgtaaagtttcttctttactagtaagtattttaaacttgttttaataatggagactatgctgtgctcatcactgttttttcaaccttttttttttcctgatgcagatgttgctactcaatgtatctgacaacaaactaattgcacttcctgaatcaattggaggttgcagttccctggaagaattgcaggcaaatggtaagtccatcagttttttgcaatggtagcatttatatcatttcaattttctctgcaccctgttcacatgcatccatgttaatgctatactgctgccacacacacacacacacacacacacacaaacatgagtgctctgtgccgtcgtactttcctatctcgtatgctataccacctgatattccattgggaaaggcatgccagaaccatttttagataccttttgtcatctaactcaaatatgatccaaccattcatatgctgtttaaaaaaaaaatgcaaagcacatcgtggttttcgttttcgatgcatcatcttagataaccttcacgaaaacattttcaggaaattcaattgaagacgtgccttcatcaatctgtaaccttgtttgcctcaaatccctatcattgaacgggaataagattcgtcaggtacgaacttatgaatatgcttttccctcgtcgattacttctgtgtttgaacctggaggctctagggtcaaagtcagtgaataatgactattcatttagatttgaaatatcctggttacattgttgccaacttgtaacgtacaaaataataagcaaagattctccgaactttgactctccctgacagcttccccaaaacctactgaaagactgcaaggctcttcagaacatatcgttgcatgacaatccaatctcgatggaccagtttcaacaagttagtggcatgaaagcttaatacagattcttgtaatttgattaatcttgattcaattataatttgttttctttgtctgttgaagatggatggctttacggaatttgaggcacgccgaaggaaaaaatttgacaaacagattgattcaaatgtcatgatgagttccacagcacttgatgaaggcattgatttgaactagtttttcagaaattttatttagtttataattaccccattagtcaaaagaccaactgtaaatctagtgtacatattagtttttccgatactctgatttggtaa

SEQ ID NO: 17152 - DNA, 5970 bp, Oryza sativa
aagctagctaacaagtaaaatgtgctaatttttgccatctccaccattagatgtaattcaaattccaaataagttaccattttttaaaatgtggttaattatggataattcaccaatccatatgccacaattctactttccatagattattgatttgttgggatcttagatataggctataccggctagtgaatgttttaattctctctttttgtgataaacgtttttgtttgttctgagtgtgacaatatcacaatggacacaactacaccgagagtgctagctggatagtgctaaaaagagacaccattctttccaaaaaaaaactactagtacactcaatatctatgtatttttttcttcttatagaagtttctcttaagttactcatccgatttaaattccgattacactgttattgtaacaattaaaactttacaacaagatctcacatgattatattttgatgaaaaatcacaaattacttttatgatatgtctaaattacttctagatttcactaagttacttcttagacatataaaagtaaattaagtaaagcttaaaagtaatttaaatatattatagaagtaacttataacaaaaagaaagtaactttaatttagaactatatctagattcattaacatctatataaatgtgggcaatactaaaatgacttacattatgaaacggggtgattaactctctatagtagaaataactatattgtgagtgagctgaaataagaaactatatagagtaaattcgcaagtaaagtgtagagaagatttataaagtccacaaaatatagaattaactaaaaacagtaataaaaataatcaacttagagcattatgaatgtatataagtaatttagtcaaatctaaaagtaacttatatatatatatatatattataaaagtaacttagtttataataaaagtaatttacaaatataaatattttttcatcgtaatataatcatgtaagatcttgttgtgaatatttaattgtaacgaacacaatgatgtaattggattgtaaatcggataagtaatttgaaataaaactttataagaaggaagaaaaagacacacatgtctaagaggaaaaacagcacgcacatcagcacgtgtagcagtaattcttctcacaattaattcgtcgttggttaacactaaaccgagattttacctatcacaatatacgtgatgttggtgtagcctcagccatattgactccactttactgtaccgggcattgggcattgttaaatgtcaacgactaaagcaatcaaaaattcaaaaatgtgcattgaatacttgcccaagatggttgacaacgtcctccctcttcatagatcaacatgagaaagaaaaagggcatgtgttgattcaaagcagagctcattggtccccctcagtaatttatttgagtattacatgatatcattagaacacgagaccaaaccatttagccaccgccatctatcaggctaccacatgataggtgatgtgatacaattgttggtttcggtgttttggtacaagcacaaacaacattcccaacaaatattgcgtctatccgtagtgtaacttctaacatggcaatattttccgtcaccttagtgaagatggtagtgcctctcatccatacaacacggcttcctcatgcaatacgatcactaggccttctctcgttgaggtcaagcagccaaagccgtcatgtggcataataaggtaggaaatcaattggagacttcgagcgagatatattggggagactgggagagtgagtttgggtttgtcttaggtaaagagttagttattgtggtttcgatccgatccctgctattttatctttgctccttttatctccgtattttgttttaatgctgctataaaatattttgtatagtacattaatacatgttgtcagattatgactacctcaaattctcatacgaaatgaattaggaaaccgcaagcaagcctaagatgggctggcccgccagagcgccaggcccggaaaagctcggccttgctggactcgtggcgatgggccgttgcaccgagcggagggatctatcgaccctcgcgcacgatctgggcctctcgatccagatcgaacggccgccccgtcaccgcgaccgccgcggcgaatctggcacaagccgccgacgacgcagacacgagcccagcttgggcgaagccaagcaggcaagcatccatcatccatggcgcgccgttcaaaaccctaaaccctgaggcgaacctcgaggaatcgcagcggcgcgtcgtgtcggcacccatggcggcgtccccgtccgctcctcctccccccgccgccgccgctggagtcggagtctggagccctgctccgcaatcgccgtcgcccaacctcgctaacttcttcggtaagtgcttctcgctcgtttcattgcttcatcgcacggtggcatcggctccactagcctcagctaaaatccattgtcgcgatttgggggctaggagagacgggcatgggatggagaggtctcacagtggcattaaaaatgacttcgatctgatcaatgatgtgaaccatctcttgttctgttccttgcagaagaagagtgctgtttatgaactcctagcaagttacctgtgcatatttgtatgttttggcagttagcgtagcattgaactgtcattcagtaaatgcaatatgaatggacacacctctcttcagatttgagcttggacattgattcaccctattctcttagcccactcaattaggccaacaaatagttcagagttctgataacaggttatagatttcaattactctgtgacatatcatggtttaatttcatcaatttctttgcactttcaagtttcaacagcaaactatgtgataacttgtattagggttttacacttttactgcatctgggcaatgcattttccagaagagaaacatgcattagattattgctaagataaaccctgtaatgcagtatggagggaatttgtatggggagcaattgcaggcgcattcggtgaaggcatgatgcatccagtcgatactctgaaaacacggcttcagagtcaggctataatcacaggggctaaggtatgagatagtttactttacatgtgcacggacagtaatgtttcttgctgcaattcgtgatttgatacatggatactgcatccttcttttctttgtgctgagcaggctcagaaaaatatattccagatgatcaggacagtctgggtctctgatggtctgaaaggttagccattctctgttgtttgtttactaaacaaaggaaaaacaacatgaagcaactttgtattagctctgaccaaaaccagttacttcgtatcagcagcaatcttgatgaaattcaatactcacccattttcaggtttttacagaggaatcagtccaggtgttactggatcacttgctacaggggcaacatattttggtgttattgaatcaaccaagacatggctggagcattctaatcctaatctaagtggccattggtctcactttattgctggaggaattggtgggtagctattttcttatgtctcttgaatgtttagtattgtaaatatttatgacgttacctaaacttttttatactaggttttatcaactgtgatcaatatttatttttagaagtatgccctttttttccacgcaatgtaaacatttctggctgatggaattttgccttctcattggaatttcgctgctggaaatttgccttctgattggaatgcatggaactcgagaaaaattcttatgccgcttcattgtgctcattgcaggagatacacttgggtcttttatctatgtgccatgtgaagtcatgaaacagcgaatgcaagtccaaggcaccaagaaatcttgggccttaactgccacaaaaggaaatatttctcaaactccaggggctccgatgtataactactataatggaatgttccatgctggttgttctatctggagagatcatggtctgaagggactttatgcagggtattggcactgtttgcttgttgctagcatgcctatcgttattgatagtgcgtttcatctatttatagtggaggggaagcttttgttttaatgaattattattttctagacactctaaaatcacatccattgaaatatgctagaaaactatttctgctcgaatactgattattgaattatgctcgaatactatttctcaacctttgaatacaattattgatcattaaaaactacattttatatacacatttctggacgcgtaagtgtacagttgttgattgaacaaacctactatcagtacagtttgtatgtaaagagacaaactgatactatcccttgcgtgatgataggctagttatcattcatttcctttttctttaaactgacacaatcttttgtcatacacagatactggtctacacttgccagggatgtaccttttgctggtcttatggtaagtgagaaattcagcttgcacttttttctcattgttctagtaattttaatatacattttcatatctcaaagcaataggtttggggccctcctccttcatgcagtaggcatgtcttaagagctaaatactgaccacaacatggcagcctcaagcatatgaatttttaaaatttggccaggtctcatcccagattgcacatgtcttgataaataaatatgttttgctagagggctgtcttcactctttagtagctttcgactattagagttcggatttgaattgagcctttgagctcctgtaccctacctgttctatcttctatgcataattatctctaccatgaccctaattcttgtagatattcatttcagcttacagtctgattttattgacagatctacgcatgtaatgtacactttaagattccttagctgcagacagtaagagagttcctttttatccttttttgatgagcatgatcttttgcattttcaggtcactttctatgaggcaatgaaagaactgactgagtatgggaagaggaagtatttgccagagagtaatttgcatgctagcagctccttcgaagggcttcttctaggaggcttggcaggcggtaggtctggtccaattttgttaatacaccaaatgttgcctatagtattacttgattatccgaaaatgcttaggtctcttgatatttacttattttccaatgtttttctatgtcaggttttagtgcatacttgacaacccccttggatgtgatcaagacaaggctgcaagtacagggatcaacaactaggtaactggaaaatctcacctatctctccttttctgctaggccaatatgacagtcatgaaatgaacttttatgataactgcgatatccaatttatactctcccaaatcgtcacacgcgtcattttgctgtttgacaaggtactgattattcttttgtttgttaatcagttacaatgggtggctggatgctattacgaagacatgggctaatgagggaatgagtggcttgttcaaggggagcattcctagaataatatggtacatacctgcatctgcattcacgttcatggcagtggagttcctcagggatcatttcaacgaaaagatcgatacagatgcccgtgaactaaccggcctgtcaatggacacaagatcagaagttgaggaagctgcatgaagccctgaaggcctgaagtagttccctgttttgtaggactgatccagaggaatttctgatttctccgtcaagtaaagttcatttcacgaatataagtgtgaaaaatgcaatgtcagccaagtttcaacgtttacaagcgtagaagagataaggaaactgatcatccttcatctactcagtatttttttgggggtgttggaaaccaggattgttggtgggcagtagttcttctgggtcttcaaagcccatgtttggacctaactgatgca

SEQ ID NO: 17153 - DNA, 3881 bp, Oryza sativa
  unsure (1)..(3881): unsure at all n locations
gctgtcccttgaattcgagatgcgagctcggnaccctcccccctaattttcttcttttatgggcttagtttcaatttcctcatcatctttaattacatgctattcttgcagtggtttctcagggatttgacaggaatgctcggtgggatactgttcactttttatcaggtgtcaaattctcttgctaactcgaataggcaatgccatcttattgccattgatagtttgtttactgatgagataacttgcttggtcagtattttatttgtctatagggtgtactaattctttgtgctttcacttttcccagggatctaaccttgatagcaatgctaaaatgtggcgcctagttgcagactttatgaatgaccttggtaatatagtctatatcagtaatcgctgtattaattctttgaatgcgggcgtctaatttaaaggtcctgcaatcgtttggtatttatattcaagactaagcattcatttttcttttgaggtattctgctatagtaggtgaatattaaatagcatatgtgtcacatgcccctgcaaatgcatttcacatggaatctggatttaaaaaatcctttgtttaatgcgaattccttgtagtatcaaagtatgctagcagagtttgtttgttggttttgcagggatgttgatggatctcttaagccctctgtttccttcatcattgattgttataatgtgtttaggcagcctatctcgatccttcagtaagcggatttacatgatgaatttcataaccttttaaattttcttttaaaatgtttgttcgttaactaattatttgactatctgtatagctggtgttgctagtggagcaactagagcagcgttaacccagcattttgcacttgccaataatgcagctgatatatctgcaaaggtaactttgcattatcttgtaacatcctaaatgccaattagatggtaaatttctctaaactgtagctgcagaagcatactcaacttttcaggagggcagtcaggagacacttgcaacaatgttaggaatgggactgggaatgcttcttgcccatgttaccagagggcatgctttgggtgtatgggtttcattcctttctctaacgatattccatatgtatggtgagtgcatcattccaatatttatttatttattttttgtaagaaggcctttataattgaagaatattattcaattatgaggtcagaggaatatgaacaaaaggtgtgtagataagtttttccatcaggacactgccacaaaaacacaaatgaattgtgaaacaaatatggtacacatgaataacatgaagaaagcagttataccaagaatgctgcatacatggatttcctatcgaaattttctatggattctggcagtttaaggtatccaaagattcagacgtggcactaatctggatttagctaaactagataatttttatttggatcccgagtcctaacctcctttctggtccataccaacttttcactaaataagttttgttcttttcctactttgttcttaggaataggttagtttgaaacctcatttttctactttgtactagataatttgaagcaccaccgagtatttgcaggaactcttctatttacatcttgttttatttgggactattcagcaaattacaaggcagtgcagtcactttcactcacaacactaaattatgagagaagttccatcctgctgcagtacttcatggacaatggtgaaggtgagtacactattttccttttcatggtatcatgaaattcatgctcttgcgatcactattgcatgcgaaaaaagctaatgagccctggaaagtgttagtagcttgaagaggatgtaaatatattttactgtaatagtgtttgtatatcatcagcggcttaatgctatgtgctttgtgcccattattttcttctatatcaataaaagcccaagcttggtcagcttgtggttagcaggccattactagatgcacctaacatattgtaacaaatttcaagtataatgtgtactgcactctgaaaacgtcctgcttctctattttatcatgaattcatgtgttgatgttgaactattcacggcatatgaaatcatttccttaacaatagcttttgctgcttcatctgtgtgaataaaaattccatggcaagccattacattatttaatcatcaaaatttcttgggtggaattttcctagtcctcacaccacaacaggtttccaagcaagagcatattcttccatattggtcaagctggcggaaatttcttagaattaaactgccacatgagcatgtacatttaggtgctaaagcctcaaggcttacacaccctgatttgtaagtactaagttttgagttatgcttttatgtgtttatcactctatgggggaagaaacatttactctgtttgtcaaatttgataggctgcagattgcaaaaacaaggccctactatagaaatggtataactcgtctcttggttaatgtaacactaaactaactgttgctgacttttcttttacttcacaaatctattcagagaactatttcttgctggataaggaagccagtgttcacattttcatccacaagcaggcagcggcaacagatattttgatgtccttcatacatggactcgtgttagcacatttgatgcagaagagcaaatctgggcatgcggaggctcgccaatggattgatgagaaatataacacttttatctcaaaggtaaagccctataccatagaatatagatgttcatgttgcgtttgacttgctacgacattaactgatgttagtttatcctttaactgatgttagtttatcctctcagcgtttcttaatttgtattcacatacaattggtggtaattcatgcaaggccaaaatctttaaagaaccatctctctgagctctgagcttatattcgtagaatgaacacacagttgtaaatgccttcttctatatcattaatggtagggttgtggagatgtactatactccctgactgtctgttacagctaatgaaaaatgaggattccacgcatttgcctgttgtatatgacaccaaactgcggtgggagaagtcagatccataaagttaaggaatgctctattttgggtatgtcaaaaaccaaaagctgagtcatcgtaacactggttttcgccttagcatggctaccccaaaatggcgtatatccccatcgcagatagcagtatagcaccatcttatgcacgtgtgctggagtacattcaggtctcttagtagcctggtccttgtactttgtcaaagggtggatttaggtctggtaacattttatgatataaatgtgaatttcaacgtttttgcagttgtcttctactgatgatgattaattttctcccctttgcgcagttgcaagttgaaggttactcaacagagcgacttctttcacactcgatcgggtggagggcacattgggttcatggtccctctgaagagaagctcgagtaggaggaagcaggcgaaggtagcactatctgttcaacgcgatattattagagcaattcgacatactgcataggatgctttgcatatctcgtttgtttccgttccgaattgccacttttcaccatggagttgcactgcatcttgtaatcgcatgggatatactttaaaagctatacttgataataatactattaaatgatatagcaaatgggttcgttgatatttgggggtaccaggttactcgttagctacacctcgcaagaaacccaaagctgcgcacttttggtaacaagtgttgcttaaaacgaaaaggtgccgcttcctgttgcttaaaacaaatgatatggagcgccacaaatcaccccgttggaact

SEQ ID NO: 17154 - DNA, 6568 bp, Oryza sativa
  unsure (1)..(6568): unsure at all n locations
catgtcnattgttaactcatacnnctgccgcagcccgcggtcgactctagaggatccccaaacaatcataaaactacagatttaagacgtatcacaaaactacagatttaacaccatatttatcacaaaactatagatttaaggttaagtatcacaaaactgcatatttaatatttaagttatcacaaacaataacttttagagtttaaatccctagcaccactattatgctggagctataaacattattgttttatgactaaattggttctaaacctatagttttgtgataatttagttactaaaaacatgtagttttatgacacttcatcttaaatgtgtagttttacgataaacttggtgttaaatgtttagttttgtgatgcaccgagttaaatatgtagttttgtgatagattggtcatagtatttgtagttttgtgaaatttagaaaaaaaagatgaatacttgtaggcttgggtgaagcatttgtgttcgcattagaagccgccgaagagctcagaatatcagaaagaagcctggtctttggaaacaaacgctcctctgagctttcgtcccgttctgttactacctgcactagtacagctgctaatatcagctaaacaatgaatatatcattcaaatggaatgcaagtcaatacatcgtgcaaggcacaaagacagaagataattggaaactataaaaatgcattgtgaagtaggaacacaaatatatggctaaaattcagcctctgacttcacatttacttaaatagcataaactcgtcttcacatttactgaagataactttttttttactcgcagaattttttttaagaagcaaaacatggctatgattgaagccacaaggagcaaacaacaaaataatacctaaattttggcatttcaacaaaagataccctgcttcattgaaagtctgaaacaactattagaagagatgtaaaggatttttgaagggtttcaatccatgaaaccgcaagtaaactatcatcaggcaaatcaagaaccaaaagcctcagaaacatttctcatcatgttttgaacaaaaatcagggagtatttttttccatactagcagcagcttactggaatgtgattccatgagcaaaacattggtgtgaaataatgcacaagcggagcagtacatatgcacacatgcacttaaaataattctgaggttctgccattaaagtattgggaacacattgaacataacacaacacggcttactagaacatgggacaaattggcaatggttggtaaaggacaataaaatctcgtttaaggaaaaggaaattaaagataatttagaaagcatgggattattaaaataattaggatgggaaccatgttgtacctcatcctgcttacttttaatttcatcttcttttccagttgatgccttctctgtggccatacagattgcaggcaacccaggctcttgtttcactgcaagcagtttaataaatccaggaatggcttctgtttgtgcaacccttggaacattcagagtgaacttaatgaggggtttcttttcagaaacaacagtttcagatccagcagtagatactatgggtagacgatgggctttagtaaatcccggaggaacatcaagagaaaatcctagaggggtgtcccaagaaaggctgtgactgtgagaagggtttatgtgagactcagtagtttctcctgtatgagggagataatgagctttcataaagccaggagggatatcaagagaaagccctggaggtacgcccaaattaaggcttggagatgagtctatgtaaggctcagtggtttctcctgtatggaggagacaatgggcttttgtgaggcctggagggtcatcatgaggaaacccgggaggtgtgtccaaaacaaggtcagaaccagcatggaactctatgagcagattgacaagtaaaatctgtaactagaggaagtataataagcaaatcatggatgaacaaaaaacaaatcagttgaataacaagatgtgccggcccatacaaaaaagcaattgtacctgaagagcttgccgcagcatttggatcaggagtcagcattctcatgcattcgttgatcctatctctttctctgctaactgccgaatccaatttattaccaatctccccacatttttccttctctgtttttttgtcttgtgtctccaaaatcttgccagtttccttatttttgtgcctctcaatctctttgcatcctgttgcatcaaatgacatacttgtttgattataggatctgtgcagcgcccggaaaacaccccaaaagtaaaacttatcacattttcctgttaaattggtaattatacagaaaaggttagatgataaatttgtacatgcataccactttttaaaacatttaacagggactgtacagctatgctcatgcaaactccatgtgatttcatctggttgcaagagaaactactgcgacgaatcaaaaacaggtatcacaaaaaaaaatcaaattaaaaaaatattcatacaaataagattaccaaatagtaactttgagatatgcatgcatcacagcatcagtttgtttaagcatacaagtgtaacaagtccaagcattgtcagttatggggggatacatgacatggtttataatggaaatgggacataaaaaggatcatggaacatactttgatattcttgggtaagtaacttggatgaaaatatcagcaactcagtagcaccaatcttggttcgtaacccaatatgcgaagaaatatttttcaggagatggtcagaactcccatttggtctgcaaagaaaaagagagaaaacacataaatgcagataagcttcatgcacacagctgcattctgtagttgacaaaaagagattaaactccaaaagcactcgcatttatttttcagagataaattgttgaattggttttcaattgccggtaactgaaacgaatactccctccatcccaaaatatagcaaattttccacttacattctcctctcaaccaatcaaaaccttccacatttaatttctccacctacctccttttctcaacaaatcataacattcacccatttcattccacctacttccttaatacccgtgttcaaccccaaaacttcttatattttgggatggaggtagtacttgttaggatatgacagatgatgtggctgaacgcaccaaaaatcattggtgatacttctgaggttaatttctatcatgccactaaacatctgagaacttcctcattttataaataatgagttgggtccataccagcaggcccacatgccattgagacaagtgagaggaacaaaaggaaagtaagtagaagcattgatttgaggggttgtacctttgaagagagctaatgaagcacagtccaatatcttgtccttctggaggtttcatcttgaatgttttcggccacagatgagaaagaggtctagcctctagctttaatatttcaggcatttgttttgaagcctcatatacttgggcagaaatttcgaaagggaaatgggcttcaagtccatcacaaatatgtgttagctctccagtcacttcaaatttacccctaaagaacatggaaacagagcctcaatgtttaactgaaaatcaaacacacgtatactaaaatagcaaagtctcacagattttccattataacttaacttcagcattggataaaagttcaacacttccaaattgcataataattccaaaaacagaagcagcatcacttatcatacatgtgaaaattgttctgagatactatatagcttaccacattatcactggcacaaaaaagctcaagataattctgcagatactctgctaatcaactatatttgctgattagcttcatccataccagacaagattcaaggcttataatgcaagtgaaaaaaaaacaatgctcttttttagacaagaatgccaatttcatccattagtacatcaaatttgaggacaacttttgataactttgagtttgtaattgatcccaaaacaattttttatacaacacagtagctacagcttatccggtcagataaatatagggcatgtaactggtaaaatacagtgtgataaaaataaattctattgataattcaaaaatactctaatgcatgaagtaaattacttacttccagcaggcttctggttggtaatgcttcttgtgcagctttgtatgtaaaattactgggatacctgtttgcaccaataccaatgttactacagcagtgttctcaaaataagtttttcatcaataaatctccacaaggtaaaatggcatgcccatggctaaaacttagtaccgctgctttcacttttttcaccttttcaattttcaataagcataataattgaagggctaaatgcagggatgtctggatgctacagtactattaatgtcagctattttaaatatgtagatgaaagaatagaagagattactgtcaggatccacactgtacctgaagatacattacaattgattggtgcctcctggttcatttgtttttctgtaattatatggctcttagtagatggaactgcttcaaaatcatcaggcggttcaacacatcgtgcatgagatgtagactgtggactttgtgatggaggaatgattgtttcactttgcggtgagcccaccttgcattttgtatcaaataaatttggtctggaagaaggccttggagcagtatcaggatatgcctcgttggacttttcactaagcacagattttgggctcggtaatgcaggctccatggttagctttttttgcactgaaggcgccacagcagttcttgtgccttgacattgtaacgtgcccaacttacagctcataggggatgacttctcattgccaggcgcacaaaaactttcagcagaaggttctgcatttgtaccaggaggaactacagttgaatgtgcatgcgcagatgagaaggttctggtgcgtgaactgcaacttttgacatatgcttctctattacccgatctgctaagattcttgggagcagtggcatcagtaccaagaggtgtcccagaaggctgtgaaagaacagccctgcagaatggtgatggacgctgtgaaagataagctatttgtgttgtaaaggaatttgtgatatagcccccaacaagtgagtgaccatttccagctgtctcaggccacataggagagataggtgaggtagcaagtgagtgaatctttttaactgccccaggccagttaggagagataggtgaggtagcaagtgagtgaatctttttaactgccccaggacagttaggagagatacctgaggtagcaagtgagtgaccattttcagctttcccggtcaagtttggagagatacatgaggtaacgactgagtgaacatttttagctgtcccaggccggttaggagagatacgcgaggcagctggtgagactggtggtgtaggcctctgattaaccactgtaggtgtcacaagagacactttacgtgaactcggagggggggtgacacttcgtctgcgttgccttttctgtaatccatctgagccaacagttttaccacatagttttccatgacgtacatatgtaatttcttctgcaggaattatctttactcttgcatcaggttttgaatatgtaccaccagaagatttgtgcatcccatacttatttgaagagtttggctttgcaaatccctttgcctcaagcattgcatcattcgtatgatggatttcatgctttctgagatggcccaaaacagcaaaaaaatactactattaattataaaaccaataggactagaattaacacataaatattgcagaatctgtcatgtataaaaatgtgcacgacatttgaatacaatccaggtaacagaggattttatagtctgtcaagagcttgcacaagccaaaaaaatgtatgcatgcctcacataatgctgtaataacaaatatccacttttatgagaaataggatgccatacaaaataaggaagccagtagtctagtatatacacatgaatactcaatggtcaacagatatagatttttttttaaaaaaaaaaaaagcttcagccaatacaccttatcttatcgaaagtattatgctcagaatgacatcatctcattctaattttgcaacactgacttgatatcagatgtgaaatattttttttttgtgtgtagaaaatttacatgtatcaagttattaattggattatataaacttatatgcaactcaattaaattcaaatttacagcttctttctattgcccgattcctttgggtcattatgatccatatttgtgcatgtgcaagaaaaaataatactaaggggtctagtgaaagcctaataaataggtgcaatcacataaaacctcacatagccaataattacccgttggatgaaagatgaatgaatggctaccccggaccaggcggaagcagtgatattctaataattaaccatctatgaattgagtggctattaagaattttaccaccacatgaccctaaatccttgaaaattgt

SEQ ID NO: 17155 - DNA, 3509 bp, Oryza sativa
ttttataaaacatatgttggttaacatgtaaagtctgcatgatttcatctagctattggttgcactagatatgtcccctttaccaatatttaattatttattatacgcattggtgggttaggaatatgggttaagtttctcaatctatggacatttatgcatgttaaacagacaagctaccttggtattacgagtagtttggacactttcagtaaattgttgaaaagttttttggcaccaaaaagagaacagaccacattacagtttgaagaaaacaattcagcattatccttgtggacataaatgcaaattacaatgataaatggcaagcttctaaaaaattctttaggtaaaatgcacatgacaaaggtgtaaaaacaagcctatctttgtttaatataactaaataagcacaaatgacaaacaaagggacctacgcatgctctggagatttcttgcactgacaacgtattacatttcctgaatcaattttatcaccacaagttgcacaagctctatcctgcagtagttgaacaaaacaaaacaaaacaaagttacacatttaggtgtctctgtatggaaataaaaacaataatctggtaaaggcataatttattttaatttcattaggcagaaccagaatttaaagaacaattgaacaaacggtaagaaaataagaaaaaggaaaaaaatgggctaaaggcccaatgacacactatagagtatagattacccaggaatgaactggtttaaacaaacgctcccaccaaacactcacaccttgcctttgatcttatgaagtagggcttgttgggcctgtctcaacatgttggaagacccctactaccagattccccatgtaacaagattacaagaaaggcataatgagggtggactcttgactctagaaatcctaatccaagtgtgaaagttgattggaaggctgttatatatatgcatgcatatatatgcccgtcacaaagattaggccgacaagatgaaactaaggtgctatgcaggaaaccaacaaacacgtcctaagagcatgtccacacaaatgtaaaaaagaatcacccatagagatgtcgtgtgtactcaatgtggtaaacgctatcgcactggtagtttcatactttcatggcatgtttgaaaaagaaatggcccacataagtacccgtatattagatcaaacgaggtcagacattgtgaagcaccgggtgctaggtagtatactagctagtgcagaacaactgaacaagcacaagtgctactgctactactaccagctttacaaattaaactgggtgacattgcgcaacgattagaacagagcaatccccgcaaagtaagagaatagatagcctcataacaacaaaaagtaaaacacacatacaagggttccgcaaaatctatggaaccaaacagtaattagacccaaagctctgcaaagcggaatgcacgccctaccccaaaaacccctcttttctttctcacgcgacaaaatcggaccaaaatacccaaaagggggcgaactaggcgattgctactaacgcttatcgagagcaaagcagcacatacgcaaaacgcacacgcaaccaactattccaccccgcaaaacatcgcctgtagaaaaccttaataaagcaaccgcgatcgccagaaatgttgggggtaaaaaaaaaaactaaaaaagcagagtccgcccgatgatcaccttcatccgcgcaaccctccgtggcgcgtcgcggaggtcagcggcggcggcagcatccgccgccgcgaacggcggcggcggccgagcgggcccggggctagggtttcgcgcgcgcccacccaatggccgcgccgcgtgcgccattggatccctcggcgatcgccgcagagagaattgatgaaagtgggttttgtgcttcttgttcggtgcgtctctttgatatgaagagagagagggaaaaaggaaggagaagccgagaagggccttctcctccgggcccacctcgcagcttctgtttcgggaaatacacagtccacgcgacggggtcttccgacttccgagcctactggcgggtgggtcccaccgcgtgtgggaccgggatgtcattgtgtcgttgccccggcgcgtaaacgatgggcgcgtgtggttgtgtggaaggtaaggggccccacgttcccagttcgagcggtgggccccacatcaggcgtggtctggccggaccagttttggcaggggggaggagcgcatcggcccgtttatgatggacgatccgacggctggagattaatcttgggtggagacgcatcagaaggttacagaagcccgaaggcatcacctctgttgctcacggatttgaccgctgggctccacgcgaggaggtgcgttttgtctatatcgcacggtgaggatttttcatgcgttaggcccctttttctctcagagaagttggatgaaaatctggatatccgttgcatgttttttaaactgttaaatactattgacggagcgtggggctcctcaccgggagaccgcgcaggcccccctttgccggttcggccggggactcagggtgagattctaagctctctgtatgtggaaggttcgcgagaccggaaacacacaagactcgggcgatgtatacaggttcgggccgctgagaagcgtaataccctactcctgtgttgttgtgagatctgtgtaggaatgagctacaaagtatgagccagcctctcccttgttctgggttcccaatctcgaaaagtccagtctcccctctaagtgggcaaggtcctccttttatatcttaaggggataccacatgcaccatttctctcttttttgtggggacttaccccaccttttcataaatggacggagatttgtatagttgccgtccgagtcaccttctgatgagacggcccacaactacctccactttcgccgggagcagatgcgacgtggaatcgtggttgtccgctgacgacatgaccggtgtcagaccagtcacgtcggtcattcttgtccaccacgtgtcagcttagcaatctacatgttcgcccttcttcacacaacatcttgcctgtaatggttaggatgaagcctggcatatatctgaccatgactatcgtgccatctctgggaggtaacacgctagctccagctggggacgagcgcctagaagccctcgtcctgacgggatggggcgaggcgtgcgtcagatcgcctgtcgccacctaacccgcgatctgaccggtctgtgactggtcacagaccggataaataagtgcactgcactgcgttatatgcggcgtgacacgctcagccaaatcgcaataaatgtggttaggtgaggcctattgggctaacctaaccaatcccttggagcaaagacccaagaaggggtggggcgcctttgggctttgggtccaaggcgtgtgtcggccctaccctctttggggttgccaggccactcttcgcaattgtttcttccttaaaccttctactattatactct

SEQ ID NO: 17156 - DNA, 7717 bp, Oryza sativa
  unsure (1)..(7717): unsure at all n locations
ccggccaagggggggtggcccacccccctcgggggtgccagaccaagtgttttattttttctccccccccctctagtcatgatactcctgatcccatgtcaccgacaactatctagcaatatccatattcatatagatgttaatgaatctaggtatatatatatatatatatatatatatatatatatatatatatatatatacatatatgtgtgtgtgtgtgtgtgtgtgtgtgtgtgtgtgtgtgtgtgtgtgtgtgtgtgtgtgtgtgtgtgtgtgtgtgtgtgtgtgtgtgtgtgtgtgtgtgtgtgtgtgtgtgtctagataagctaacatataagaaaggggcaatactagaaagtcttatataattaaccggatgaagtagtatatttcatgtgaaaactttctatatgaaagttgttgtaaaatataagataaatctgtttttaagtttataataattaaaactcaactaaacatacgttaatcccatatcattttacataaaacacttaatcttcatctttacccacatcgttttgtgttaaacacttatttttcatgaagaacaccacctagtattgcatatggatgggccgagatcttggttattgatgtttacggaccgagattattagattaaggcccattgaaacatatcctacgaagttcttttaacaccctctcctgaagaatacgtccatgtttccgcatgttgtcggcgaaaccagaaaatggcatccaatccatcaatcatcaattatgtacaagttctatgatctatcagcaaattcaaccatagcatattaacatggcttgaacacagctcatgccgatggaagtgtataatcacaaagaacgaacacaggcaggagtaatgaacaatgaaactgtaataaatacaccataactccacaagtgtggaaggttcactattgcagtgtcagtttctccatttgctcggcgtcaatcattcaagatttgcaaggatttgatgaccaacttgagtaaaacagcccaactacaaaagggcacagccagcaatgcatttaacttgagtaaaacaaatatcagaaacagtaattctctgtagtctgtaccctgcatttgctcagtcatagctgctctcgatttcttatgcactataaatatgaaacaatgtcagatttaggtgcacaagatagcagaaacacaagtaccaagctgagtgaaatggcaagtggagaggaaggaaacacaagagttctccaatgcagtgaacttatatatatcaccaaagatgtttgatggcattcggcaagtttccatgattcatcattgaataacccgagtaaacctgcttgtccaggcaactacaacttttgaacaccacagtggtaaaaaccagatatactaaccacctcactaaattagttaaacagtgccttcggttgggatttgacaagttgagccctccaaagcaaaggtaaactgggaaggagatagtgacctgacctccagagttcagttcaatagtttaaaaacaactgatagcaaggtccatctgctagaagaggcctcgctggcgagcaagcgcgatcaggtccataggaatggcaggagtgctatcccttgtgggaatcatgagaactgccttgtacagaggatcaccatccttgttctccacttcagaggtggtgcgatctgggcttggggttggggtcctgatcttggcaccccacctcacctttcttgtgcaaaccctaggcctgcgccgctgcttgacaatatcgctcatctcatcgtctcggttgtcctctgaggagctgcatccaggggtggtgcgcgacacggctgctggtgatggcaatggtgctggtgctggggactgggactgggtgaaggggagggtgcacatggtgatggcgtcctcttgagttgtgggaggtgtgctgaagacctcaccatcatcaccaccattgaggaatgaggagtgggcaaggagttcttcctgggaagcggagatgtcgccacactccaacaccactgagtccatagctgatttgataaaacccaaattgcaacactatcactatcaaatttcctttaacttcctttaactcaaaacaccctgaaattgccagataacttctccctccctgaaatgaatgcagatgcaaaaagatcagtactaacaaatttttatttgcaattaggattaaccatttgtcaaagaacaactactgattaacaccccaaaccgagcacaatatcttcattgacccaaatggaatgcagacaaaagtagtaaaatgggtactactgcattaatttaacagagctattgcccagggtttagatatgatattctcactaatcacatgtatggaatatcttccagtcctacatgaacactgacatgaagctcgtacttcatcggtttcataatgtaagtcattctagcattttccacatttcattaacatcaatatgaatgtggaaaatgctagaatgacttacattgtgatacggagggaatagtaagttaacatcaagaaataaacataacagagaagccagtcaaaactcaattaaattttctactttagcactaaacaaagaagccctggaattgactattatacctcaacaaataaccaagatcacatatccctgggcatgagacaggggcgaatccaacttgggacatgggggttcagttgaacccccaaacttttggggggaacaaacaataaactgttgttacttgtattaaggtaagggtctgaaattaagagaagagcttcttccagatctagaagagaagctagggttaacgaacgcaggcaaattccagacaaaagtagtcccggtgggagagagagatgagttctgagaaagaggatatgtggatgctcacctgcaggatcccctcctctcccctgctctgctcgccgcctcccctgttcagccgcgagatggcgcaaggagcggaggagccgagacgggagattttctttcagctttgctattttgcagttgcctgaaaaattgcaatccgtcaccgtcagccgatttgtgggccattagatttctgtcaagattcgtgcgctattgggcttggttgtggatgcgcgttttgtaatgggctgcatccctttggcccgctaaccatttgttttttttttttccctcaccaacagctagagccagacctacaccgagcaagccggtgatttgggtcgctgggcagccatgcgagcgaggccctgtgtagattccggcgaaaatttttttaccatgttacatcgaacgtttaaatgtctgcataaaatattaaatataggctaaaaaataactaattatacagattgtaactaatttatgagatgaatattttaaacctaattgctccatgatttgacaatatggtgctacagtaaatatttgctaatgacggattaattaggcttaataaatttgtctcgtggtttactgacggattctgttattagtattttttgttagtgcccaaacactccatgtgacaccccatataatattcaatatgacatgcaaaaaactttacacctttggatttaaacaccccctggactagcagcggtggtgccagcgaactagcagcggcggtcgagactttgtttttcttagcgtcttctcaggtacaaatcgatgaatcgatctcttttgtttatgtggatctgatagaagttcaaatcgttcctcctctccgcgctttgtatgcgggaccgcaccctctagttaccaacatgtctcttctcctctcccattgtcatgcacactactgttatggttgtcgtttagatcggatgtgtcgggcctgcagtgactcaagaaggcaggagccgacccaacgaagagcggagacgctagatctgagctccttgctggatcctcaattgtcggagggaaaatagaaatagagagagagacttagtgtgtggagtggttactgagtaatcggacttgtagatggatagaatagggtggtccaaaataaaatgtaaataatggttaaatagtgacataatatgaaaacttttaataatacatagtataaactatatttttttttctctaacaccgttaaagatgagacgtccattacccgatagtgtcgtcaaactccattataccataagcccatgtaaggcttatttggaaattagcaaattagaaatttccagttcacatgtgcttcgagttttttttttaaggaatataaactatttgccactcttataggtggtaattaaggatttatcattgagctcatgtgtcattgatacatgaaggcccatatgtcgtaaaatgtgagaggtaaaagtggcaaaaagtaaaatgccccctcgtgtgtgttttaggccatgtttttttctcccacaaaagttggatggaaatttagatattcgtgaaacgtttttcaatctgctaaacggtgtgtttcatgtgaaaactttttatatgaaatttgccctaaaatattacataaatatatttcaagtctgtaatatgttagtactacctcgttgttatatttgatctcatgagtttcaaagcctatctaaaggtctgtttcgggagcttaagattctgaaaagcagctggttggtaaacatcttccgagagagaatatggaaaagttgggtttcacagcttctcagaatctggaccaaaagctgaactgttagaggaaacttctgattctgagagaagctgtagtagctagaagctccccaaacatgccctaagggcctgtttaattggaaaaaaaatttgcccctgcatatcatatcagatatatgtggacataaatttgaagtattaaacgtagtctaataacaaaatatattactgattccgccatgaaactgcatgacgaatttattaagcctaattaatccgtcattaacaaatatctatcgtctcgtaattttctgacaaactgcgtaatttttttttctccctttaaatactccagccttaaattttttttttagaactaaacattccctaagtaataaggggaaaacaacccgctcgcgatagtccggtgtccggacgagaccgatccaaaacaccagtagaccaccagtagtagtccaccatcccgccggcgcgaccgccttcggcgctttcgtagggggcaagctgcttgcgcgcggcagaggcctctcctctcctcccttttaagggccttggcgtcgcggcgcgatccaaaccgccactatcccccaatcacaccgacaacccgatcgccgtatcgccgccctcgccgttccgctccgcctcccgcaccgaaaccctcgccggcggcggcagccgctacgccgagatgctcgcgccgctcccgcgcctgacgagcgcgctccgcggccactacgacgccgaccaggcctacctcctccgcaagtccgcgctccaatccctcaagctcccgaggtttatccctctctctctctccccttgccgtccccaaaatcccaatcgccgcggggagaacctaacgatttcgcctccgcaggccgcgcgacgagtgggagctcgcacggaagatcgtccccgactgggacgatggtaaacgcctccaaaaccctcgactatcgtgttgctgcgtctgctgcgcgcgagcgcttctgattttttccttttttgatacaataactggttgcgattgcccccttgtgttgcagcgcccagtgatgtgcgccaggcgtacaagcagttcctcggtgccgtggtggagttgttgaatggggaggtcgtgtctgaagagcttcaggaagttgcccctgctgtgtacgccttgtttgctggcgatgatacgcagtctaatctcgctgacaatgtccttcgcagaaggtaatgacacaattgttatggttcgaatttgtatgttcaattgatgatttcatgtaaatgctttggatatcccagtacttaagatgtgcctatctcctcaggaatgaattggagaaccttgtgggttacagtgtgcaagactctgttttaaagaagctagctcagttagctcagatgctctgttctctccaacgggcaaggggccatgaacttgttcagataaatgcagatgaaagtattacaagtgaatttggagcaaactttgatttcaaaccaccttctcgtttcattgttgatgtttcccttgatgatgacctacccttaggaagtggtgtattgagctctaaacctgctgaacatgatcaatacgatgccagcagcgcatccgtaagtcataattcagtttctcctgggggttatgtaaatttgaggtggctaaaggatcagtgtgatttgataactagaagtggtggctcagttctctcaggagatgaacttgcaaaggctttgtgcagagtgctcctatctaataaagctggcgatgaggtttgcaatgctgtggagtaaactgcttttagtctttccttttgttgctataataatctaatagcaccacttcgcagatagctggtgaactgttggatcttgttggtgatgctgcttttgaaacagttcaggatctcctttcggtaagagcggaaggccattttattttccatgtacagtttattttgcatgttgttcttcatacatgatacatggataagataaccaaaagaaagattatgagatgacctcaattgttataacttgtattgatatcagctagatgttagtatttctgtatatgccacttagtcctgtattctgcaacctatctaggaagtagggcatatgtaccagactaattccaggactcactttactggtacaaatcacacaataagatcactaaaacctcctagttggccatatatatccaaagtctatggtgtagccaacattcagaactgtcttggctctgtttaagttcaaattttgactgcttgtctttttgcggaaaatttataaatacttgagcatatattatattactgaagtgtgtagcgccataaatataatcatacaactttcatccatcataaatataatcatttaaaattaatctgtcataaaagtgatatggccgtagtcaacaatgtcagttatgtgagaaacggagggaatagtgaacacttagtacaacaagaagattatccatgtcccaaatagtaagtcgagtgctagaggactaccttaagccttattggtgctgttttattgtggctacctagcgataccatgaaaaggagccacacagtaaatgaactgttcttatgaggatatgcacacatgagaaatatcgaaacaaaagggggtggacttcagtgaattttggactctgggacatacaaatgtaatgctggatttctaatactatgtgcgtgtcaaaaagtactttatcaggatctgatgctttattgatcattaggaaatatgatagtgatcggtgagtggtcactggtgcaattatttcctatgggctcaccctgatttctcagcacatttccatatttagagttaaatatctcgtttcaagattgcaaagttccttatttatggttcagttcattaatacatagtggatttcatttgtttatcatgataatattttttttttatttttggtctgccatatgataatgtaatcaaacatgatcatgtcatgccctgcagcataggaaagagctagtggatgctctgcgggtgccagatcgtntctaanggccag

SEQ ID NO: 17157 - DNA, 735 bp, Oryza sativa
  unsure (1)..(735): unsure at all n locations
ctatggnccaggnatgcanngcaaaaccncacnnnnannntannagatccccacctaaattaaagcaattcaacgtanaaacacaattttcacaaaaactagtgataatttttaacaactaaagacaanctaaaccggtaaaattttttaaattacctcatgtttctcaaattttggggtgctcaatgaatttatgccaaaaaacaaaatcagattcttcaaatttgcgcttcttttgcctcctttgcattatactggaaaggactgaaacttccatctttttcgatgaaatgtaatgcccaggcttaacagattggccagaatcgattcttttctcagcaaaattattgtccatgttccaaaaaagtttttggacattatatggcggaacaagtgtcttctgcaaattgaacatggaaagattctgaccatttctgtggtttccatatcgctcaaaccaaaaaagtgccatttgaaggtttatcctgggcctctcacttctttcaattaaatctgatgatgcattttctggctgaacttgagtttgctgctcaatttgtgctgcaactgccatacccttaaagggaggttctctttaaaggaatttagaaagtatgcttggacctctatcttcattgttcctttgaacaaagcttaccatctttatttcaacaaggaatggccctgtgacattttcatttccaattttatctacagaccatcttacccaattat

SEQ ID NO: 17158 - DNA, 724 bp, Oryza sativa
  unsure (1)..(724): unsure at all n locations
caccttaccaggttcagtgcatgnncccnncnnnnnnnnnannntanagatcccctatatttatgtcatgcattaatgtgtttaccaccaaatcattcangaaaatgctcgtttacattcacatncattttccattgttgtgtaaattatactatttatcattcaaacttcttcacactaatgaataaagcaaaatgagcacctacaaaaatttcttttaatgtacccatctttgaacctcatccaccacattactacataccgtccatattacattcctttttaagaacagagtcactgtttactgtttcttttcataaccttacctttccacaggtgaattcaaccatttcttacttcacttctataactttttccttttgacttatcatatacttaaaatttcaagttttctttacatacacaaataacacacacttaacttttttaccttaaacctcttccatttaatgctcttggcaacaagacgtattaaaatctatacaaattttcccatttcaaacctatacaaacacaagttccatgaaaaacaaaatatcttcctttttaattgtcattttaacatttcattttataaacaaaactgaaattacctccaaaaccttctattttctccaaatcgaacacttattataaaagctcataaaatcaaaattcaaaaaaaactttttttaaaaaaaattcaaaaaaatcacccaaattc

SEQ ID NO: 17159 - DNA, 2267 bp, Oryza sativa
  unsure (1)..(2267): unsure at all n locations
gtggtgantttataaatctattcgtgctgcctgcggtcgacttagaggatccccatcacaatctgcactgagaacaccttcagttgtcgcatgtttattgcaccgttaggacactctccagactttgtttggttaatccccgaggagaaaaggatttgaagagattgaggaggattatgtgtaaaataaatcatctcaagagaattggaatcttgtgaaagggattaatcgccacgcaagcgtctctcccacctgacagctgctacactgcaacaccacatcgaccacatttgccctagtcgatgaaactgggccccacccacgatcctggcccacatcccagtgggtcgggtaagaaacggcccaggtgcagaaagtagcaccaccattttagccacctcgggtgggcccgccttgcgagaaactagccgttaggatcgcccgctcgccgcaacgttctctttttttcccatctccttccgctcccccctcccacaatctccaattcttcatcgtagcaaaagaaaatccaccacctcactcatcacgcacgcgaggcccaaaccctagacatggcgacgtcgacggcgacggcgaggactccgaccaaggcggcggcggcggcggcgggggggagggcggccgggaacaccaccccgtccttcaagcccgcctcacgcgcgcggttcttgcacgccttcttggagaacgcgcaccccaacatcccggcggcggggcngcngcngccgcngcnggggagaccaggaccccgtccaagaaccccaccctggcgcggttctcgcacgcctcgtcggagaacgcgcacaccaacatcctggggtcccccccgccgtgaagcccggagaagttgccgaccaccgcgtccaagtgtgctaccgccnccgccgccgccaggaannagatctccacgccggcnccncnnccgccgccgcgggagaggcggttcctcgtggcgaagaaaagggcgcggcggaggcgcaacggcgccaatgaaggcggcggcggtggcggagaaggcgacttcgacttcgacaagtgcagggaggccgcccgcgaggccctgcgcacgtctcacgaggagttcttccgcaaggagcgcgccgcatcggccgcagcagcagaggagcagttgcaaaaggaggaggaggaggagaaggcggccgcgcaagaagccaagaaaggagcattggagacattggaggaggaagatgtagcggaactggaagggagcagcaaagtgagggcgctgaggaccaaagtgatgaccaaggcgttgagcagcgtccctgattctggcgctggtcgtgtcaagcaccttgtgcaggccttcgagagcatcctctccatctctggagccacctctgacgccgacagggccggtgaggggtcctgggcgctccccgggttacaggcatggaaggaagattgcgagggtaagatagggatgccgccggtgtcggtgtcctcttctgctgagttcttgaatgcaggaccgaacaggctctgttcttcacttgatgggaaaagcgacaggttggtcaatttgaacaagtgggggatatggattgtgttttggttgctgccaatgcaatagtttgatcaacaattctgtatcttttcaggttgagttgggacagccggacatcggcaggggggtgcaggagcaggcgaaatgtgaggacatacgatgaattttgtttccttttgggagttaattatgtttcatatttggcctctgatgtgaacgtatattattctttgattgtcagacatcggagtcgctaagaagcagttggaacaagaaactgaaggtcacaagccagcatccgttcaagctgagaaccgaggtaaacgatatgtttgatgcagtgtgaatcgttgttgtaaatctattgtgtcattaggccgtttaggataggagaagtgcacaaaagttttagggcccctttaaatcgcagggtagaaaaaatggaggaataggaaaaacacaggattctgacaggaattgaagtgtaaaacagaggattgcaaaatacaggaaaaacccaggaatgatcgtttgattggagcgtaggaaaaacgcaggaatcggatgagagagatagactcaaaggaaattttccaagaggttggagctcttgctaaatttcctccaaaatccacatgcaatgtgccattccataggaatttcataggaattggaaagcttcaatcctttaagggtacaagtggaaatcaatgcgcgc

SEQ ID NO: 17160 - DNA, 3496 bp, Oryza sativa
aaagcttcaatcctttgaatcaaagggccaaataaaattcccatttgaatcaaaggatttatgtaggaatttcataggattcaaatgctataggaaattttcctatttggccctttgattcaaaggattgaagctttccaattcctatgaaattcctatggaatggcacattgcatgtggattttggaggaaatttagcaagagctccaacctcttggaaaatttcctttgagtctatctctctcatccgattcctgcgtttttcctgcgctccaatcaaacgactattcctatgtttttcctgtgttttgcaatcctctgttttacacttcaaatcctgtcagaatcctgtgtttttcctattcctccgttttttctaccctgcgattcaaaggggccctatgggttaatttgatactacagtgacaacaacagcacaatcgacctatacctggcttcgtgtcaattttgaagtgtttattaagtccattaccagccagtgttactgttcttcaaactgaaatgcgccatcaagtgacaatgggtagaatggtagcataaaagtatactttttattatgaagcgtttcaatgagttggttgtatgtgtttataaggataaacatggcaacatacatctgatgcttatggaaagattattagatatctgaaatattcttagcccaagatttacagtacttgagtgaaatgtgtcgtgccatactattctttagtgtttctctttgacatgccaattgctagtaccatgttgatacatccaatgcaacaacatttggttcaatctctgatttactttgcttctcgttggattttgcaaatacaatttgctcagtgcattgctctgtattttctacagattatgattcttttgatgacaatctctagctgttccctcaaataaactagtgcatcaaaatcaatcactcctttttttcttttttgcaacagcaacggggaagggtgaaggaacaacagtttattcaaaaagtacaagaaatgcttatggaggaagagcagcaacgtatacatattgcacaaggacttccatggacaacagatgaacctgaggtatgtctagactagagcattcttgttttctcttcaaagcaaggctttcattaccagtttgttcaaaaagcaaagtgagttggcttaaaatttgttgtttgcgcttgtttgtcctggctgttctcattgcagctaggttagttaacatatcaaaatagtcaggattgagtatatttgcacagctttttacctatttttctttgaaatcagtatgatgaataattttacctattttctatggtatcctgactctgcgtttttattctgcagtgcttgataaagccaccagtcaaagaaaccaccgagcctgttgaccttgttctgcacagtgatgtacgagcaattgaacgtgcagaatttgatcaatatgtgagcatcgcaccacaaactcattatatgtcttgtgtattatatttaagtaaaccacaacgttacttattgcatatacttggtatgcttggttgagaatgcaggtgtcagaaaggaacaagttcgctgagcaactaaggctggagagggagcggcagcagaagctggaggaggaagagatgatcaagcagctcaggaaagagctggttcctaaagctcagccaatgccgtactttgatcggccgttcattccaaaaaggtgaatatccagtttataagtgaaacttagcctgccaaatttctttttgtagcactttcactctcgtctgttgcttggaaataatgattcagtattgtcatttctttctaaagaaatcaatgctgtatatttactttgcagtagcacaccagcattatcttaccatttgcacaagttactaatactcagttctatctctggtttgttctccaaaagatctgcaaaaccagcaacagttccaaaggaaccaaaatttcatcctcggccggaaaaacagtcatggtgagtttactttcaagggagctaagaaaatgtatttacttatgaagttcattgaatctaatccagaataaatatttctgcattcacaaattgaagcatgctcttaatgcttcttatatttcaatggtgtctgacagtttatgtcgacagcgatgcatggacaccggaatgctgatttcatcatgtcttcatgatcagtcgactgtacttgctgagaaatccaaggcattgccacgcatgttctagattctttgaactatctgaaccggaaacaaaatcacattaaatttttgtatcttcagttgtcccctccagttctttttatgtacatgccttatcagtagctctgtgcttcagatgcaaccacaccgaggttgagaagttgtacaaggaacataaaagtggaaattcaaacaagaatttctatgatatgctgcagtagtattcttgtactcaaaaccttcgttcttgccaaatcaaaaataccatcgtgttcatatatataccttgggtcttagctcattttgttctggacttcttgatgaaaatttttacggcgattttcactggactgaaaataattggctgtaaaaacagtaaactggaactgaccaactgagcatctccttgtgtgctaaaaaggagctcatgtatatgcttttcaagttttaaaatgatgtatgcccataatattcctattttgttccctctgctgaatgtttggtcactgtataagtttgtatgaattactccctccaatcataaacatttggcatgatttggtcaagtattggaactttgatatcaaatatttctcaaatgtttatttttttaaaaaaaaattgtgtgtattgccttgaaaaaataccaatacataccataaatctgttatattgtataacaaaattattcaatgtaaatttgttaggtaaagttttaaaaattgtctagatttatcctaatcaccaaatatatttttaggaagtacaaaataagattaagaactaaaaggatggagtatatttgatttctccaaacgaaatttatcagacgtcaaaagaacacatgagatctactacatagtactccctcattctcataaaaaaacaaatatattcatattcatattagtgacatatactaataatatgaatctaaatatgtttgttttttacaagaccaaaagagtacaacctagcattcgttttatgggctccattaggcccaaaaagagcccatgggctagaaacgaagtcaatcaatggcccagtgatcccgcggtccaagtccaaccgccttttctgactgacaggtgggacctccgcaagctaagcttcgcgcacccaagccctctcttcctcccacttggcaggcatcccaccctccagcctccacgcgacaacgccctctctctctctctctctctctctctctctatttctccccatctccccgatccacccgtctctctccaaaccctagccgagctagatctcca

SEQ ID NO: 17161 - DNA, 12071 bp, Oryza sativa
  unsure (1)..(12071): unsure at all n locations
cccgcaagggcgttcggccgcttcctctcggcccaagtgcgcggtcgctccgccccccgcgccgnncggcggggcccgggaatgcgcgcgaggcatccaccgcggtcgccgccgcggggcccggcgtcatcgcccccaacgcggccccggtccgccccccgatgatggtgtacgaccgcatcgccgaggccgtcaacgccaggctccgtcggctcgagcacccggacccccgcttcctccgttacgcgagcccagtccccgcccacgccgaccacaccgccatcctcgccgggccgaagacccgcgtcacgacgctccccaacgggctccgcgtcgccacggagtcttcgctcgcctcgcgcaccgccaccgttggcgtgtggatcgacgccgggagcaggtacgagacgaaggactcggccggggtcgcgcatttcgtcgagcacatgctgttcaagggcacgggtgaccgcaacgccgcgcagctcgaggaggagatcgagaacatcggcggccacctcaacgcatacacgtcgcgggagcagacgacctactatgccaaagtactcgacaaggatgtgccgcgtgcacttaatattcttgcggacattctgcagcactcaaagttggaagagtcccgcattgaacgtgagcgcgatgttattctgcgagagatggaagaggtttgcttccttatgcttagatgtgaacatcccttaattaatcatcttcattgtgatggtggctgatttatgttactagttgttggcgttctggtgtagattatatatgcattatatattacctttaggcccatgataaattagataagctgcattcaaatgcaaattcaacacgacagatgctggatggaaataacttcaccttatcctgttgtgttatgggtatttttatatgatgcgaaatcttctaaatcttccttttggattaagtacatttatgttagacatatagacatactaattttgaagcgttgcggttgttcacatgaattttttctatagattgtttcttttgctttatttatcctaattgtggaaaccaatatttatctaatcctttgattgactagctaaggcacactgtgtcataattcactagctaaggccttttttttttttctgtttgaggggcatcggcataacttctgactgttgctatcttatattaggttgagggacaatatgaggaagttatattcgatcatctccatgcaactgcattccagtacacttctcttggcagaccaatcttgggttctgcagaaaatgtcaagtcaattacccaagaggacctccagaagtatattgaaacacattatacggctcctagaatggtacatgataatgaatttattgaatttttttattcacagatttattgttttatagtacctctattgctgcagttggatggaccattttcactagtaaatatcatacgcttctatatgttttcaggttatcactgctgctggtgctgttaagcatgatgatattgtagagatggcaacaaaactgtttaatgacctaccaactgaccctacaacaacaagcatgttggtttctacccaaccagcctgctttactggttctgaggtgtgtttgacgcttacctgcactatctattgntaatatggcttgatctcagantatgctactcaaaaggtccgcatcattgatgatgacatgccccttgctcaatttgctgttgcctttaatggagcatcatggatagatcctgattctattgccttgatggtcatgcaatccatgcttggctcatggaacaagagtgctggaggagggaaacacatggggtatttttttctttctctagctcttggggttntatcagngtttctatatggaccaaaaatttgttttgtctactgactgatgatcatcctacataacttttacaggtcagagcttgtacaaagggtagcgatcaatgacattgctgagaatataatggcatttaatacaaattacaaggacactggcctctttggtgtcaacgctgttgctaaggtagtctttgcttgaatgtctatttatcaagcaaaagtttatattaagtgctcgaactggtcttttattcttatatgtttttcatagtgatgtatgtctgaagtgcaaatcattggtcatgcaatccttcctatccatggttaccataataataattgtccgaacccttcaaatgttatggttagagtaattgaacaaaaattcaggcctacagagctctgtataactgatctgtgaaagtgatgatggtgttcctgtaccaattcttgcttctgctttttcgtcgaatgaagtgttaaacttgattacttggcacagatatactcatgggttgcttagatgaagtggatgtttttgtgtgtatgtgtgtgtgtgtgtgtgtgtgtgtgtgtgtgtgtgttttgcattgtggggttattcttcccctactttggctagcaagtttgaaatatcttggcaaacttggtagtctagcgcaatatgcaaaattttcctctgtcggacatgagcatggtacatacacgatattgctcttcttttttcttgggtccacttgatttgtctgttcgattttatagcactttgttgatcgagggcttctcgaaatgcacagtagtattgtgataatattgttgctagtgttcacaccctccttttttatgatggttttgtatcacctattttgcagcctgactgcttggatgatttggcttttgcaatcatgcaagagattagcaaactgtcataccgggttactgaggaagatgttatccgtgcacgtaatcaggtatctctttgaattactactgatttgggccacaatatagtactatgcacttcagcttcacattctcattactttggtctgacttccagctgaaatcttccatccaactgcacctcgatggttccactgctgttgttgaggatattggccgtcaggtattaccaggttttagctatgtgatgtcacatcacattcttgattaatgccatccacactagcttatttttttcttttttctcagttactcatctatggtcgaagaattcctattcctgagctttttgcaagaatagatgcagttgacgcaagcacagtcaagcgagtggccaaccgtttcatttttgaccaggtaattgttattttgccagcatacagatatggcatgtagaatatttgattttctgtactactttaaatgatataatggtggtgtccaagtctgcctccaacgccgggccataaggtccccacacgaccacacgtgcttttgctttagatatggcattatatgcctaatcaactaactatgctgtaacctatatttttttgcttttgctatactactttaaatgatgctagtggtgctgtccgagtctatctccaatgccacaagctgacatgtggggccataaggtccccacacgaccacacgtgaatatgcttttgctttcgatatggcacttttatatgcctaactatgctataaactgtattttttttgcttttgcttttatctcttataatatcagttgcaatgcatggtcctttagctagtttttcatagtattaatatgctgaacctaccaaattttagtcacttgtatcatgtttttcatgaggcatgctttgttatggagctgccagtaatcctctctttcacactaatcactagtgataaacgcgtgttttctttccttaccatcctacagaatagtttactggttacttgtgtacatatagtttcaatgctatgcttttgctttgctgtgagcaacaaattctcattctgtgaacccaagatgcacagatttttaggagcaagtatttttggtggcttgggcaaatattgcgctttatgtgaagagcaatacaaacgttacatcatatgaacttaaattttgctcagtgggcaggaggccaatattcattgtcattatctctttttctcaggatatcgctattgctgcaatgggacccattcagggtcttccggactacaactggttcaggcgccggacctacatgctccgttactagactctccaaccgatgtactatgtttacattctgcaaaggcaagataattgcctcttttggcatcagtatattatggcctcgtccatgcacattgtgtgtgcgacgtggaggaaatttttttgagcaccattttccttgttttctttgtccaaaaccaacaaagctgtcaataatgataggcaaattcaactgacgtggcttacttgagttgccacccgttgtttctacgatgaatcgttacccctacttatccttttttttattgcaagattgctttctttttcttggaataatttgatgaagctgcttatgtaaagatgatagttttgctgtgtcgactattgacaactgcacgaggtgcgaattgtaccgatctgttaatctcttattgcctcttggagaaacttggctgttggttcgttgtgttgtagtatttgggaaggtatggcggtgaatggttcgaacgaggcggtaacagccatccatgtgtctccttgtgcggtgttcacgctccatcgccttttccggctgctctttttaagtcatggcgaaattgttgtgcgttacgtttccagtcacgctcgcacggccttggcgcttgagcagttggcatcatccgttcgccgggcgtcgcgacttggactgattctgtattaggttgtgtttagttccacgctgaaattagaaatttgactaaaattgaaagtgtgaagaaaaaagttacaagtttatgtgtgtaggaaagttttgatgtgatggaaaagttagaaatttgaagaaaatgtttggaactaaactcggccttagttgttcattggtttgtttacacacggtggatggcgatagagagtattgagatatactccctggcatttccaaggccaagacgacctaatatcccagtttatagtgaatctggaagagcggagtattatcttgtcttatctcattttttaagttaagatacagatcttatcttaatttttggtagcatattttctaaatagctaaacgatatattttatgcgaaaactttctatataaaagttaaattaaaatatcagataaatatattttttaaatttaaaataattaaaacctaattaattatatactaatagctttatcgtcctgtgtactcgtacttaaagatcctcgggccatggtgtccgccgctttaggacagctagttactttccgctctgcgcgcctgaaggcctgaaccaaggaggctcaggctgatcggatcggcaagaacggcaacaaaccgtctcgccgtccgctactccgatgtggatcttgacaggtcgtgggagtgcgcggcgcgcgctgctgtgccgccgggaggggaaggtggggtacaggccatgtttagttgtttaggtatgaaatttttttatgtatacggactcacatttaaagtattaaatgtagattaataagatttcgtttgtaaactacgagacgaatctcttaagcctaattaattcgtcattaataaatgtttattgtagtatcacattgtaaaataatggcgtaattagccttaaaagattcgtctcacaatttacatacaaactgtgtaattggtttttttttcacatttaatgttccatgcataaatgctccatgcatgtgtccaaacatttgatgtgatggaaaagttggaagtgggagtaaacacagcctttggctactggggtgcgctggtcacgcgtgtttctttttccccagcggcaaagctcctcaacaagaacagtaactcacaatttttgacttgagtttttgatacaagtcagttcaaacatgcaagaaccatgaacgctcagacttgcaaccatctcctccctgtcaaaatatacgaacagcaaaaataagaaagatgtttaactaatcacagccgttgaatagagatagatggataggattggagctaatgccaccctctgcattagccgaatccggacttccaatttgaagctgacaaggtgcagagtgcagtactaccccttttcactcgtgtgctaacagaccagacgattcagtgatacattctatcgtatcacaaacaaaacaaaaaccacaaaacatttccgagatatgcagggtatcgtatattcgtatatgtgcagaccaataaatctatcggatgtatggaaatggcgcccaaactattgtagcactacttctcagctggagttcaggtcttcaggagggccttgaaccactgcaccgagttcttggggtatctcttgaggttatccttgtagtccacgaagtagagcccgaatctcgaggagtatccggccgcccactcccagttgtccagcagagaccacgcgaagtacccacgtacgtcgcacccgtcctccctgcaacatcaccatccacggaggactaattaaggcttttattgtagaagaaaatatatatctacactttgaatgcatataaccaatatttgcaatgtgaaattagcaaagaatcgtagttgctgtagctttacttgatggaagcagccagattggtgaggtagtcattgtggtatttgatcctcttgctgtccttgagggcgtccttgatggaaatgaacgggttgttgctgtcatccatccctgaatcatcatcagctatacactgtcacaactctggtgtaatcttgggttcacgactgctagtttcatgcgcaaaaatatgggtaaagcaaggattcatgctcttaccgttttcagtgatgtacactggtgggctgttgtacctttccttgacatagttcatcaggctcctcatccctcggggcacaatgtacagccatatcgaatttgcctgcgaaacaacagcacacctcgtttcaaattcagtgtgacattgcaaaattcgcaatggtcatccggagtccacaagattaattctggtgccaaactcaccctatctccaattggcttcccattcttgaatgctgcaaaagcgcaaaccatcaccaagaaaaagaagaaatcagcatccataccattaccagaattatgggtgaggattctctaccataatattattatcattatagtcactggtatgtgggtcacacctttctatcgtagggttagtgtttacttcctccgtttcagaatgtaaatcattctaacatttcccacattcatattaaacatcattatgaatgtgagaaatgttagaatgacttacactgtgaaacagagggagtacaatgatagtgtcactaggtagaggatatgaaccctggaatcacactaaaaaccaagcacgaaaatggcgaaggagaactcacggaggctgacggtgccggtgtctgccaaggtgttgttgagcaatgtcccgatgatgttggtgttgttgtgcctcgtgtagtaggtggtgtagtggtttatgccgacgaaatccagcgcccccttgacgacggcggcctcatccgccgtgaacctcggcagcctctcccccaccctcgccctcatcgtcgccgggtagtcgccgaagaagaacggatcagcaaaccttccattgcaaacaatgcagccggtcaatcatactgtaacatgtgtgatatgttttccttagaaaaaaagaacatgtcgattcggcactgttcttttcaactcactaaaaatggaatacgtttctaaaaaaaaaaaacttttttgttgtattgtttagaccacttttttcaggccatctgttaagtttatcttttaagatatttatttacccaagtagataatccgcgacaataatctaaatcaaatatagccgaagtcgaagcagaggtagataatgactaatgagaagacgataagaccggtgtatgaaaagggaggtgaagagagcttagctcaccatcctagctgaaactcctgcgctctcttggccgcctcgatgtcgatcgtggtgttggacatcggctcgaaccacatcacgtcgaacgctatcccaagctgcccgttctgcgtcgcctgcgattcccactccatccgtatagtaagataaagatcgataatgggaagaacgcagcagcaacacattgacatgggaagaaattcagaacggatcagtttgtcaccttgtattttgtcctgtagatgctggcggcggcggcgtgggcgaggatgaagtggtgggcgacgacgtagggctcggtgccggagttgccggccttgcagtagaggtggagcagcacggagcagcggccgggggcctggagccctgcgtcgtagccctggatggccaccgtgtgcggctcgttgagcgtgatccagtgcttcaccctgtccccgaactccctgaagcacgtctccgcgtacgccgcgaaatcgtccctgcatttttggataggtacattcaccaagatggttagtgtacttacttaattaactgaaactaccactgggattagtaattctgtcatgaagattgatgctggattagttcaagtgtaagttctctgcatttttttgatacattcattcatcaagatcgttaatttctcctacttagttaactgaaattgccattgggattggtaactctgccatgaagattgttgctgggttagttgaaagtgtacgtttttggtgttttcaggtgtttagtgctagcttcgaggaatgatcttaggtgcttgtaggatggtgttttcagtatgaaccctttctttagttgatgtgtatctcttttttatcaatgaaatgaggcagaacttcttcctttgtttttttttttaaaaaaaaggaaattgaattgtaagtgtgtaactggttagttaattgagggagacgacactcacactatctgcctgtcaagccagcccttgtacttgtcttcaagggcctgggggaggtcccagtggtagagtgtcacatatggctgaattcctgaaagattgttatactttttcagcaaattcagaagctgtcaagatgacctgaatttatcactttcaaatctgtgtgctcaccttttgctagaagtgcatcgatcagcttgttgtagtggtcgataccagcttgattgacttgaccaacaccatctggagtaagcacgagatgatgcaaaggctaattagaatatggggacagaaagtgcaggtaaaaatttctgactgaagacgcagtttgacatcatggtcgacttcgctagtttctcagttggagaccacgtacttgggtagattcttgaccatgctatcgagaaccgatacgcatccatccccatgtctgccatgagctgtatatcctcctgaaaaaagcatccatttcgtaggctacatcgattatattgtgctcattttgcaggataaatggataagatatgaatacgtgtgcacttgatctgaaagatagagagaatcagagagagtggtgctcacctcgaaacggtggtactgatcaactgcaacatcagcattgctgaagtcggtgatctttcctgcacaaaaagatgagaaataagcaaaacattagcgttacggtagtgactagctgcaactactagtcctgagaacacctggttaaggttaaagatcagccagtattacgaaagatgaacacagatgccaactaattcttacccactaggcccactatcttaagctacatgagcactaccttagttatccctactactgaattacatgtactactaattatgaaaggtaggtgagatctagtatcaaatagcacaattgcggtcttgtttgctccattatccaactttgggtgaagaaagttgcgacaagcttcaagcactaactatactgtctatctaggtaccatgtctgcactctgcacaagagacgagatgtacaagtggcacgatccaatgattggattctccacaaaaggggagctttcggctttcgtattgcagttttaggctatatttgaaagatattctgacaactacagcttcttataaaataaggaactcacttaatagtatagcttttcatttagatcttaggaagctacatttgtagaatctagaagagctaaaagctgaaaaaaagcacaacctttttagattgacagaagctgactatccacgagttgtttattaaaatcttaagctctcctcaaacacacccctagtgtcctataataaacgtgttcagaaatgaaatcaccacgaatgtgcttgaacttgataggtataagtaggagtatttgctttgcagaaacgccctaatttgatatgacgacaggcagattaatctggaataaactttgcagtactgagaaaagaaaaacgtgtagcaatacgtacgtaccaaaggtgtgcgcgaacgtgtcccagatggtctgccctctcccgtcctccttcacagctccctcgtactacgaaataaaaaaaaacaaaaacccactgtttattcacatcaaaatacatacacgaatctgaatcagactcacagtgctgctatttgcatggtcgcgtcggtatttttagcgtagcgtgtcttgtcgtcaaacgaacaaaccaactgaatctggttaccgtacctataccgtttccaaactaatataataagtaacaatttttacaaatatttatcattcctaaaatttagttttttttaattctatcaatgttacattgaaattggcactaaataattaattcataatataaaaatatctcaattattttcgatcgtttttataaaaatgataaaataatgataccgtttatgatcatttccgattgttttcgtgtctactctggtcaccaagcagagctccagggggtttctctccatgctggtgaagatgtgaggatttgttcagagctttcaaatgtgcctattccctcagtaaagaaactttacctcaaaaacttcaatgaccgccttcgctgtgtgaattggaagttcatctggtgcaacagagcacctctaaaagtgcaattttttgcctggcttctagcaaaggaaaggttaccaacgaaacataatctaattaaaaaaggaatcgtttcctctgctacttgtgacatctgcaaccttgaagtggaagacggaagtcatttttgtctaaattgccccttcgctcaaggcttctgggaggcaataggtttaagccctcgaatacacatggttactgatatggccaatcttaaacccgatgggaatctgcctgaattgcacttcagggtgttctatctgctatgtttttggtccttgtggaaacatcgccatgacgttgtcttcaggaacatgtccccgtctctgcaatcggttcttcgcaaatgtatggaggaatgtggtctttggctagaacgcctcaaatttgagcatcgctctgtaataacttcttggaagcttatcttttcggctccacttcaaactctgacgaatgtgtaacaaactttgtagccctcctttttaatgaaaattcaggtggggaatccccccccccccccccccggtgacttatctaaaaaaatactctggtcaccaagccttctcttccgggcgccacgatctcacgatggccgcgccgcgcgcgcgggagacggcgagagaatgcgtgagaagctgggcgccggcgcgccgcgcggcgcggggtggtggtggactgggcggtggtgtctcgcggcgcggagccagccaaccgccaaggcgcccccaactactcctggtccgcgcgcctctggcgatcgaattcgcggtaggccgcgcggggccagggcccagggccacgtccccccatgcgttctcgtcttctcctcgcaagcggacgcggcacgtgaaccgctgctggtggtggaggtggttccgatcgtttccgcggaattttccacggaccacggccaaaaccgcctgcgcaacggcgagcgacgatcagacgcaacgcacgcacgcacgctgcgcacatttttttttaagaaaaaatgatcaccttaacatgggggactctgggaacatggtccaatgttgttccggtttg

SEQ ID NO: 17162 - DNA, 14563 bp, Oryza sativa
  unsure (1)..(14563): unsure at all n locations
cactgcgttatanatcatatgctcgcatgcctgcaggccgactttagaggtatccccaatccggccaagacgagagacacacataaattccagaaacaaaagcaaagtttgtttcttattccatttgcacttccatccggctatccccccttaatttggtaactaatcatccctgatcaagtcgtacgtacgtgtgttcaaccactgtacgactaaaacggcaaaaaggatgaacaaacaagtttgtctctgaaaccgaacaacagattctccacaagtttatctctcaaaacaacaatgggaaatccatccgtgactaacctggtacgcggcggaggcggtgccgaagacgaacccctcggggaagctgcccctggttagccctcctccgctctgctgcgcaatgcatcctcgcagcgacgacgacgcgacgccgaagacgacgacgaggacggcgaccgcctccagcctcgccgtgctgcatcgcccactactactctttatcctccccatctcgcagagagaaggtacgggagatcgtggtgtgtgggctccaaactgcacggactgatggtggatgatgagatgagatgagtatttatagcggcagaaatggaggcatgcacgctcccactaataaccaatttttcgcttgggatgtgatctctctcggtgtgtatgtatgtagtagtgagctcttgctttaagggatggaagtgtgaagcgtggttgggactctatcggttgcctgtgaccgtaatggtttattagtgattaaaacattatagataagaacttttacaaatctgtttttgacggcttaaaaaactaatggttattttaccatccttgagaagatatctagagatatcatattttatagtgtataatttgctacctctaaatactaaaaattgtagtgtaaaatttaagtaccataaggtactttattaaggactataaagtttctcaaaaactaatgatgaagaaaaactacgttagaaaagcattgatccaaatcaagttttaaaatttaaattttggcaacaacttataagtactagggtagacgatgaggtcctttggttaggtgagaaatgaaggaacagcgaaagtgtgggaggagaaagcattctgctagtcctgcttgcatgatgccatgattgatcagtgatcagtgttattattggggaatcaaacattttaaatttgtaactactatgaaatggtgattgctgtttgattataacatgattggcgtgcttctattggggcatcaaattaatgtattaaataagtaccatggaatggagtaaaaaatggataaatttgagatcagggtacgtatttataacaatttttaacagtgtgctatttttatcctagtgcactagccggatgaatgaaatgtccattatctagaaaaaggtgtactattttagtatttttatccactatttgaatgcatattatctgtgaaaaaaaatcaatgctttctttcggcatgtaatgtttttaacaggatcagatagcatggatacttgtgaataggcaggttaattggagcaaattgaccagttcaagtatttaaataagcacaaatcgagccagtttttaggggtttgatcaccttgcctgcatgcggacatctgttgaaaaggactgcgtctgcattgatcctagataaattaaagacgtgaataacatctgcatcaacgtggttcagatttacaaggaacctaatcgcgtgtgttcccctgtctactttcagagagtttggcatgttccaaggttgtcatgattagttcgttatcatctcgcatgtttccaaccacaaaccgtgcaatttgccgcaaacaaatgcacaattgatacagatgatcccttgcacgtacggaccatcacaaaacgaatacatgggagtggattctaatccctcgagaggatatcccctcgtatatctttttcttctaaattcgatgtaaatagttgtgaaaaaatctgaaaaaaattgacaatgtagagtataatggtacctactagtccaccaaaattcatgttcaaattcgatctacaaatcaagaaacaaaaaaaaacaaatttagatataaacagtacgctactattcatacgctgaatttgtcttttttatatctcgacgtttgagttgagtttggacttaagattttgtaaagttatatatatgtgttgtatgaatgttgtcaaatttttccagaatttttcataaccgtttagatggtttttgagtaaacgagggaacatcccctcgagggattagaatagtttccccgcatacattgcctccatacttgtgagaggcactattgcatcatatatgcagttctctatatatcaatataattgtctgttagcttatttctttatatctcgctttgctttggctgcctccacccaatcatttgatttcgcgtcttagtttgccagctcaaatcaatctccatggtgcatgtacacatgcacagatcatcagtgctgaactgctgatacaattagtaatgtactgtaccagtatagaagtttctttttcagatatatgcgaacctatcgatatataatatcggtgtcatgtccatgctcgtctcgatcgatcatacagatactacaccggaggccagctggctggcgctatctgaaccatttcatattcttgtgttcattctgaatatatattctgaatggactcgatgatgatctgaaccctcctttttctgagcttctaccctaggactaggaacatcagactggaagttttgaaggtttgttgtgtgaaacgacaagtgttgattgatacacgggacatgggggggcgaaacgtgtaggcgctcgcgactccactccactcttgcgcatctctcggtcgatctcctcgtgttggtcgccgtctccttcatggcgatgatttgctggcctcactggaagtacgaaatcggtgtgaagcggcgagcgaacttgtaggcgactcatgcacgcgtcagatcggaccagacctgacctgacctgcagcggattaatcctccgtcccaaaataacccagatcaatcttaacaaagcctctgtttgactacacttatttccatatattgtgtgacagccaatagccactgtgtttctttatgcagctgtagctggtccaaacacttattaatattcgttgttttaacatatatcaaattcagagcagagaaaagagttatcttggaacgaaaatagtagagtgtgtttacaccaaatttgtcacctataaacaaaataggggaaaattgccaaagtttgaaaagtgccgggtttccttcacagggccggttagaccgcaggtatgtgggcggtctgaccgcggcctgaactctagtctgaccgaatgtatgtggccggtcagatcgtcagggtccgagcccgagtctgttttcgtcgggtttcggatttccttacttgggaagacatgtttcgggtttctttggtttctatcccgagttggacatggaggtgggtctgtagaggataagaccaacctctatttaagggacaaggccggttcaattgtaatccctaaacacacaatatacttgaatcgccttttcttttatctttacttttcagttatgttttccactttaccctagttttagtccatctttgtcaatttgtgccgtaaatcgtccgccgccgctgcgagagtgcgacacctctttgtaggtttgtcctgaaaatcttccgatttgcccacgagacgggtagttatcctcatatcaatctaaatcggcctagatgctgattttgatctctaaatcggctccgttagccggtttagctgttttccataaaacccatcttaatttggccgggggttccgctagagtcgaggtggttggtgactccatatcaccgcaaggcgtttaagtgctgcgatcgtgcttatcaacttatcatataaagttgctaacagattgtaccgagtactttcagttcagagattcagaaacaagctgtgtctcggtctaagcttgtgcgcttccgcggctttcacattcgccgcaagcgagttgcatgcactgcattgcgagtcgctggcgtgcgttgcagtctgaataatttgatttgtgggagtatactgcactgattgcgaccccaatcccgaccgaccttagctggctagtgtatgtgcttcggttcttcgattcattcctgcaataatgtttgatcatgcatagtgtgaacgacacctttgtcatcgtttaggcgttgtgttgttcgtctcgtcttgtttatgatatgatgaaatcttcgttcacattcagaaatcaaattcagagcaggcaatgcgcgtgccggtgccggtattcgttggtttatatattcgacaggcccatgataattaattggatcggtggagactggaactatgccgccgaacagctgggatactctgtgttactactactgatgatgcagaagcaagaaacaactgactacagaggcgagaggggaatttaattatttactacttttagctttgtcacttatccaaatacccttttagatttgcgcttaataatttgtcaccggagagaggtgagttcttaactatttctcacttttgcctatgtggcgtgcccgcgtggaaaatagcgtggaccccacccgtcagcccctccctcaccttcttctccacctccggtcgccgtttctctacctatcaggtcgagatccgccccgtgggggaggttgggcgggcgctggtgccagcgcacaagcttgacgcggtggagggaggcctaccagtgcggtgtgaggttggcgagcgtggtggggtcgcggtagtagacagtgagcgaggtcacctgtaacgccgcgcttttagtgggacgttaaaaactaattcggcaaaatcctaattgcgaaaatttcgttttttgtgtgcgagtctaagtcatgccgtggatctcagtttaaatccatcattgttccctctcgtcgccatcaaaatcctctacctctaaaatgttaattccgattcaacttcctagatcaattctgaaattcaaatccttcctttgaatcctcgccaaatacttctacgaatccagaattattcaaattccgcctcgaatccttcccttgacttcaccttatgttcctagagtcaaagtatcatggttaaattccaaaatccttctcaaattctctccaattcaaaaacaccctccaaatcagttccctcggaaaaagtctaaattacgtccctcttggttgtgggccgtttctcccttgctcggcccattctctcctctcgggcgctcctcctcctccccgcacgtgcactgcacgcgccgagagagagaggcagcgcctctcttcttcctctctccttcctcgctctctctctctctctctctctctgcttcctttctctctctcctctcgccgcgctatgcaccgtcgccgtgattcgattttcgccgccgccatttgaacccgccaccgcttttggttcccgcgcacgcgccggtcgtgactgaccgcccggtcgccacctgtccttgccgtcgccgtctgtcgccgagcaccgggggagccggtgcgtgcgtggacgcgtgacgaggagcttcaggcgccacctttcctcccttactactcggccgcgcaccctcggtgccgcgtcgtcccgcccgcgcgaccgttttgccgtgacttcattcgtgccgtcaacgccgctcctctcttgtggtgagcttcccaccgtgttcttcgactcgatgaatgcagtgtggtcaccctcatgctctcgcgcttagacgccgcgccgcgcccgtcgccgttcgccatagctcgccgtccgccttgccctgccccggaggtcgctcaccgtcgccatgacttcctaggctagctcgtcgccgcccgtcgcttgaaacgagttcccggaaccgtgtagaagctccttccccggtgaattggacttccgttgccccggcgagttttccccttctctcggccggcaatggccgccgctgcaatccgccgccgtaggcccttctcccaccgattccttgcgccgtgaccctccccgtgtccccttgaacctccccggcgagccgccgaggccgcccgcctcgccggctgcgcccgcgccgtgccacccatcccgccgccgcacggctgtcgtcgccggccgccgtcgcgccacctctccctcatccgagccggtgaatggaaccgccttgattccctctcgcttccggtgcccgccgcctacgccggttcgtcgccgttcgccggcggcgttgcgccgtcgtgagccgtccgatcccgggcagctcctcctctctcctgcgcctacgtggaagtccacgtggacgccacctcagcccacccggccccgcttgacctcggtcagccgcctccctccgttcctcactcgcgcgcggggtccacggagagccgagaggctgcgcgtgggcccgccgcacaccgcatccacccgcgcgccgcgcgtggaccgctttcccccgaaccctagcgccgccctcgcgtgcgcccatcccaccgtgggccgtgtcaccaataagcgggccccacccgggaccccgcacggtgcaatcggtccaccggacccgcccccatttctcccgtgccctaatgggccgacttccgcgctcgcccggcccaatacggctcggcggagccgcgcaagccatcgggccgcgccctaagccgcccaacgaagtctgattcacgtccctcctttatttctttccaaaaaggatttaataaatcctttttcctttagacagaaattccttaatccttccaaaattcatatctcttgatccactcgtccgaacgcctccgttccacttccaataattccgtaaaattgagatctattcaatggcactattatttagtctaaataggatattcttttggtcttttgtttaggttttttatcgtttgcgtatagtcgcggctaccggatttccgtcgatcgtggatttctcgaagattcgtgaagctccgtgaaggccttgagcaaggcaagtcaccctttgaccaattgctcctataattggaaaatcattactattttgtttgcaagttgcattattagaatcactcacgtttaatttgcttggcctcggtttgtgtgccaaaccgacggacctacccagtagtcgcgctaattcctgtaggccatactaccctgattccttgtcgctccacttttgtggtacctcggtatccgtgctctctgagcgcgtataccaaatatcccacatacaccgttgtttgtcgaaaacttgggaaatgggtttgagaagccttgaaaacccgacatgtggtgtcggcgtgtttgaaaataaaataaattgtgaaaactcgcgatgcgggggttgtgcctatgtggcactatcccgtattcgcatataaggaccgattcctgtgggaaattcatccgagcatataacaagtgcgaccacatgggtgcaatgggacgcccctggctgagtaaatagcaaaccagggaagtcttgatcccaagagacatgtggattcaacgaggtggtgtcgggtagaaccctcgggcttcctggcatagtatggtatgggacctaacctgttgtcggtctgggacccctctcgttggcatatggcaaccctgtgtcggctttcgaaatgccttatcatgaaagccttagggtctcccgacgtggctgatctcacgggctgggtgatccgggttagtaatgtcgtgtgggtaaagtgtaccccctctacagaggttaactaactgttcaaacagccatgcccacagtcatgggcggatgtgaggtgtttcatgtagcgtagatttgtttgcttgtgctttgtgaaaagttgttggggtgtgggaatcgttatcagaatcagcctatgtggtagatggatgacctgagtggtcaagaaacgaatctgtgtgattcgggatgtctacgagcattatagactaagcttcccgagtggaagcggattgttgtgctgctgggcagctggactctaagagtccgagaaaatgaaaaggctctgggagccgattaatcaagtgaaatggctctgggagccgagaagtaatgatctgacccgggaggtcggtacattaccaattgagttgttagaaaacatctcttaaagtcgaatcgagacgcaagtctcttttcggcccaaaagagctgttgaaaaaccagggtttcgttctggttcccagccgtcgcctgtggtgttgggtgttagtccgttggttccgctgctgctgcttctgttgttggtgtttcctcgtccgtgtcatcggttgtattctcgggctgttctgagctgcaacctaagttaaggtaaataagtcctctatttattataaggattgcaatgattcatatttgtcaccgtgggtaccagcgctatgtcctgggactggtactgagatcgcggttttgtaggaagcggttcgcgccatttttcttacgacacgctcctgtcaagtgccgttgtatggcggtgcccgattagggtgtgacatcaccgccgggaagcaacctgcaagatgggtggcgatggaggcgttctactcggagatttcctcggggtggtacaggttcatccccgacgacgttgacgacgacggcgtgccgccgccaccgggcgagacgaaagagaggagcgggtgcccccacgacgagacaagcgagaggtcgaggcggtctagcaccggaaggagaacaccggcgagaggaacaagaaccctggcgagctaaggtggaggagaaaagacagtcggaggtggagaataaggtgaggggaggggctgattggtggtgtccatatcgtttttcacacgggcacaccacgatgcctcgccacgtaggcaagagtggcaaatactcacatcccttcctaggttgagtttttttggacggagggagtagttaaaaaatcacctctctctccagtggtaaattattaaacgctaacctaatagggacatttggataagtgataaatctaaaagtggcaaatagttaaattccctgaggcgagaaggcatgttccgatgtccggcgttgaatgtgcccgtgtgtcatgtcacgttcccaatcgagtatgtgaaactgaattcctttagctctggatctgaaatgtgctgactggttatgaactatctcatcaggagacaaactacctgccggcatgggcgcgtgctgtgctaggaataagttcacttaccgctttcatcttaaggttaaatttatttagcatccttaaaccatgataaagcccaatcaagtcccagcgttcgatagttagtctgtgctggttctctctgatggaatgagaagccaaggtggcaatggccgccgtcgtctcactctggcgccgtcttggacaacttcttccaagggactagcagctagcctttcgccggcgaagtcctcttctgaagaatgtgagcgcgcttgttttcggcttggccgcttggtggaggcggcggcggcttctgcgacaagaccaagagctgtgcatggatcgtccgctgcgtttgatcaggtaaatgaatacggtgattcatcgggatctcgtttttcgattttgcaggatgcgtctggtgacgattccggtcatagtttggcagacttggaaagtgcggtaaaaccctggagcggtcctcttccgtctccgaggaggtcgccaccgagaacgttggacgctatggtttcttcagctctgcaaggtaattttcagagcaacacactggcttcggttttgggcacagttacaaaggtgtgaggatgatggggaatttctaaaggtcgcatgccgcaggttggagtcgatggttatgcaactatttgccaattatgggtggaggttcacaaatagacttcaataaatgtgttctccttattttggcttggttacctttgtttttgtttggtgtgttctttttatctgaactacactctcttctggagtgctactttgtaataattggctgtaactctttttcagcaaaggctggaatgttatattccattatcttaaaaaaaaaagtcccagcgttcaaaaaacatggtgtcctcctcctcaaggtgagctaaagctgaattttgatggatctttcttcagtgaaaacaaaactggagggtggggttttgcaatccgggatcatgcggggagtgctgtgcttgctgtgcagggaggattgattcggtgcaggatgctctaagtgccaaggctgttgcttgtttgcatgcgttgcgagctgcagtagatcatgggttctcgcacatttttgtggaggcaggctctgtcaccctggtgaatgccttggagtcttcttactgtgtccgaactacggcgggtgtcatcttcaggcagattaaagcgatgattcatttggattttgttatgatcacagtgtcttttactggtcgctcatgtaataactgtgctcatgaacttgcttatcaaggagttagttgggacccgggtcatatgtccatttgggctgaccccctcccagattttgtacagtccctggtggtttgtgattacactaaaccaatgtgataataaagagcacgtttcctcaacgtgaagaaagggaagagagcagataaaaaaaataaggaaagagagggagaggggtatatgcgagattgaggtaaaatagatggagacaaggatttttatataggtccggaccccttatctgacaggtaagagctctacatcctgttggtcgaagccggtgtattatctatgttgatctgcttccccctctccttctagggggcttgtatttatacccatagatgccccattgtttgagtaaaactagtgagaccaatatggatacaatccgagtagtcattgtcgtttctatatagaactttattcgtcattccttatccgaaactccttatatatacgaggtataattccgtataagacttggtatgtgatgggccctgccgagcttagtcgattactattgagtatgtggtatccatgaccctgacaatatgggcctcatatgtttttttttttctgctgacatgttatgttggtgaaaccattcatctatattgtcatgggacctgatttggatgattttacttagacgagaggtgaacattttattgtagtttaggaatgcccattaaactcgacgtaaatacgagggatgtcaagtggacttctgctactgctgctgcccaacgctacctctctcgacgttattcgagatgggccataatgaggtccagcaaggaaggaacaacagttcaattgatgggccatggcctccaggatcccgggacccagcggtatctagttgatcaccgcatatgactcatttcctcaatcttggttgcgtcaaaatgtgattatgatgcattagtgatttgaaaggggttctttggcaaatgtggtaggaaataatattccacttattaaagcttgacattatatattatccatacattcttcccatatattttttcctctttttttggcaaaaaagtagagagactctaccttgtatccattaatgaaaatggtgtgtcaaagagtacaggccaagctgccaaattcagaaagacagaagaaatactgaaaataatgggaacagaatgtaagagaaagtaagaataatcacaagagaaaaaacaaaagaactaaaacttgaaagttaaggtgtaagacagtttagctgagcttgcatgctcagttagtaatgtgcactcggaagcttggtttggctctgttttcctaggttttgatgtcatccttgattttgtggagtaggtttgataatgtgcagtttttttgctgaaacacattgtcattccagcacaagccgcgaagtagattggccatctttgtccttttttcgaacggctcacctaatttaattttgttctaaccgttcacttagagttatattatttcgcctatgcttataagccaaaatttaaattttcgtttgcaaatatgtcatttcgtttattccacgaataagcgaaacgatggcccccgttaattatttccctttctccaatctcttacagtgtgcatttgcgaaacgggatctacagtgttaaatagtcactcgtttttttgcacggttggagaagtctttgggatttttttctgtttgagtcggcacgttttgggctttcgcagagaggtgaaaatcaattgctatcacaccggcacacgaccaatgttgactgagcccactctttgtgactcgtttgcactagacaaaatcagggagaccgagcatctttcacccctgcaagttgcgaaggaaaaatccgtcaccctgtttctgaccaactcttcgtgttctcaccgggaaagaaagagagcaacagctaaattttatttttaaaacacactgtttatagtttagtagttcgtgaaacgtgaacctataaaatattacttcatttatcctataatataagacgtgcacaaattacaatatttaactttaaaaatattttaccaacaattattataatataaattagattttatttgctaaaattaatattattggattgacatttaaatttactttaatatgattataattttattgcaataaaccttatagtatagtatatgagaaactataaattaaagaagattagttttaaagactgtgctgagtttgaccatatcttatattatgggatggagagagtagcagcttaaaaaaagtaacgaaaacatacaaacattttaaagcgtcgtctcgagagctttgactgttcgacaagtccaaatataacaattcagatcctctgttgacatgtggagccgagggtatgttggacccatatatcagctattgaggaccctcactcaaaatataggtgcaaacatctcgtgaaaaacgcacaacaattttcacaatgggcacgtacgttgagttagaatctgatggccatgatcaaaagccagaacgaacaaaaacgcctaacaaatctttcaccaaaagcacccagctcatcacgttatccgaacggaaagatggtagatatgagagatgagagaccaggtcatcgccaaaaaccgtaaaagcaaaccttgtcccgtgcggacacccattccccccttcccctttctgttagacacccgccttcacgtcacgggagcgcatctccaccgcacgatccagatccgacggcctccacgttccggggcccacctgtcagtgagcgccagcgtggaggagggggcacgcacgattcgtctcctccccatccctctaaacccctcccctcccccccaccacctccgccttgcgcgttgtttcttctcctctcttcgtctctctctctctctcgtcgcgttggatttgacgagctcgtcaccaccggctgcggcggcgaggcaggcatccgcactcctcggcgtcgggccgtcgtcgttgtccgctacctggtagatccgcgtgttcccttcctcgtcatgtctcgtgtctggatctcgcggaggcgatgcgtttcagattcagtggcttgtcgttagaattacgtttttgcggcgaccactttttgatcggtgaaaaagcgggaagtgggtgttccggtggtggattcgtgctcagtttggggatttttttttgtgggggctgatctgggtgctacgtgcgcgcgtgtgatggaacgctcggttggtcgtgcggtgtagatgtaggcctgatgctagcgaaatttgttctagatccaagctggttgatccatgaggattgctttagaaaaaaattttagggatgccatagttttagtgggacttcatatttgtcatatgagcgttacatggccagcagccagttaccctgttcatttatcgggcgtgtgattcatctatgcatgttgtcagattgacatggaaagcgtgtcatgtattcattctgtgattcatatgatggatgcggatcatcagcttccttttgtgcagcccgggcctagccagagttatctttttcaccgaactgtttcaatcaagtctgcatgaggaactgagaattttttttattattatttcattgtgatgtgatcatattgtttgatttcaagttcatgcagctgaataagcattcatgtttgcacattatttaagaaagaagcctattattgttcatgttaatgtgggtttccattttttttttcaattgcgccctcctgtttatggtgaagaataacttctctagtttgttaggttctattatgattcagtgttttttttcttaaatgaagtgtgatatactgtctaaagtctgaactaccaagtttgaaatttttttacaagacacatgttttataattttgtgtgcattgtacaaaatcttgacctatttttttgcttggtcacaggaaaagatggctggtggctttagggtattgcatcttgtcaggccttttctggggttcctgcctgaagtacagagtgctgataggaaaataccatttag

SEQ ID NO: 17163 - DNA, 1087 bp, Oryza sativa
  unsure (1)..(1087): unsure at all n locations
aggggcttcttctcggcnngcttccgtggcgccgcacttcggaaccggagggagtccatgatgccaaacaattcggcccaccacttngtaagccgccggcccacgccggcgggcgcggatctggatggaacgccgcccggcgnccgcngcngccacggctnggagctctgcttccgcgtgcagtgcagggcacgtcgcgggcttctgctcagctcaagacgaggagactggtggagtttctgcttctttttgtcagactcacgtgtgctaatgacaatcggactagtgtgcatcgggagggacccactgggtagacgctcgatgataaaaagcttcttctatattctgccaggaatcggctccaatttcgtgaaattactgcaaaaatttctccattacaaattcggaagagattcagaagcccaatggacggcgctttgcagcaaactgtattactgtttttgaatgaacaaaagaactgcgttgtactcgtgctctattcaatggaattgatacattctagtgccggctcgttcattaaaaataataataaaaaaaagaactacgttgtaattgcatttggatagaacaaaatgttggaaggtacatatggtatggaatttggggtgcatcagttaggtccaaacatgggctttgaagacccagaagaactactgcccaccaacaatcctggtttccaacacccccaaaaaaatactgagtagatgaaggatgatcagtttccttatctcttctacgcttgtaaacgttgaaacttggctgacattgcatttttcacacttatattcgtgaaatgaactttacttgacggagaaatcagaaattcctctggatcagtcctacaaaacagggaactacttcaggccttcagggcttcatgcagcttcctcaacttctgatcttgtgtccattgacaggccggttagttcacgggcatctgtatcgatcttttcgttgaaatgatccctgaggaactccactgccatgaacctgaatgcagatgcaggtatgtaccatattattctaggaatgctccccttgaacaagccactcatttcctcattag

SEQ ID NO: 17164 - DNA, 725 bp, Oryza sativa
  unsure (1)..(725): unsure at all n locations
atatgcaatttcatgtagcatacatgaattttaaggtaacagacctccaagtaagtgggcagggtagcagataggccaacaatgcgaatcattgattgcatagactcaccctgtaagattcagattattcataaatataaatcaagggtaaaagacaagatctaaacaagagcattcatgatctaaagacttagtcatatggatgcgtaataaatttcaagcatgtccatcttaacagccacaagttttttacagatcattcaagtttaatttttgccatcattaagcataaggaccctttccacatcaaaaggaaaaggagaaggggctcctttaaaaagactgacctggcgaagagtccgagcaactagcgcctcaatgactgaacctctatcatcatttagcaagtgcacctcatcaatgattataagcttcaccaacattgacagtgacatgtcactgcttttccgtgtaataacatcccacttctcaggagtagtcactatcatctatggaaagcaccaaatattacagctcagacctgcaactgaaaataatgaaacaaagttgcatacctgtgtttcttcaatctcatttttggtcagctgcatgtctcctgtaagttctctaacaaccaggttcaacggagataatcggcgactgaatgtggatgttacctctgcagccaaagccgggtnccgaggtaagtcgcttaccnggcacca

SEQ ID NO: 17165 - DNA, 605 bp, Oryza sativa
  unsure (1)..(605): unsure at all n locations
tgggggncnnnnattgtagatcgtgcttggtacccgcgtgcttttttaaacctcaaaataaactgacacccataccattctctcgagcttcagaactctgtgatttgtttgaaagaagtaataaaaaaaagggaaaggttggtataaaaagcattaagataatgagtgtacaagcaaagcagtgaaaacctgaacaagtggaggaagctgataatgatctcctactagaacaaactttgttgcaagcatcaaaggtcccagagatacctagtgagtaaaatattacaatgtgagaaattataaatggtataggatgcaagactctttagaaaacaattttacagatcattctggtttagcagctttgaccaactaatgtagtcttgaagttaaatgaggaccatcgcgtggatttttgtggcttccttcaagacttgtaccaagcattcctagtttggagcctaccggtaatgtgatctggcctgcctcatccatgatacatgtgtcaaacttcttatgtgctagtaaagggtgataaattcccaaacaagtgactccaacaacttgcacttgcttcattctagctttgacggcatctactgatt

SEQ ID NO: 17166 - DNA, 1229 bp, Oryza sativa
  unsure (1)..(1229): unsure at all n locations
aggccccaatcccggggttaattccattggagatttaaaggttagggcaattctttgaaacattttccagtctttggtttaaaccttgcccaaaaaggattttaagttaatagcccctggtggaatttgggggtcccccaagcttggcccaatttttcgatttggacccaccgtattggtatgggccgccctcaccatgaacaaggtgaaacttctaatgggcaagtaaaggttaataatcccaaccaagtgattccaccaattggccttggtccattagagcttggacggcatcaccgatgggaaatcggtngtggtcaaaaaattaaatatcgaaccacatttcttcattttaaaagcacaagtagaataatgagaaattctaacttgacaagcagtggcctttgacatcaggatgtacagcttcatgccttccaattcgaagaaaatctacaccctatataaatggcattagagcatgttcatattttgatgatttgatttgttgcgctacaatgctcaagccaaacgttgctcattggaacaatgcgataggggaaaagagtttgttcatttgaatagtacagtgagacagggagttatgactgaatttatgaaaggaagtattgcgaacacaaacctcagccttcaacttcataagcaaattatctatagctgaattggtatatgaggttagcaaaatagattcccctctcatcaataatgacttcacggcatgcaccatcgtatatgttttgcctgttccaggcattcctaggataagcgcataatcttttgctgctagaatctgaaagcaacatagtgtacgctttacatagtgacattgaattttcagaagaaaaaaaataatgaactaaagaccaaagatttactttatgcagcgatctctgttggtcattgttcaaatttggcaatgattgtatatatgatagtgccggatcttgacttaggagtcctccactatcaaatctgggagcctatcaacatccaaataaggaaattacagacaacaaaaacagtatggagaaacatagcacgaataggctagtggacgaacagacctcgaggtcaacaatcaacttccttaggtgagagttttgtggattctcagcaaatagttggacaaggttgagtctggcaacagttcaaatacaaactttatttagggtgtacttagagtgactgcggcaacagattgtatcaagcct

SEQ ID NO: 17167 - DNA, 655 bp, Oryza sativa
  unsure (1)..(655): unsure at all n locations
cccgttgttgggggcataggtcttcaacgaccggctcgctttcgtcgccgcagactggtgtcctcgcntgcacggctggcatattatgcccccgttgttgggcgcatacgtcttcaccgaccggctcgcattcgtcgccccgactggttgtcctcgcttgcacggctggcatattatgccgccgttgttgggcgcatacgtcttcacagaccggctcgccttcgtcgccgccgactggtgtcctcgcctgcacggctggcctattatgccgccgttgttgggcgcctacgtcttcaccgaccggctcgccttcgccgccgccgactggtgtcctcgcctgcacggctggcctattatgccgccgttgttgggcgcctacgtcttcaccgaccggcttgccttcgctgccgccgactggtgtcctcgcctgcacggctggcctattatgccgccgttgttgggcgcctacgtcttcaccgaccggcttgcctttgccgccgccgactggtgtttccgcctgcacggctggcctttatgccgccgttgttgggcgtctacgtcttcaccgaccggcttgccttcgccgctgccgattggtgcttccgcctgcacggctggcctattatgctgccattgttgggcgtctacgtcttca

SEQ ID NO: 17168 - DNA, 1153 bp, Oryza sativa
  unsure (1)..(1153): unsure at all n locations
tttgttatcgatattcgtactcggnacccccgtgctcgccgcgctcttcggagcccatcggcaacacgggtcggaggaaaagcgcagtatcaaggagcggaagcaccgttcttggctcgcggcgatcatggcaccctggggcccccggaagaaggatccggccgtcgcgtcgccgccgcggcactcttgccacgtgatcagcaaccgcgggctctcgccggcgatgaggtacgccgacgaaggcggcgaggaggggagctcgccggcggagtcgccatggcgaccttcgccgatgcggaaaaccccctgccggcgcagaccgggaggcgcgactggggccggcggcgtctcgggcttcgccgtctgcatcagcccgctcgttcgtcccagcccggcgcggcaccaccgcgggggaggccacccgccggacgccgccgccttctccggcgagctggggccgtcaccgctccaccgcctttcctccggctcctcgctcccccactgccggtcatggaagctcgccgacggcggccgcttccggtgatcctatcctttattaatttttttcccgcgctccgacattatttatcccttttgggaggcttttcttttttcctttttacctttacgtgtaaactggaaaagaagaattcatcctggccaaccacgagctggcaagctgtcccactgacatgtaggcaccgacgtttgtcaaaggttactgtttgtcagttgaacatgttgcaagccactgtaaaaaaaaaagcttcttgcattatctatgtacaggattactcctagcttttaaattattttcaagatattatttctttcttgtgtttgagattcccaagccaatagatttagttgtgtgtctggcatggagggaatgaagccatgtgagcggaattgaatgtgagcgttatgaattgaagatctgaactctgagaactaagtactcctacttactccctccgtcccaaaaaaaaaaaacaaaccttgggttttcatatccaattttgactgttcgtcttatatgaaatttttttataattcgtatttttaccgctgttagatgataaaatatgattaatattttatgcgtgacttatctttttaatttttttcataatttttttaaataagacggacg

SEQ ID NO: 17169 - DNA, 1143 bp, Oryza sativa
tgcgccatttgcttcggcatctcccagactgacactgtcccctccagcgccagaggctgcagcagaggctgcgccactgctgtgagcgtcctggtcaggcacagagctgctgtcctgtagcgtcgattccagtgccgcctccccatgcacgatgttgccatgcacgttcccatgcatggtattctccatttcctgctcatgtgggggaccattttctccagaaacaacatcatcagcatcagacacaattaaattattactaggtaatggaatattagccactggtgtaactacatgtgtgccccctggactagtcgtattataatttgtcatggaggaaggcaatagaagaatttcagacctaagtcttgctcctgcatttgagtgaagagtagaaaagggaaatatattttcatcaaagataacatctcttaagatgtagacatggcctgatgacacatcaagacatttaaatcctttgtggtgagtactaaaacctaggaacacgcactgtttggaacggaattggagtttatgtgtgtcgaaacatgaattcggcaataataaaacggggtagcgcacgagacctaaaagtggatggatgtggagacaaaggatttagacaggttcaggccctctcaatgagaggtaataccctactcctgtttggggatttgaatccgctgagtgtgtattgatctgacgatcaggttgtctcatgccctctagagggcctcctgcccaccttatatagaatggggggcaggattacaagatagaaacattatccaatacggtatcggtttcctaactctactttacaatcttatcaaaccaggactttaggccgttccgtaatatacaaggaaacgtaatacccaagtcataatctgttacatattccatacatataagttatcccctataactagtcggataaccatgccgtgtgggtatggggtacccataatctccacagtagcccctgagaccttcacagtcgaaaagataatcttctctcgaaccagattactccaaggccgagtacttcaatcatctttgccatggtctcccgagtacttttaccaaatctgaagactgtggagggctgaaaaataaagtcaggtgcatcgactagatgca

SEQ ID NO: 17170 - DNA, 2018 bp, Oryza sativa
atttttttgaagtttgatagaattcagagataaatataatgatatttttaacacaaaatgaatattctattaaaatatatttaatgatatatttaattaaattattttggtatcatatatgttgctattttttttataaatttgatcaaacaaaaaaacataaaggagttttaagagtcaaatatgaaaccgagggagtacaagatattgacatccttagttttgccaatccaataaaggtaagagaatatgttatccacgtgcctctcttaaatcaaattgatccaacatgcctctgcctcatgtaaaatatttttagaacttagtatccctattgtttcacctttttagaacgaaatactgatatatcatttccatagcctaaaaagaaaacttgttcggcaaatatatcatttccatagcctaaaaagaaaacttttttgccgggtcggcggaaggacgtcaaccaaatttctttaagataaaaagagggtaatataatatacatgatattacactgtcgagtcgaggggaaacctcgaaaaagaacgtaaaccaaatttctttaagataaaaagagggtaatacaatatacataaaaaaagagggtaatacaatatacatgatattacagagtcgaggggaaacctcgaaaaagaacaggaaaactatttaaggaggccaaaaacatgctgctactcctcgaaagaaaaaattccggccactcttcagatcagaggacctcctgatgtctgccaccaagtgttctaccaccctttctgttataaaaatctttacgtttcttcctttccaaagcttccagcagatcaacatgaacagagaatcgaaatccttacagcttccagcagatcaacatgaacatagaatcgaaatccttacgtttctttctttccaaagcttccagcagatcaacatacacagagaatcgaaggcggctctgtgcctttgaccgaaaacagagacgcacctgctgccaccattttggaagctgtaggccgagctgacggcaaataccttgtctttaaacacaattattaattcttctctagtgttcctatcccacaagaattattttcttactgtccttacaagttatttccttgcggattctcgatagattttggcactttgccatagacttatacacaccattactggtaccatgtatgaatgcgatcagaattcatgtctatgtgatccctacaccaaaacgcatcagtagtggaatggttttgcagggtgaaacacagcgaagaaaaacgacaatatccaataacatgtcattccaatcttaattaagattcgtacacgccgaatactagcgagaaaagaaaaaggtgtacaaacattcataagaaaaccgtacaactaggctgacaactgacaaagcatgctaaataagctaccgattgagaaaaataaaaattagctacctgacaggccaagccatgcgctggggctacttatttgttcctgatctcttttgttcaggcattgtgatactgattactactagcgcaccggattattggccaacgctgccggtggtgtcggtgcaggaaacactgaatccctgatccctacactctactgggtcaacagctaacagagcttaaaaacacaggattatctagtcggtcatcatcttcaggtcgggatcgtaacggccttgattcccagatagcgaccagctaacaggagcatacgaagaatgcatgggatgacctgaattattgaatgtgctgccattaggtcccatgggactccctgggtcatcggagtggtcgcttgatgatccatcagacggaggactggcagccgtggctgcgccaaagccagctgcgtggttcggcgtcggggcagatgttggctcacgtttcagatgttcttccttgccttttttaccttcagcaatgaaactccccactacaacctggaaaacagaatgtaacagaaggccaaagaaaatgctagtttagggcacaaaccagctgaaa

SEQ ID NO: 17171 - DNA, 562 bp, Oryza sativa
cgcctcctttgtgggggcatacttaatcaaggacttcgtgggctatctaagtggagataatggatttgaaagaggctactctcttgttcttgtatttgtaggtgcgaaggctattgaaactcttgcttacagacaatggttctttggaagtctacaggtttatttgcgcctaagaacatctctgatatctcaggtataccaaaaggtcctttatttatcaagccagtcaaggcagaaacatacctcaggggagataattaactatgtgagtgttgacatcgagaggattgttaatgttgcatggtatgtgaacatggtcttcatgatgcctatacagattacactagcaacttatattctttggaaaaatcttggtctgggttctttagctggaatagcaacaacagccataataatgctttgcaatattccttttacaagaatccagaaaagattgcacgcaggaattatgaaagcaaaagatgacagaatggacatgacatctgaagttataagaagcatgaagatcttaaaacttcaagcttgggatatccaaaacctt

SEQ ID NO: 17172 - DNA, 565 bp, Oryza sativa
aacctggccgggtgactgcagagatgataaatggcccttcccatagaggagataacttgtgccgatctcgtgtagtttgaattttcctcaaaacgaggtcgccgactagaaaggcacgggatcgaacattgcgattataataacgtcgcaacccttgtaagtatcgagccgactgaatcaaagctgcttcgcggacttcttccagtcggtgcaagtcatccactcggtcctcctcgtagcgttcttcgcggaaattacgaaagcgcaaagactcgaattcaacttcactcggcaacattgcttctgccccatagacaaggaaaaaaggtgactggcctgtggtccgactgggtgtagtacgcaaagaccaaagtactgatggtagctgttccacccatttgccggcatagggttttagccggtcaaaaactcgcgctttaatcccttgaagtatcatgccattggctcactccacctgtccattgctcatgggatgtgccactgaggcatagcaaatcttaattccaaagtcttcacaaaagtctttaaaaactccgccagtgag

SEQ ID NO: 17173 - DNA, 2259 bp, Oryza sativa
taaccgccgactgcctttttaaacgggccaaccatgtcgagcccccaaaccgcaaacggccaagacagtgggatggtctgcaactcttgagctggtagatgaatttgtctggcaaaaaactggcaaccttcgcacgtgcgcacaattttgtcggcgtcggacactgcagtaggccaaaaaaaaccctgccggtaagctttgccgacaatggtgcgtgcggcagcatggtttccgcatatcccagaatgtatgtctttcagcaattgtctcccttcctctaaagatacgcagcgttgcagaatccctgaagggcttttcttgtacaactcagcttcatgcataacataaagtttgcttcgtcttgaaatccgctcggcttcatctttgtcttgggggagttcttgagaagtcaagaatcgtatgaggggctctcgccagtcggctgaaaccatagctacgtcatgagtgcccgcaacttgagtagtatctttgtgaggtactgtcggcgtataaaggtgttcgacgaaaacatcggagggcgccacctcgcgcttggatccaaagttggcaagtctgtcggcggcttcattattgtgtcgaagaacgtgactgagctcgagtccatcgaacttgtcttccaatttgcgtacctcttgtcgatatgccatcatgttgtcgtcaaggcaggaccactctttcataacttggttgacgaccagctgtgaatcgcctcgaactattagacgctttatccctagggagatcgcaattcgcagtccatgaaggagcgcctcatactcggcgacgttgtgggacgccgaaaaatgtatccaaagcacatagcttaatctttctccagttggggaaattagaaccactcctgctccagtgcccgaaagtctttttgatccgtcaaaatgcatggtccagtgctccatcttctccgcgggggtatcctcctggcactcggtctattcggtgacaaaatcagctaacgcttgggacttgattgaaattcggggcttgaatgatatgtccaaagacatcaactccaaagcccacttagcaatccgtccgtttgctccgcggttatgcagtatatcaccgagtggaaatgatgtgaccaccgttaccgagtgaccttgaaagtagtgagatagcttcctggtagtaattagaataccatataacagcttctgaacctgagggtacctcgttttggagtcggctaggacctcgctgacaaagtaaatcggtcgctggactttctggacatggccttcttcctcacgctcaacgaccaagactgtgctcacaacctgggaggtggctgatacatacagcaacaacggctcctgcgggtgtggtgaggctaagaccggtggctcggtgaggagtttcttaaaatcttcgaaggccttctgtgcttcgggtccccattggaaatcatctgttttcttcagtagcttaaagaagggcatcccccgctcgccaagtctcgaaacaaatcggctgagcgccgccatgcatccagtcagcttctgaacatctttctgggtacttggcggtttcatgttgaggatagcagtaactttctccgggttggcttggatacccctgtgagacaccataaaaccaagcagcttccctgacggtactccgaaggtgcacttttcagggtttaatttcatcctgaaagcgcggatgctcgcgaaggttcttctagatccgagaataaatcatccctttgttgggcttgacgactacattattcacatatggcttcaccgtgcgggccgatctggttgagaagcatctcttgatcatacgtggataagtgcgtcctgcgtttttagttccgacggcatggggaataacatttcttccaaaggccggaagaaggagattcaacaagcggattcctttatcggattgaggtataccgggtggcatcccaaaaagtggaaatttaaccccggggggagttcttcctcctgttattggggggcccccaagaagttctttggggaaaaatttttgagtaaataaaaaaaaaaaagggccgatggccgttttttcaaaaaaaaaacggtttgccccacccggatgaaggctcttttagaaaccggcccccaacctggtttattccctttgaaggttcttctttttgggaaaaaggggaggtgttaaaggcgggcctctcttcaattgaggggggcaaccctctcttgaaaaccgccctttatagttcccccccaa

SEQ ID NO: 17174 - DNA, 667 bp, Oryza sativa
cctctctaggaatacggggcatatcagatggtttccacgcaaagatatctttattgttctgaagaaaggtgatgagcgcgctttcctatttacaatctaactcggcgcctattacagcagttttagtaggattagaaggatctaggggaatcttcttagtcttggcttcgctttctccactttttgaagtcttggtagcgggcacttctccttcgctcgccgtggctgcagccagtcggatatcctctcgggcagacgccatctcgcgggtttgggccatgtcgcaactctccttgtcgcatgtgacggcttgcttgatgtcgctccgtagggataggactcctcggggaccaggcatcttcatcatcatgtaagtgtagtgcgggacggccatgaacttggctaacgccgggcgtccgagtatggcatggtatgctgtctcaaaatcggtgacttcaaagctgatattctctgtgcggaagttttcccgagtgccaaaagtgaccgggagggtgatctggccgagtggagttgcggataatcctggaattactccgtgaaaaggcgcattgcttggttttagcttggagcgaggaatctgcatatcatccaaggtcttggcgaagaggatattgagtgcactgcctccgtcgatgagggttctgcg

SEQ ID NO: 17175 - DNA, 1258 bp, Oryza sativa
  unsure (1)..(1258): unsure at all n locations
ccgttactcttctctctcttcctttatctctttaaaatattactcttctctctcttcctttatctctttaaaatatgtttatagttggcttatagcctgctattgtacctactctaaagggtcaaattgccaaaatttgtgcacaaagttaagcactgaaccaaccactggctcacttggcacgccagttttttttaagagagaaaattgtcagataggcaatgtggtgcaagcggttagatcaacgatggacgatcccgattagcccgcctcgcggttcatccggagaatcccaatattctgaccgccaccgtgtccctctacccgccgtcacccctgggcttcgccgccggcgagcgaaccccgccgctccccttccgaatcccgggccgacattgcaagccggtgggcatcgccagttcgccaccgccatctggcttctgccctgaccctcccgctcggatcagcgcgtgttaccgcggcgccggatgaaccgcgaacgccgcctgcctgctcgacggaatgcctgagtggagtgaggcacgctggcgcgtaagtcccctcgctgaaaatctcgctccgttgtattacctttatttgtttttcaagcaattacattcggactatgagtagcttcgctgcattgcatgagttgggggaaaggttcccccacttcagcttgagctcatacttacagtactctacataaattgtgtttcttttctttacttggggatcatcctgaacctaagagctagccaacatcaacggtaggccccttagttggtgtatatttctgtgggttttgtgcgttctttgtcatttgggatcgtgtggagtgcggcccctttctacccaagtgtgttgttgtagtgcgcttggttggcttcatgctgttctcctcgcttttcaaattgtagtgtgccgcactgctaaaagccctttgatctccgtgaatactcctttatgagcctagagaattcagagttctcgttctccagtaatttcaatggtgtgtcgtactctatgattcttcctgctcgtcagataagagcgcacaatttagtggcatgtaaaaaactggcatgtgtttgtcaagggtgtggcttaccttcactgaagacaagaatgagatcactgtcaataactgtgtgaattctatgtgctattgtcagcacggtgcaatccctgaattcatcgcggattgtttcttggataattggggtaccgagatcgatnntcaatnnnnaancgccat

SEQ ID NO: 17176 - DNA, 1023 bp, Oryza sativa
tctgtcataaatgccgaaagttctagcagagtgacattcactgagaacagtaaaccagcagatactgatgatgagtttgaagcagaaaatgaaacagatgatcaaattcagggtataacaaagcaagagtctgcacatgatgtatcacaggacatcaatgagaaagggaggttaacacaagatgaagagcgagaaaagggaggtattggcaagaaggtttactgggcatacctgagggcagtttatggaggtgccttagtgccagtcacaatcgcagcacagtccttcttccaaatatttcaggtagcaagcaactattggatggcatgggcatctccttcaacatcagcaaccaggccaactgtcggattagggctcatgtttgccgtatacatagcattgtcaattggaagtgccttgtgtgtctttgctcggtccatgcttgtttcactaattgggctactaacatcagaaaagttcttcaagaacatgctccactgcatcatgcgagccccaatgtccttctttgactccacgcctactggaagaattctgaacagggttaagactgacttagtttgtaaaccattttatactgcatcacgtactctctccacccctaaactaataggtgtgtatttatgctttaacaggcctccaatgaccaaagtgttctagatctggaaatagcaaacaagcttggttggtgcgtattttcagtcatacaaattctggggaccattggtgttatgtcccaggttgcctggccagtttttgccatcttcgttccagtaacggtggtctgtttcatgtgtcaggtatgaactcccaacaagaaaaaaaaactttattactagccttttgtactaccatagcaccatgtgcaaaagtcactctgtgcaccacgatgagttccaagaagctataggtacaccttttctccataaattatagcgttcattcacaaaatactgaaaccatatactctgtgtaatgtgcagcgatactacataccaacagcaa

SEQ ID NO: 17177 - DNA, 2724 bp, Oryza sativa
  unsure (1)..(2724): unsure at all n locations
tttaaaatctcaatgccaataaagaaaagagacagtggacgggccgtagaggagtataatggcaacgtttgacgggacatctagaaattataaaaatgaaacacaacgtgacaataaactctaaaaactataaaatccaatttttaaaggttccaagaagaatgaatagaaatagtggtagatcgagcaagcaaataaagaagaagatgacataaggggtagcaactggtgtgactttaaaaaactatataattagaaacacgaggatgataaggtttagtctttcaaagtcttaagacaatgagatatctattttataaattttaagtaatatcataaaaaatatatgattttgtttgggtgctagccgcgcaattgcgcgggccacccagctagttagttttgaagtcatcaatagtgaacaacaaaaatataccacaaaaattaaggcatgtgcttcacatgtgacatatcgcaacaaaccaattgttaaagttaatgactgcagtaaaacaacaaacatgttttacaaaaatatgttgtttttatttctctgttcaggacaaatttgagttaatcgccgaagcaaaacaataacctgcactgcagcaatagtacaaagcaaatctcactcaaacagagaaccccttttacacaagaaaccctttcttttagcaaacatatcttgtttgcatcatcctttcttttatttttgaaaccaaattatactttcatttagcttaaaattcatagaactaggcaaacaaataagcatggaaaactaatccaaatgattcgtttggcagtatgtagccttacccttctaactgagcatcatagcccatttggacattgacattgctcccgacccttgtagcgcaattacctgcatcgaagaaagaggcaacaagtcagaagaccataatgccacaatccatattggcgcgcgcgcgcagacccacccacccacacacacacacacactcttaagctttgaaaaaaaaggaaatgagctgcaaaagaacctggtatcaaatattccatatcgatttcagcatcgaggtgaaagaaatgaattgaaaaggtgctgggaagagcacaaatcaaagcaccgctttccatatgcgcaacgcagtgcatgcatgtacactgctctgatgaatgattgtagtcagactggttcaattcatcaggatactcatctcccaagagagggttatcgaacaaaccagatatctcagcacaaagctctaattcctgaacatagctctgaattgccagtaccctcctcaccttctccctctgctcagtgacaccacacttctcttgcttcgaaatgctgagctcaagcatcttcaccatggcactgaaactgtgcccgagaacgacgatcttgccgagctgatctggggtccagttcaaggtgagcaaattctcaaagaagacgcgatccgcgtagggcatgaagatcagagttggctgttcgaccacaaggcagagcgcaggcgacgcggtgacaacgcagcccagctcctccatggcccggcgctccaccggggccacggtgggatccaccacctcgacggcgccgaccagctcggggaacttgtcccgcaggaggagcagcaaggcgaggcggaaccgcggcgcccagctgtaccccaagccgccgagcctatacgccacgacacggagccgctcgtggccacgcccacggacgcgctccaggccctcgaggcacgcggcatcggaggagaagagcgcggagagcttcgcgaaaagcggcgatgacatggcaagctccatggcgaaccacaagaaggacatgagccgcgcgtggtcgcccatcacgaactcctccttgatcaggttcaaagaacgcggaccacctgggcacgccgcgcgcgcggcacaaggaaacaaagatcgcgaaaccacccaagtttctccggaaaaaatgacggcttccaaaaaaatcccaaacacgcaacacatcatgcaccttttttaaaaaaaaacgtgtaaatatataccatggtccattgaaacaaaatataggaataaaaatattagcagaaaaatattggagtacagctggaaaatatctttaagatctagcaattccttctccccactgcggcacacccctatcaccccaagtttctcaaaaaaaaaacacatcttgcgtcttggaaaaaacaggtcaacatatactatggttcattaaaatgattgtatgcatcccaacacatcttacaaaatatcaatattagaaaaatcgagatatctatatatctactactgtaaaagtaaaatcatcctccttttatgccatcctccaccacccgcatgccttccacccacatttctccagagaaaccaatggcttctagaaaaaatcgaacacacaacacatcatgcacctctagaaaaatgtgtcaatatatacattggtccccatgcgtctctagaagaagagccaacattaacagacccaaaaaattaagcaatctatattgcgaaataaaggggttgtttgcatgctatacaacaatcatttgtcatacttttgtgccacactttagctaagttatggccaataaaatgtaagccacactttagctagcaaataaagagtgtgccacacatttttgagttaatgacgtgtgagaccatagaaagggtaccgagaacgaatgatcaaaaccaannnnnnncaccatc

SEQ ID NO: 17178 - DNA, 1553 bp, Oryza sativa
  unsure (1)..(1553): unsure at all n locations
cgggaagattttggccggtggaatcatttatttgaacccttaatagggatgggcttcctccccccaaaaaaagatggggttatttattttaacagacctccataaaaaatgatgttagatcggaaaacaaaccagattggtgggggggttttcaggaaaacaatttgggggcccctggtatatagccccgaggcctggcacagttttgcctactcgttagagagacggggnnnngnnnngggtcaggtagaactccaacaaaaaaaaaacctttaataaacccttttggnnnnnacgccctttaaagaaccccttgtaagtaccaccccccagtgggaaaggggacggccccaaaagagcctggcacgtctgtttaaagacggaccaagcattggggcgcctcaaaaagaacattttttggaatagtttttataggggtccactgcgaaaataagtttttcaaaaggaccaatatgtgaaaaatccagggccaagacaggtgccccacttgcgaggtgtgcttcaagcgcgggcataccgcagcagactgttggtatcgcttcgacgaggactacgtcgcagatgaaaagcttgccgctgctgctactaactcatatggtatagatacaaattggtatattgatacaggtgctacagatcatattaccggtgagctagagaaacttaccaccaaggaaaagtacaacggcggcgagcagattcacacggctagcggagcaggtatggatattagtcacattggtcatactattgtgcatacccctagtcgtaacattcatctaaataatgttctttattttcctcaagctaagaaaaatcttatatctgctagtcagttagccgctgataattctgcttttcttgaacttcactcgaaattcttttccataaaggatctggtaacgaaggacattttgcttgaagggaaatgtaggcatggtctctacctgatccctaactcctttggctgatcaaccagcaaacaagcccttggcaccgtcaagctatccttgtccaggtggcatagccgtctaggacatccgtctcttcctattgttaagaaagttattagcaaaaataatctcccatgcttagttgagtcagtcgatcagtctgtgtgtaatgcttgccaagaagcaaagagtcatcagttaccttatgttagatctactagtgtgtctcaatttccccttgaacttgttttttctgatgtttggggccctgccccagagtctgttgggagaaataaatattatgtgagttttattgatgattttagtgctaaaatataagtctcaagtctttgagaagtttaaagaatttcaggttctagttgaacgaatgtttgatagaaagattattgccatgcagactgattgggggggagaatatcaaaaacttaattcctttttttgcaaaaataggaattgatcatcatgtgtcatgtcctcacactcgtcaactgaatgggtcagctgagagaaaacactggcatattgttgaagtgggtctctctcttttatcttatgcat

SEQ ID NO: 17179 - DNA, 969 bp, Oryza sativa
  unsure (1)..(969): unsure at all n locations
attgatatccgtctcggtacccctttccggtcgatcggccgcgagtccactccgccggcttgtcctcgccaccgccattgctgatagcaacaacgacttcaccgccggcctgcctccgtcgccgccgactggtgtcatcgcctatacggttggtcggtcacaccaccgttcatgggcgtccatgtcttcaccgaccggctggccttcgccgccgccgactggtgtttccgcctgcacggctggcctattatgccgctgctgttgggcgtctacgacttcaccaccggcctgcctccgtcgccgccgactggtgtcctcgcctatacggtcggttggtcacaccaccgttgatgggcatcgtcatctacaccgccggcctgcctccgtcgccgccgactggtgtccccgcctatacggtcggttggtcacaccaccgttgatgggcatcgtcatctacaccgccggcctgcctccgtcgccgccgagtggtgcctccgcctacacagctggcctattatgccgccgctgttgggcgtctacgacttcaccgccggcctgcctccgtcgccgccgagtggtgcctccgcctacacggctggcctattatgccgccgctgttgggcgtctacaacttcaccaccggcctgcctccgtcgccgccgattggtgcctccgcctacacggctggcctattatgccgccgctgttgggcgtctacgacttcaccgccggcctgcctccgtcgccgccgagtggtgcctccgcctacacggctggcctattatgccgctgctgttgggcgtctacgacttcaccaccggcctgcctccgtcgccgccgactggtgtcctcgcctatacggtcggttgatcccaccaccgttaatgggaatagtcatgtacacccccggcctgcctctgatcaccgcggatgggtgcgagcacgataatgatttcaaannaacccacc

SEQ ID NO: 17180 - DNA, 1093 bp, Oryza sativa
tttatcttaaaattcgaagctcccaccttaaatttgaaaatgttcatgttaataagacagctacagctttggaaaaaaaaaaaaaaagccgccccgatgacagcggtaggtattcatgttaatcacgccagagagggcgttaaccccacactaactgtatattgtgccacgcagaagcggatttaaaaatcaagcaggtctggtgccccaaaaaggaccatttctagaataagtttttttaggggtctatttgcgaaataagttttttaaaaggaccaaaatatgaaaaatccagggccctgtgccgcgcccctggccaccgcgtgcttggccaccaccgcgtccgcgcagcgctcccctgccgctgccgccgttgaagttgttgtgggcgccgtttttgttgccgcgcccgccgccgcgattagcgacgaaagcagcccctccctgaccggtgttgcggtagagatcaaggagagtttcaaagttgaggagttgagagtacagctccccaaccgtgatgggatcggacttggtgcagagagcagagacgatcgggctgaagtcttcatctaaccctgagatgatgtactgcaccatatcctcttcatcaagaggacgaccggcggcagccatctcatcaccaagagctcgcatcttggcaacgtattcagcgaccttcattgttcccttcttcgtgttggtgagggcgagcctggtattcaccgatcttgcacgggtgcggctggagtagagttcctcgatggctcaccaagcttcagccgccgtcttgcacatggcgacttgaatcagaacatccctcgaaagagatgacaggagatagccaagaacaagttgatcattggcttcctaatcttcgaatgccgggttcggctttgtcacagtcttcccatcgacggtgactgaaatctcggcgtctagagctttcacagcgccggtgaggtagccctggagacgggctccgcgcactgcagcgctaacttgcgctttccacagtgcatgattgcctttccgagtttctctgtaacggaatggccctgagcgaggtttacagctgccgcgcctgaggaagaca

SEQ ID NO: 17181 - DNA, 1262 bp, Oryza sativa
  unsure (1)..(1262): unsure at all n locations
atttataaagcacgtgagggtatttacagattttccaccagaggtgcaataaattccgatttgaggatttccaaacccgtgtgaggtaccttgtaagaggggttcgagacattaagagaataattggcttttccacagggaataatgcccttccgaagttttttgtgagaggaatgccctgagagaaggtttacaaactccgcggcccttagagaaaaacaacaccggatataattggtggaagaataaatcaatattacccgggtggaaaaaggttttgaatccatggtgataatatgtaaagggttaacaccttgtcctcgggccggtatttttgttaaaaagtggtaaaaacaagctctacccggggcttaaaatgttcaagtacaaagtattaaggagatagacanaatttgaaaataagaacctatccctacaaccttattcattggataagttattacgggtgtgaccagttgcgccataatggaaggcatgcgcaatgcccaatgcgacccccacgacacggacactgtccaatgcttgtcgcggtggtagcacaccgactgttgagccacgcccgccgaaatggcgccgtcatcctcgatctctccttcatctgtcgcctctccgggaccgcccgacgacagccatcggtggcgtcgccgccggcgcatcggccttcggccctcggcgcgttgcagttcatgacggcggtggaggagatcgcgcgtaggcgggcgacgccggtgctggcgccagcgtggggccgcgacgcaatcccgtgcctgccgtccgccgccgtggacccgctccccgccccgacggagctccgcctccagtacctcaccgtggacatctcgccgccgctgccgccttgctcccctgctcccgcgtcgtctccgccgccacgtcgccggccgccggacctcctctcccacctcgcaccgtcgatctcctccccacctgtcggccggcggcgccgggctacccagagtcaccagagagaagagcgagagagagaaggggaagggagagaagagaggaaagaaatagaggctgactggacaagctgacatgtggggcgcacgtgggtcccacgctgactcattagacacgtaggataaaaccgggatcgaaaccgccaagggacctattgtgaccagttttatatagttaagggatcctatatatctggttttgcggttcgaggacggttttgtatcccgttgacaagttgagggaccttcggtgtacttttt

SEQ ID NO: 17182 - DNA, 1160 bp, Oryza sativa
  unsure (1)..(1160): unsure at all n locations
cccaatatgtggtaacccaaccttttttgggtgggaatcccccaaaaatagggggggagcgggtggtttcaacaacccgcaaaaaagccctcaatttccctggcacaaataaaagaggttaaggccaattttgggggaaaaaggtgaaataattccacacaatttttttaaggctgaattgcccaattaggccggggataccagcccttaaaagctaaactttaaaaaagagaggaaattggctgggaatttggaggttgccccctgaacaccttcattttttgggggcccggcatttaattctcaaaacacattgccgcaggcattttatgggaatccttttacngctggacttgtttgtctgctctgcaacatccggattgctcaagatccaatcttcactcttcccgacttgctttcagtgtttgctcaaggaaaagtttcaggtgatagggtggccaaatacctccaggaagaagaattgaaatatgatgcagttattgaaatacccaggaatgacacagaatatgatattgagattgatcatggaatattcagctgggaactcgagacaacatctccaactctgaaagacgtagaactaaaagtaaaaagagggatgaaagtagcaatctgtggaatggtcggatctggaaaatcaagtctattatcatccatacttggggagatgccaaagctagctgggactgtgagggtcagtgggagcaaagcatatgttcctcaaagcgcctggatcctgtctgggaacatcaggacaaacattctgttggaaaatccatatgacaaagaaaagtatgacaagataatacaagcttgtgcgctgactaaagatcttgagttgtttgcaaatggtgatttgacggagattggtgaaagaggaattaacatgagtggtggacagaaacaccgaattcagatagcaaggtcagtatatgaagatgcagacatatacctttttgatgatcctttcagtgcagtggatgctcatactggaagccaacttttcaaggtttgttctgtttgtttaaaactttcaataaatgctcaagtatccaggttatgttttaactccattcttcgtggcattaactccattcttcgtggcataacgttaataaaaaaaagggcaaaacctattt

SEQ ID NO: 17183 - DNA, 1456 bp, Oryza sativa
  unsure (1)..(1456): unsure at all n locations
agccggcgggcgagccatgatggcggcggcggggcctccttcatggcggtgacccctctcagcgcgggagaggcggcgaccgatcccggcgaggagacggcggatccagcgtcaccttcgccggatttggccatcccctggccagatccggccggagtgggtgctggtggcggaggagaccgcggagcggcgacaccggcgcgacgaggcggcggcgacggcgacggttacggcgcggcgacgcgacgacgacgacttgcacggcagccagcggcggccgccgcgacggtgagatgcgcgcgggcggcggtgctcgcaccgccgggggcgagcgacgcctgcagcgccgccagccctggtggcagcagcccgagcgactgcggcgcgaggctcgcggacggcggtgactggcagcgcggctggtgatgggcaacggtggcggtgccagtggcagccgcggctgcggcctgaggcagcagcggcaacgcctgtcggtgcagaggcagaggcctcagagctcgtcgcatcggcggcgtcagcggctgctgtggcacggtggtgcgttcggcagcagcggctgcggtggcggtgaccacggtcgcaggaggcatgacggcctcggacgactagctgaggacatggcagacggctacatcggaccggcgtggcatcgtttggaagaagggtcggagaccggcttggcatagagtggcgcagccgatgacagcggaggccggctcggcgcgagaggcgcggccgatgaagggaggccagattggcgcaagaggcgcgtcccgtggagaagactggcttggcgcaaaaggcgcggccggcggtgaagaagccaacctcggtgcgagaagaagctaccggtgaatgtggcgcggtctccggcgcatgaagactggccggcgggggacaccggtgcaggggtcccgcatgtcggcatagctgaagaggtggtggagcatcggtgcgtcagccaaggattcgcaggtggtgatcggcaggtgaaaatctagtccggccttggccgggcggacaacgatggttcattccccctcctgagggcgttgtcgtgatgtctcacccttcaagggcggttgccggacgaaagcctagtctcggcttctttgaaccccgacggacggcggcggcggttttttccgtcgcttctcttcttgaagacgtcgtttttggcatcccttagagggcgatcttgtctgtgttcctttgttagtcaagcagcggtcggtcacgcttagcggtggccggtccggtgctagccttctcccgggttgtgtgttggcgccgtcggtgtgcgggtggtggtatatttttttcctttttcctggttacaaccctatagagttgtaatcttgtaattttttcatgatgtggggatccttaaagtaaacctgcaggcatggacgaatacgatntgcaatcaagacat

SEQ ID NO: 17184 - DNA, 578 bp, Oryza sativa
  unsure (1)..(578): unsure at all n locations
tgcgtgntnnnatttgaaatcggatgcggtaccccattctccacttcttcgagcgccagtcccaggcctcctcccagaacgccaagcgccagaaggccgacggcccctcgcagcctcccgcgccgtcgccgcctccgccgccaccgccgctcatcgaggaggagccatcggaggtgtcgccggaggtcaccaagactctggcgccgaagcgggtcaggttttctcctgggatggtaagtattggtcttgcgcttggtccgatttggaatgcattagttggcgtttggatcgactcttaggttcgggggtttcttgtttggtgcggtccagctgattaagcagagccaggacgatgggggtggggaggttgtgacttggaagatctcgccggtgaatgatcgcctgcgcatggtcacttcaaggcagatgactggtatggcgcttcatccgtgctcaaacaatgaggtatatactggagtttctttatgttcttgcgaggtatataccggcgtgcaatgcacgtatgtatgtgcattggagccggtggagacacaacactttcttgagtgatgaaatta

SEQ ID NO: 17185 - DNA, 1188 bp, Oryza sativa
tctttcttcaccctgcagcaatttcccttcttcagtgttatctctaaatacttcttgtctgcaatttatcatatttgtgttttgccatttgctgctgatttccttttctgcatcggactcattgatgcttggtaccttttctgattctgcatgatgctttgacaaatatatgcttgtgccttttgcgttacaaacttgttcgacggcacaaaagtgagccccaaagataactccaaaagccatgttctgttggagttcttgaaatttccctgcttgtgctatccttccattttgcatcacctgcaatattgcttcaaccagtcaagttaaacatactagtttcttttctgggatccttatgagttattgagaggtagtagtatctcctagtgtggatcatgagaactgataggtgtagctactgaaagttatacaaaactaacactaggagatacctctacacctcaagcctgcaaagggctgtaaattctctaaaaggattcccatatgcacagcatgtttttagcagtcatcattatttatcctaatgttcagtacaatcatgtctttagtttttttttcaggggcttaccataataaggtctgcatcaactagaaattcaacttggtgcgtgacgtataacacagttttatcccttaggacccccatcaggcatttctgcaaaaaatgtagggtaccgagctccaaatcgccctataatgagtcggattacaatttactggccggcggtttacaacgcgtgaacttgaaaaacctgggttaccacaattattggcttgaaaaccatccccttttgccaatttggtaataacaaaaggcccgaaccgaccgccttcccaaccattgccaacttgatggcgatggacccccccttaatcgggcatttaaacccgcggtgtggtggtaaccccaagtgacacgttaccttgcaggcccttacgcccggtcttttgtttttttccctcttttttgccacagtgcgggtttccccgtaagatttaaatgggggttcctttaggttccaataaggcttacggcccccgacccaaaaaaactgttgggggatgggcccgagggcgctctccctttacacgttttctcccttgacctgggaccactttttaataggctcttgtccaacgggaaaccctaacctatttgttttt

SEQ ID NO: 17186 - DNA, 1256 bp, Oryza sativa
  unsure (1)..(1256): unsure at all n locations
catgtggcttgaattagactaatctcgtatgcctgcaggtcgactctagaagatncccttctgaaaattccctgcttgggctatcctttcattttgcatcacctgcaatattgcttcaaccagtcaagttaaacatactaatttgttttgtgggatccttatgagttattgagaggtagtaatatctcctagggggatcatgaaaactgataggggtagctactgaaaggtatacaaaactacactaggagataccttacacctaagcctgcaagggctgtaaaattctctaaaagattcccatatgcacagcatgtttttagcagtcatcattatttatcctaatgttcagtacaatcatgtctttagtttttttttcaggggcttaccataataaggtctgcatcaactagaaattcaacttggtgcgtgacgtataacacagttttatcccttaggacccccatcaggcatttctgcaaaaaatgtatagagccaatgttaatggttatgtaacagggcttctccttgccagtaaaaatatagatatgagcaatttattttagcgagagaaataaatatcaataataatatggacaagattattgaataatcacaagatctcaaatatacgatgcccattgtttgtcctagagaacatgatgacttcttttaactatggaaaatttgaaaccatcaaagcattatatttttgtgaccctggggttaatttcttttgttggctcttaaggggaaaaggaccttgtatagatgccttccagtttgagggtctacagcactgaaaggatcatcaaacaggtagacatcagcatccttgtaaactgctcttgctatttgaatccgttgcttttgtcccccactcatagtcgttccccgttctcctatatctgtcatatcaccatccgagaaaacttcgatgtctttaaccaaggcacatgcttcaattgtccgctcatacctatcagtttcaaagggcgtccacaaaagaagtttctcttatagtcccgaaaggttcctttaccatgggaactatatgcttgtttcaaaaagactaaacggtcttggacctttgggattnttcacaacaacagagacagggtttaattttcattccaaaaaatcaaaaaagggcctttataaaccttgggggcttcacccgtataattgagagtggtattttgaaattttcaacagaagagcctggaaaatctgggaaaaaatatttccctttgtgt

SEQ ID NO: 17187 - DNA, 1503 bp, Oryza sativa
  unsure (1)..(1503): unsure at all n locations
gagccccccntttganatcatttganatctcgtagctcggtacccagcagagaaatgatgcaggcttacccaaagcatctagctgtttttttttcccggatcctgggggtcgccctctgcgcttcccgtcagggttcgagttcgatcctgcaccacctgaaggtccgccggcctccgtccctgctgcagccgcgggcttcagtcccaacccgatgttcccgtcaggaccatacttcctcggcctccccctcttcttcttcacgagctcccctccgccgaccgccgtgccgccaccgccggaaccgggctgctgctgcatgccctgcacgacgggatcggtgcggtacatggtccccgacatatccgcgggcttcataggcgacgaggcggtcggcgacgccatggggttgaacgagagcggcaccccgtgcataacattcgccgaccccggcggcatcgccggcgcggcgccgtaggggtgctgaggcatcatcacgccgccgccggccggcggcggcgagctcacgcgcggctgctgctgctgctcccggccatccatcccggcagcgaaaccctagggcacccacccccacctgaatcgaagccgccgccgccgccgcagcagccgctcctcgcgacctctcctcacctgcgcgtttcgccgaacagttcacatgcaccgttcggcgcggcggttgtacgtgagctctatgcaccggaaaacaaatctcgaaatcgaataaaatacatcggaaatggaggaggaggaggaggggacagaatttctgcggatgcggagaaaaaaattgggaggagaaatggagaaaacagggggggaggtggcgaggcgagaggggttacctcactgtgaggggtcagatcagatcagatctgagtgacgagaaaacgcgagatatcgagtaaaataactcgctgcctcctggctcgccgcggcgtcaggacgagaataggaaacttactactgtactgtatttgaacctttttcgtgatgaaaattgttgttttttctacaaatctatctattttcgtttagattattttttttaagtcaagagagaactttattaatgactaaatagagggttacattcttgatttaacaagtctaggattatgcgggggcggcgcacagcctctactccccacacgacctagtactcattgccatttgtgctaacacatgagcaaccctattagcttctctcttaatcttgtgcacttgcacccgttggatacattgtatcacacctttgatttctgcaaccgtcgtcgcccaggaggatcttgaagctacctgctgtgttagagccttaacaacatcagcattgtctagctccagaataatcggcatatgaatccacttcattgcttctttgagcccttctaaacatgctagcacttctgcttcagccgctgaggtacactgatgcaaagttttatatgcagccaggagtactagcccctgcaatctctgatgataat

SEQ ID NO: 17188 - DNA, 1185 bp, Oryza sativa
  unsure (1)..(1185): unsure at all n locations
caaaattttgcgttaaaatagccgggttcccaagccggagcccccctggccaagggtgtggggcagtggaaacccaattttcaaattaaaggcaggggtcattttccctttcttttagccgtccaacgtccaaaagggcgggtgaatggaggccaattacccggtggggcctaattttcgactacctttccaggtgggcccttaatttgggacaatcatccgtggggtaaattgagttttgtgactgatatgcccaaatttcacttcccgcggaacatttggaccgttcaaaattggaanatccttcgcaaaaaagaaaaaaaaaagaggtgcaccattgaaacgttcttggttggtccaaattgacaacccaaaccttctcggtcccgaaaataaaaattttaaacccatgggcccatggtttaagaaaattccttatccattttaaaataataaatttgggttaaaacccaacccgttttaggtattaatatttaaggccgagggagtataacgcaaattgccaacggaggtggccatggccgtgcaagttgtttggccttcttgtgacccacccaagatcagccccattcaataattggccgttggtaagcccccaccaacagggccagtaaattgtttggcccctagctgcaccttaccatgggttgaataaaggaaaaagtacaccgaaggtcctcaaccttgccaccggaatcaaaacccgtcctcgacccgcaaaaccagatatataggatcccttacctatataaaactggtcacaataggtcccttggcggtttcgatccgggttttatcctacgtgtctaatgagtcagcgtgggacccacgtgcgccccacatgtcagcttgtccagtcagcctctatttctttcctctcttctctcccttccccttctgtctctcgctcttctctctggtgactctgggtagcccggcgccgccggccgacaggtggggaggagatcgacggtgcgaggtgggagaggaggtccggcggccggcgacgtggcggcggagacgacgcgggagcaggggagcaaggcggcagcggcggcgagatgtccacggtgaggcactggaggcggagctccgtcggggcggggagcgggtccacggcggcggacggcaggcacgggattgcgtcgcggccccacgctggcg

SEQ ID NO: 17189 - DNA, 1180 bp, Oryza sativa
  unsure (1)..(1180): unsure at all n locations
taattttcatttaggcatttattgttctttttcaaacttatattgttttctggtgaactcatcctgatgataaaatttattttatttctgctaaataaaattatatttgcattataaactttcttgtctagattcacagctcatagcaccattgcacttacctccaagcatcttatattgatatttccatcaagtggccagttgtttggggggcggcgataatcaactactagaggagcctcactagggatccttgagtactgcaaaattctttcaactgatatcattttgttctctgtgttgcagatgttccaaataatagatgccaactgtgagttgaggttcaatgcataggtcaccgcaagtccagcaatgcctgcatgtacaatatataagtttgaaaacagccaacatagagtgacttaatgcttccataatcaccaagagcctaagttcttcttagagcttacttggatttataaaaccttcaggaaggctcactagcagggtcaaagagaaagcaaagaccaagttggataacatgtttagccttgaagaaagccattccattgaagaaatgttatggaaccatggcccggagtgattgtcgacaagtcccaagtttgatttcttgaacgaccttttggccatatgctcctatacctgatgcctcctgaaaccaatcttgccaaatggtggaagatgggagccccttggnattgtgattaaacgagcccaattctctgctggtgggatgtaaaatcgctgcacattacaccnaatatattgcttcaagattttgggaatgacgctattatttattgagaaaaagtgtccctatagctcttgggactcatctggggcccanaaggacttttggcatgtggctttggagtcacaaagcttttaataaagtttttttcttgtgtggagttatacccgcacatgaaacaaacaacgtactgtgaacaaaatggaaaattggccggcaaccggggcataacaccatggtccccaaattttgtgaccttaaaccccccacccaactgttgggttttccaaatataaacaccttggctttgggccctgaaaacaaaaccacaccctttttttggggtggaagaaccggtgcctttaaagttcaaactcagacggtttaactcttaaaaattttcaaggg

SEQ ID NO: 17190 - DNA, 951 bp, Oryza sativa
caggtgatgcaaaatggaaggatagcacaagcagggaaatttcaagaactccaacagaacatggcttttggagttatctttggggctcacttttgtgccgtcgaacaagtttgtaacgcaaaaggcacaagcatatatttgtcaaagcatcatgcagaatcagaaaaggtaccaagcatcaatgagtccgatgcagaaaaggaaatcagcagcaaatggcaaaacacaaatatgataaattgcagacaagaagtatttagagataacactgaagaagggaaattgctgcagggtgaagaaagagagaatggatacattagcaagcaagtgtattggtcatacctcacagctgctcgaggtggtcttttcattcctatgataattgcagcacaatgcttctttcagatatttgaagtgggaagcaactattggatggcatcagcttgccatccacgaactggaagcaaatcaaaaatggaatccacccagttcatggtatatgtatttatatcagttggcagcgccttgtgtatcttgattcgagcagttcttgtagctgtaaccggcctcctcacatcagaaaaattgttcaagagcatgatgcattgcatctttcatgctcctatgtctttctttgactcgacacctacagggcgaatcttaaacagggtcagtccattctcctgtctcagaagtgtaaactatgtaaaataaatcctaaagaaattctatgtaaaataagtaaacatatactgcattacacaggaaagtgtaatgtgtatgtcgctttacctgagttgctaatacatgatttttgcattgttcatgtaggcttcgattgatcaaagtgtgctagatttggagacagcgtcaacattaagtgagagcacattttcagtgatgcagtttctaggaacaatactaatcatatcatatgtttcctggccagtt

SEQ ID NO: 17191 - DNA, 606 bp, Oryza sativa
  unsure (1)..(606): unsure at all n locations
tggggggntgnntttgttatcggtattcgttctcggtacccnnnnnnnnnnnnnnnnnnnnnnnnnnnnnnnnnnnnnnnnnnnnnnnnnnnnnnnnnnnnaacttctactcgttgacggtatcgaatgaactgatgcccatccgagggagacgattgccagtgcagtactgatttgtttcggttagctgcaataactcttttcagtgaaagcttgacaagaaactgcataagttctgaatccttatattagattatgacaacaatttgtctttgggttctcgttggttttgcttgtgcgtcttccacaaggttttgttaatccaagtaagttttgacttgttcggacccatgaatttaattgaacgtaaactcatgctgttctaccgtcattcaaacttgaaggataaatatcttttttctggtataagggttgatgttctcttgctgcaaaacaggcattggtgggctggtagtgatgtatgcatggaatttgaatacacaattatcagaagccacccggaatataagtcgtgcagaagcaaacatgatatcagttgaaagaatattacagtacacaaagcttccaagtgaagccccaaccata

SEQ ID NO: 17192 - DNA, 1211 bp, Oryza sativa
  unsure (1)..(1211): unsure at all n locations
ctttgtctttttccttttggggaagaaggaaactctccccctctctctaagaaaaaaaagcggttggttgttatcaccaaaaaaaacctaatttttttccccgcccagttgnggcaaccccaccttaaaacaatttttttggtgtttttccaccaaaaggacgcccccaaattcggccccctcccctccccccnnngtttcttcttctgtgagcaaaatatattttcttcccccagaaccggcgttttttttttggtgcaaccaaaaggaatatttgatcccttcaaaaaagtacccccaataatagtattatgcgggtgatgagcccaaaacttccttggtttcacctacatagaaaaaaatgacaaactttttcttttttgataaacaatggttgccctaatagcccacatcttatatagcacaaaaattgggtaagcgtgaatatacggcaccactatgaagtgaaaatgggccaaattgcggaccctatcccccaggtaaataataaaggcctcaaaagcgggcataccactaaaagtatttttagggtagatcaacagtagttttcattctgaagtaattaactacccatgtcaggtagtagacaagtgtcagcttgcaaatgtggtgcgctcgactgagaaaaacttggatgaaataggtaccgctcagcataaccttttgaggaagacaaaaaaactgccatgagtcctttaggaaaagaacatgttaatatgtagtttttctgaaatacttatgctactatgaatttatatttcattcgcagtaattgaaaatggggacaactggagcatgggacagcgacaactattttgtttaggcagaattctcctgaggaagagcaagatactagtccttgatgaggcaactgcttcagttgactctgctacagaccggattattcaagagataattcgtcaagaattcaaagattgcacagtgcttgcaattgcccataggatgaacactgttattgatagtgaccttattcttgttcttggtgaaggtaggtataccactacaatactaaaacaacctcagaatatcatgttgcacagctacgtcactctttaaatctgatatctctatgcaggtagtattttagaatacgacacccccaccaaactgctccagagagaggactctacattctctaagctaaccaaagagtactcacaacaatcgca

SEQ ID NO: 17193 - DNA, 2141 bp, Oryza sativa
  unsure (1)..(2141): unsure at all n locations
agtggctttgaaataacttattctcgtattcctgcaggncgactctagaggtattcccgatgctctaggacagttaggacagcagtttgttgagatgctctaggacagnttgntgggttgctctgctctaagacagtttgttgggatgcgttgctctaagacagtttgttgggatgctctacgacagcaccctcttagacttgcatggctgcatggctgctacaagcagctataaatatgtatccaatcctctttgggaggacatggcttttgtgtttagtaaatgaagaaaaccagaaaattgctccatctcgagtgccatcctcttctcaatgagagtaaccattgaaattctaacagcatcagcgacaggttccacatgagaaaggctctccactctctgttagcccaagctttgctcctcaaacaacggccctctctaatgatcaaacctgtaacatatggtgatcgttaatactgcagaaaagaaaagcaattgtggctacagaatgaatcaactatatgaagagcttctcaccatgtgatgtctggtctgcctttcttcatttctcttccatgttcacagtcacacttggttgagaggtgtaccattatcccatggtcaggtagcgcagtgcctagacgcgccaaaccaattgcggtctgatttgcctcctcttcgacccgccaagctatgtactccctttgagcccatccaggagggatcacaaactcagaagatgaagaacatccgtcctcatcctgaccattttcattgttacagacttcagatagctcagaagacgaagcatcttgtaaagaaccatttccattgttactgacttcagatagctcagcaggcgaagcatcctgtaaagaaccatttccattgtaacagacttcagatagctcagcgggtgaagcatcttgtagagagtcactgttctcatatttaccactctcgcagttactgtcattcggtggttcactaggtgatgcatcctgcaaagaaccgtcatactcatctttatcattctcactgctacagtcattgagtggcttaacaggtgatgcgtcttgtgaagaactatcactctcattgttagtctctttggatgacccagcaagcacaccagccccctcacacggcatcaaatccatgtaccagtagctatgtaagaatgaatcatgagctcttgcaggtgggcaagagattttgttgcaccaacgtatcaccgtgagatcgtccccctcaacgatcagctttttaactggttcatgatgctcaagcatgatttctagcccatgttcaagtgcttgaatactagccacagtctgatccacgttacctaaggaaccgatgaagtaggagagtgcaccttcatcattgtggaatacaccacccatgccagcagaacgatttttggagcagccagtgccatggaagttgagcttgatccaacccttgggtggaggggaccaagtattccgatggattgctgggattcggtgctggaactcctgtccccagaattgaggttcatcatccttgcagtcgccttgatcttgtttaaatggacgcaacattctttctttcaggtgcatatggaaataagacacgactgaaaacacaaacacaagaacattacataattagtcttattgacctaaattttgattcagcatgtacaaacactaatcaaatgaagaatgttaagtagcaagatattgcccttaagtctcaagaggtcttactcaaaagcaaagaaggaattatattccagttccaattcaaagttaaggaaaaacttttccttaagagacaaccctgcaaagttagctccaccatcaaacaagagtaccgaaaaaaaaaatgagttcagaagaaaaacacacatacttggcacatttgagttcatgtccacatcagcggcaacatcaagaaactcaaccctcagttcagagactccccagaattcctcatcaaagttttccaaaacaattacttcatcaatataattaatacttgcccaaagaaacctgtctctttccaaagctaaggaacccttgataccagtaaatccacagctcctgttttcaagtgcagcagaaatacttttcccactattcttgaacccata

SEQ ID NO: 17194 - DNA, 1714 bp, Oryza sativa
  unsure (1)..(1714): unsure at all n locations
atttttaaaagaatggggggctcctttntttacccaagggaaaagggtattttccaaacatttattgggaacccggtttttcccatcccagtttaaaacgcggcctgtttttttaaccctccattaggggaatttgggcggggcacattttttttttaaaaaaaacaatgtatttttttgggccttttcccaaaatcatacccaaaattttgtgggtgttttttgaaaaaaaaaaggtttttcaattaaaacagtttgtaaaggggggaaaaaccaaccaatttttggtggaataccaaattaaccggtttgttccatggaacccaaaggcccctttgatttaaaaacctactttttgggaaaactaaccagggaagcactttcaggtttaacaaaaggttgaagaaaggactggccctttatgtataacatttttcatatgaaactgacatgcagttactgcagaatattttaggagctttcatgtggaccattacgttgtgttttcaacattactatttttattgctttatattaggagtgttggtagtagtacaattataagctgcctaatttagctcaatgactagcatctacttaattagttattcattccatttatatgccaagccttctaataagctgtatcgtatacttacaccttcctgttatgcttgaattgcagcctttgtttgtttgatggcctcacctgcatcaccgagagagttcactcaggaagctgcccgtcagtctctgattgcgatctcccggtctgttccagcggcaggagaagccgtcaacatcaagtcaccgagcggcgccatggtgaatggccaccaccacgacgatgacggggcagagaagtacagatcaaagctcatctccatctccaacctgtcgcctgatgcccagcctacgccgtgctctcccaaggacaccgctgctgcttaggcttaattaaccgtgtgaccatgttactgcttacacttccaagtgtggatatcgtgtcccagcgtgtgtcgctaaatgctgagactgtgatcaggacccttggccttaataactgccatgactgtatatggtcttgtgatgaactgcccagtgggatactgcccttcttatgtgtgaaagatgcatcatggcttgaaatcttctcgcgtgtaaaatcagtacagcagttacctgaaaactgttttgcaaatgcagtggatcactatcttgttcttcttttgaggccctggtgtagcagtaggacgactgcattatgactctatgagtcgatgagcagtttagatcgaagcagatatgtacagtagctgctgtgaggcaaatttttcatgatatgtgacggttcctcttactttgaagtcttactttgaagtcaagatgaatctgtgaagtgagttgaccgtgaacccacttaaacaaaattacttaaacaaaattagtgtacccacttaaacaaaattagtgggcaacctatgaattaatccacgggttacttactaaccaacttgacgacgggaaccggccgtgggttgcctatttatttaatttaatctataaagcttcgcgggtgatccacttgtatacttacatcttttatcaggatcctggtgcaagaaatcatacggatttgctgttgtgtgcgtacgcgccaacgggtcaactcagcgcgcgtttcggacgttcgcaggctcattagtaaagcacg

SEQ ID NO: 17195 - DNA, 1154 bp, Oryza sativa
  unsure (1)..(1154): unsure at all n locations
aagaccatttctagaataagtctttttaggggtctatttgcgaaataagttttttaaatggaccaaattatgaaaaatacagggccgtgtgccgttcccctggccaccgcgtgcttggccaccaacgagtgcgcgcagcgctcccctgccgctgacgccgttgaagttgatgcgggcgccgtctttgttgccgcgcccgccgccgcgattagcgacgatagcatgccctccctgaccggtgttgctgtagagatcaaggagagtttcaaagttgaggagttgagactacagctccccaaccgtgatgtgatcggacttggtgcacagagccnagacgatcgggctgaagtcttcatgtaaccctgagatgatgcactgcgccatatcctcttcatcaagaggacgaccggcggcagccatctgatcaccaagagctcgcatcttggcaacgtattcatcgaccttcattggtcccttcttcgtgtctgtgaaggcgagcctggtattcaccgatcttgcacgggtgcggctggagtaaaagacctcgatggctcaccaagcttcagccgccgccttgcacatggcgacttgaatacaacatcccttctaagagatgacaggagatggcccagaacatgtgatcattggctacataacattcaatgcgcggctcgaatttgtacaggctcccatctaccgtgactgtaatttggngttagagctctcacagnaccatgaggtaaccttgatatgggtcaggcactggagggctactttgggttttccaagggaggaaggctttacggttccttgtaacgaatggccttaaccaggttcacattccctccctaggaaacaacaacgttaaaggggaaaaagaatcattttcccgggggaaaggtttttttctctgttaaaaatgggagccttaacctttgtttggccccattttttaaaaaaggggaaaacacctttcccgggtaaattttaatttagagtaagggaaatccaaattggaaaaaaacatttcctaaacctttacacggaactttttatggttaacaatttgcatttaaatttttcccttccttgggaacctcaaaaccagggtcctttttgtgcgttgtgcaacattgttcccaccccaaagggct

SEQ ID NO: 17196 - DNA, 6386 bp, Oryza sativa
  unsure (1)..(6386): unsure at all n locations
acgtgcttgatcccctngannccctcggtacccccttcatctccttcgagtcaccatcatcaattgcatctctgatagacggtcctccacttggtgcctacatctccttctgtgtcatcccttgactctcctctctctctctctctctctctctatatatatatatatatatagactattctctacacccccctcccatggatcaaacccacctcccccaccctccctagggcccgaaacccacctcccatcttagtcaaaagggcggtcaaagcatcctccaccggtcaaacccgcccactcaattccccccacgtccacctctttgttgtccttgtctcacaggaattatgcagtaacaagacgaccatcgtgcagtaacagggttacttctcgcagtaacaatattataacgttgtcaaaatatagcgatgatggatctagttttataaagctcttttttaaagcattatggtggaaacggttcaaaaatataatatgtgatgcgagagatatgattgtttaaagattagaatttcaaataatccatttgtgtttagtttgctactatgtatcatttgtgttgctcccttccctctacgcccacctctttggtgcactcgtctcgtaggaattgtgcggtaacaagatgaccatattatagtaacatgattactttcttgtagtaacaacattcgatagtctgtagaagtaccgttactactacatacatgctctgtgttactataattttcacgggatattactgtcaaagctgcagtaacaacctatatatttttgcagtaacaatctatatatttatatttttgcagtaacgttacatgatactgcacttttacaataatgttactattggaacattataacagattataagttccacaacaatataagtgatttgctctcacaaagtttaaatagagatatataaaactgaaacaacaaactctaatcacaagatgtcataaggtgaattagttaataaagcatttctttgaaccatgagtcatgggttcaagccttggttttgtcacttttaattagttttaaaattttctatccaatgtagatgggagagagatcgagagagaaaaaaaagggaggaaggggcgccaggagaggggagatggaagagagatcgagagagaaaggggggcgggatcaggaggtgggcctcgtggggtgggataagaggagggtgtagaatagagctatcatatatatatatatatatacatatatatatatatatgtatatatacatatatatatatatggggcaagtactccgagctttgatttttgcatggaaccgaaataccggcaaatgagtacgaaaaactcattatgctatattgtcgaagtcatctagctacgtaataccactgaaagaagatggggattgtagctaaaaagacagccaacagttgacaaccggaagtaaactccttgataatctcactcccgggcaggaccttccccatacctgaacctggcctgcttctcatcgttgaaactcgaaggcctcagctgccgcagttaatgtcagcatggcggcttttctgacctgcaacggaaattccaacacgcaacttcgaccgttcgacgtcgcggatcagttggtcaaataaggacgaaacacaccatatttcgtgctatcaatcatgataatttgaacagcaaaatagaaccaagttcacgcaactaacaggaacttttttcaaagtgtttgcagattatgacaggttaagaaacatctcctgttcagggtttaatctttcggttgggttatttgtatcggtggtggctgaaataccgaaattttggatatttggatctgaacttatatgaatttttaataaaatttgatcaaaattgaacaaaataataccaaattcacgaaaaaacaaaaaaaataaaaattccgatagaactgaaatttcgaaaatttcgtttcgcaattttaaaccctgctcctgttacgcaacgattacggcactcaggtactgtatgtttgaattactggttttaaatttagatgagaagtacagtgaagtggctagatcattaattagggctacaatcacagagagtgcatatagaaaaaaatagctagcaggcgatcacgaccggaacggctttgagagggacggccaggacgttggcggtggtgaacttctcgctcacgtcgagctgctccgccgacatgccgtccggcagccgccactcgaacgcgtgcagcagcgacgccatgatgaggggcagcacccgctccgccatcggcacgccggggcacagcctccgccccgacccgaacgggaggaacccgaagtccttccccctgaagtccatctcctccgtagcgcggctgcggcccacgaaccgctccggcacgaactcgtcgggccgctcccatgccgccgggtcgcgcatgatcgcccacgtgttgaagatcacggcgcagcccctgggcacctcgaatccgccgatctcgacgccgtcctccgcggccttgcgcggcagcatcacgggggccaccgggtgcagccgcatcgcctccttcagcacggcctggacgtacggcatccgcgccacgtcggcctcctcgaccgcttccctgccgccgagtgcggcgtcgatctccgcccgtgccttcgccatgacgcccgggttgcggagcagctcggccatcgcccacaccaccgtcagcgacatggtgtcgctcccggcggtgaagacgtcgaacaggatgttcgtcaggtactcccgcgcgatcttgcccgtggacatgagctccagcagcacgtcgaggaagtctccgcgcttgtccatggcggcgtcgtcctcggccgaccggcggtcgattatgtcgtccaggaccttgtagattttggccaggtgcccggatgtccagcgacgccacccttgcaggtcgaaccgacggaggaacgggaagaggtcggacacgttgggcttggctatggactcgatcagctcctccacgagctcccggaacccctgcgccgactcgccgcccacgtccaccacgtcggcggagaagagcgcgctggacaccaggttcagcacgccgccgtacacggcgtccttgacgtccacctcccgcccggcgcgcccgcggaggtacgccacgaggtccctcaccttgcgctcgtggacggcgcgcgccgcggcgagcgcgcgcggcgaaaaggcgtgcgccgccacgacgccgcgcagggtccgccacatcgggtccgcgctggggagccagatcatggaccggtcgcagaagcccagcgcgtggttggcgtccggcacggcgcgggcggcgaggcgccggtcgtgcgcggtgaacgcctcccttgcggcgcccggcgaggagatgaccacggccggggagaggcccagctggaggcgcatgacgggggcgccatgggcgcgggcaaggcgcgcgagcgtgtggtgaaggttcccgccacgcaggtccaggaggttgccgaggagtgggagcggccgggggccaggcggccaccggcgccgtcgggagcccaggcggtggctggtcaggtagaggtagcagaggagcgagacggcaagcgttgcccatagcacccagagttcgtgccccatttctgcggcggttaattcactctgtttgcgttcggcgtgagtgtcggagcctgcgtttgcgaattctgttacctgttgctgcatctacttatactagtttggtacccgtggcttgcaatacgaggaaaataccaaaacgtctacaaatccaaaaatcgagcgtttgtttctcctctttatacgagaatttttcaatacacgtgcgcatttagattggttttgaaacaaatttaaacaattagtttgatagaaaaacaaaaaactaacaaaagaaaagaaaactatgtttaaaattatctctgtgcatgtgaaggggcctttagcctagaggttacaagttacaagaggctcagtagcactatagtttccatattctccatgtgagcgaattttccaggatttagatttaacggctttgggatggatttgctggcccaatattcaaagatgctcatagaggtagggtttgcgcgtgtgcgtgcgttgtgagtgtatgcattgaactgtgtaattctaaaaaaatatatattctaatacataaacattataaatataaatagatacattaaaagttttgaagttgaatttaaattcaaattgttattggatatataaactttgagtatgtaaaccaaagtataaactttagtgtctaaacttaaaaaatgtagaataaacatgtgtgtgagttgaagcccaagcgcccgatatcccacctattggatttggcctgatatgagaagacaaaaagcccaaaaaaaagggtaaattggattcatgccattgtaaatatgtttttttaagttaaattttatggggagtaaaatgacaggtgttatccggtcaatatttcactcttatgttttttttattgtctacgatgcatgcgcgtgcatcagcttcgcatgggattattctcttggttgttatttaaatgttcagggaagaagagttaaaaggagctatatatatgacaagtactccgagctttgattattggaaccaaaataccggcaaatgagtacggaaaactcattatgcaatagtattatcaaagtcatctagctacgtagtacactagtactactcacagaaaatggggattgtagctaaaaagacagccaacacagtcgacaaccggaagttcttgacaatctcactcccggtcccggcaggtcctcccccatgcctgagcctggcctacttctcatcgttgaaactcggaggcctcagctgccggccgcagttaatgtcagcaagtcggcctttccgcgatctgcaacagaaagtccaacacgcaacttcgaccgttcgacggcgcgccccgcggcgaggctgcgatggtgagaaggcgtgcgccaccgcgatgccgcgcatggtcttccaaataagggcatgtttagttcccgacaagaaattttttaatgtaatattagatatttgatcggatatcgaaagaagtttgagatacaaataaaaaaactaatttcataactcgtctggaaagcagaagacgaatcttctgagcctaataatccatgtgggttgctatagcacttatggctaatcatggactaattagactcaaaagatttgtctcgtgattccctccccctcacagtgcaattagtttttttaatctatatctaatgctctatgcatgtgtcaaagattcgatgtgatgtttttgggaaaaaaattagggaactaaaccaggtctaatgcaccggtcacagaagctcagcacgcggttggcgtccgccacggcgcaggcggcgaggtgctggtcttgcacaatgaatgcctccttggcgactccttctggccactgacttttggtcggtggctgacatattggctcctacgacgttagggcaagtactatgggcatctaagtacaaagccccaagatgctacataggactaaatagtgaggtggagaagagaaaaaggattagagagaaatagtcacctctcatgcaaggggcagcccctacacaaacttcaataaatatgtgaaagtgttagagatattggggattgtgtggtagaggtaacctattatacatatcacctcttaatttaattatgtatgtcatgtatgaaattggatgtggtagtcacctctactataaaacttgcccttaaggatggtttggccacatttcaagtcggtttttagtatcacgtgggccctccaatccttctgctagtatgtgattagccgaaggttcattttcgttgtacggcgagtgtattttctccttaaattacttggatacatatattttttaaagttaatggtggaaataattagtaataaacccataccacttagttttattttatttttttataccggagttgacggttaaaatctgtacttaacgactgtcaacattcgggtccccaagcctaatcgttttcagggtccacctaatgaatgggtgatcacgtggagtcaaaatcggccacaccccaccagacactgcaactttcttctccctaccacgtgcacatttagatttgttttgaaacaaagttaaacaattagtttgatagaagaaataaaatactaactaaagaaaaaataactacgtttaaaaatatctgtgtgcataaacattataaatataaataaatacattgaattttttaatctgaatttaaattcaaattcgcattgggtatataaacttcgagtacgtgaactaaagcataaactttgggtatat

SEQ ID NO: 17197 - DNA, 3540 bp, Oryza sativa
  unsure (1)..(3540): unsure at all n locations
agagcgtttatattgacccattcgcgttggtccagcagccncgactcttttangttgtctccatcacagacggcagaatgcanctacctaagcctcaaggtcaaaactagtgattttatgtattttcttacatgtgctactatatttatgtgttggggttctacaatagatgctgacttatcagaatatgactatcatttttttccacaattgcaatgtggctttttttgacgcaattcacaatcgggctgttggcaacttttttgacaagttgacaagcacgatcacagcagcttaaaccttgcggtgatcctagagtcgtcaaccacctcgatctagcaaaaggctaaacctaaatgggttttgataactaaaccgtctagcggagccgatttctagataactacccgtctcgtgggcaaaacggaagattttcaggacaaacctacaaagagatgtcgcactctcgcaacggcgacggacggtttacagcgcaaaccagtaaagatggacaaactaagagaaaaactaaaagcaatatgaaaacacgattcgattgattgatagtagattatttttttacaatgaaccggccatgtcccttatataggggttggtcttgccctctacaggccctcctccatgtccaactcggggtagaaaccaaaggaaacccgaaacatgtcttcccgagcaaggaaaccccaagacccgacgaaacacaatcggactcggtcctgccggtcagaccggccgcataccgccggtctgaccagccctcaaccggcggtctgaccgcctaacacacggcggtcagaccggcccactcggaggaaaccggtagacttccaaattttggcaatctttcctactttaatcctaggtgccaaatttgggtgtaaacacatgcccccctgcctttttgatgaacaacgtgaatctaaaagcatagaacatgtttttggtcttaggacgataatccaattaccggccatagtacctcctaagcgtcttgccaaacgctcaggaattatttcttcaagtatttcccgttgattgctcgctgaaaacactccccttgaagagtctccaaaaaatatgcgtttcctcgaacaatgccgcatactcgataaggaccctcccaactaggagaccacttaccgaactccttggatcgagtacccaaaggcaaaattgtcttccaatccaaatctccaacttgaaacaactttgcttttacccttttgttgtacgccttggccaccttcttcttctctttctctatttcttccaatgccttcaagcgcttgtcgatgacttcatcaagattgtctcccatcaacgccttgtaatcctcacttgacaaatcatcttgcttgatataacgaagagaaccaagatttacctccaccggtaaaacgacttcttgaccataaaccaactcaaaaggagtgactttagtagcaccatgtttagatatcctatgcgcccacaatgcttcagaaagcacctcatgccacctctttgggtattcctcaatcttctttttcactaacttcaaaaacgttttattactcgactcggcttgtccattagcctgagcgtagtaaggagaagaactcaacaatttaacaccataagattcggcaaaactcttcacttccttagacataaaagaagcaccttgatccgtagttaatgtttgtggaataccgaatctatgaataatatgcttcaaaataaagtcaattacctccatatgagtcatattcttcaacggcacggcttcggcccacttggtgaagtaatccgtagcaactagcacgaacctatgcccctttgatgacgaaggataaatttgaccaatgaaatctaaagcccaccctcggaacggccatggtttgattatagggttcaacacggcggcgggcgccaattgaacattgccgaaccgttgacaagcctcgcatcctctataatatttgaagcaatcatcaatcatcttcggccaatagaaccccgctctcctaagcaaccaattcatcttgtgggccgattgatgagttctacaaatttcttcatgtacctctcccatagccactctagattaatcttcatctaagcactttaacaagacatcatctatatttcggcgatacaaatctccatcaagcaatgtatatttgaacgcttgccgccgaattttccgaacaaccttaagtgtaggatctttcaaatatcgaatcaaaggaattctccaatcctcttctgtttcctgggcacaaatgtctgaattcacaattaattcggcctccaaattgatcgaaacgtgccccccagcgctctgcccagaaccggttgttgccggtcagaccgctcggggtcgccggtcagaccggcggcatgcggccggtcggaccgcccctggtcactggtcagaccggccgtgcaatgccagtcagaccgcccctggtctccagttttgccaatttcacataaagatttaaaaccaagcaccggctcttctaatattagaaataatcccttcttcatattatagccagatgcttgttgtgccaagtcatttgctctagaattatcatgcctagtaatatgtctgatagcaaaattatcaaaattggcaataatatctaaacatgaatcgaagtacctatttagtgatccgtccaagcatttgtagactccgacgacttgttgcaccaccaattccgaatcaccaaaagcctccacgtatttagctccaaccatctccataacttgtaagccgaataataaagcattgtattcggcttgattatttgtacaataatactccaaacgaaccgatgcctcataacacatgccattaggtgaaaataaaactacccctatgccttgaccttctttccaagaagaaccatcaaaataaattctccaaggtataacttcaactaagcaaacctccccctcataagcaatatctatatgatggtctactataaaatcacatacaatttggcctttcatagatttcaatggttcataagtcaaataatattctatcagagcatatgcccacttgccaattctcccacttagaattggcctttgcaacatgtgtttaataacatcggcttgacaagtaactatgcatgtactagataacaaataatgcctcaatttggtacaagcatagtataagcatagacaaagtctctctataaagacatacctcgtttcggcatccaaaagacggcggctcaaatatgtaatgatatattccttgccatcttcctgttgcgtcaaaacggcaccaatgactttgtcttcggaggcaatatataaccgaaacggctttccggctttaggcgctcacacaacgagtggagtagacaaatantctcttcaactcttcanaatgccnccttccttttttgggttttttgggggttttttttttttttgggggcccccccccccccagtaaaatcggcttttttttcaaacaaagtataggaacaaaagcatcgattttacccg

SEQ ID NO: 17198 - DNA, 3072 bp, Oryza sativa
  unsure (1)..(3072): unsure at all n locations
gtcgccagtataattatgatgattataaatatgttcatgtatnttatgcgttatctaaatttntngntataatatatctcgttctgtttaatgtcgctttntttttcnnnnncctcccnnaaggcgtgttgtgattgcataacgnccaacnncagccnncagnnnacnatagaggagccccaaaatgactgctctgattatgcccatggggagctcgaagtgcaggctttcttctgcttggagccggaggaggacgtcgatgaggggctcctcgcgggctgcggcctgacacgacctctacttctcgaggtgctccctgatgactcggtccatgaactccatgagggactcgacgaacgcctccgccctgcgcagcgttgtgctgataatcgcccgcgccagcctagactacgggaacaggtcggccatggtgaggctgcccgccagccgcaccggctcgtcgacgtaccggagcagggcgtcgcgctcccggaaccgctcgcccatcacgatgtgcaccgtcgtgtccgtgacgtagttgccgaggagctcgctcagattcgtcacgagcggcggcgaggcgacgccgatggcccggacgagccgcgccgtctcctcctcgcggatggcgcggaacgccaggatgcgcctggggctcagcagctcgaggcggcagatcttgcgcacctgccgccagtgctcgccgtagggcgcgaacgtgatgcccgcgccgcgcctggtgcacaccttcaccacggcgctcagcggccgcgacgagaagttgtcgtcgtgcgtccgcaggatctctctggccgcgccggccgtggacgcgacgacgaccacaggggcgtcgccgaaggcgaggagcatgagggggccgtggcggcgggccaggtcgcgcagcgcgcggtgcgggagcgcgccgaagaacaggtggtggaggctgccgatgagcgggaggcgccatggcccaggaggtagccgcaggtcgctgtcgcgtgagccatggaggaagagcgtgatgaggtagtgtagaagaggaagaagagctagcaagcagcagaacacagctgcgtccatgattgagcaatccgagctgtgtgattagtttgtgattaggtgatcccctgctgctcattttctattgttagctgaagttgacttaagagcatcgcattattgttggtgggaatattaatctatcgatcgttggaatactaggggcgccacatcagcttgctttggaaaattaaaacgcacatactccctccgttttaaaatgtttgacaccgttaactttttagcatatgtttgaccgtttgtcttattaaaaaatttgtgaaatatgtaaaactatatgtgtacatgaaagtatatttaacaataaatcaaatgatatgaaaagaataaataattacttaaattttttgaataagatgaatgttcaaacacgtactaaaaagtcaacggtgtcaaacattttgaaacggagggagaatatttaacaaccaccgtggagcttgtgtttttattgactcactaatggttctccaaatgcgttgtatttcgtctactacttcctccaggttgataatacttgtcgttttagataagagcatggtctctaaaagacaactattttctattataatgtatatagaaatatcaacaaatatatgattttattaaagtacttttcaagactaatcacgcatatgatttccatatttttaagataactattttaaaaattatttatagtcaaatattttaaagtttgactttacccttattcaaaatgactaatatttattagtctggggtggaaaatttgggcccatggttttcgtcgtgcaactggtctttttttttgttacaaatagtaatagattcgtaactgaatttggagcttgtttgatccgttgtcttgaaatattttaactttatcaaattacggtgattttggaaactagtactctaaacactgtcaaggtacttaaatagtactcccttcgtccctaaatatttaaagttgttgactttttacagagtaaatttcactttgggctagttttaatagccaaagtttcactatggaccaggcctacgcccatatttttacataacaccaggtaatattatcttccgttgcactttggatcaagctgcactaatttgggccaccacgtcatcttcagcccaatccacgtgagcagcaggctggtggactcagttcacggaagaatcatatggagccgccgatacacgatgcgtataaaactagcgccagcctcctctgcttgagagaaaactagcgcaacacaaggttgggcgccccggcgctgccgcgagccccgctgccgtcgtcgccgtggctaccgcgtccgccatcgccactgttnnngccncgtccgccaccatcgccgtcgctgtcgtcgtcgccgcggccgccaccgtcttcatcgccgtcgccgaggggactacacaagctcgcataatgggagcactactcagcagccatcatgtgatctagtttaccacccttaatccatctctaatgtcaactttagtgatttccggtgaattgacaccttaaccaggttgcagtagcagtggaatcgagcaacaagaattggtcgaatcgatatgggagttcgcttcaatatatatatttttagaaaatcatgaactgtagttaagagaccgatcatcttaagctaacatacgagtttttttaaacagatttcttatatgattacttctgtattaccgaaagtgaacgatcttagaaaccgactcaaatacggatatgtatttctaaaagtaaacgaacttaaaaaccgactcatacacgaatgacataccaaaatactggtaaaaacatttttaatttttataatagtagagatttggtcaaacctaaaagttttgactaagtaaaaagtcaaacggcttatataatatgaaacggagaagtattaattaatgtgcatgtatataaaacagccataggccatgtaacgagggataggattgatttttgtagctgttgcgcacccaaaactaacagat

SEQ ID NO: 17199 - DNA, 10065 bp, Oryza sativa
  unsure (1)..(10065): unsure at all n locations
ctggctccnattgatttgagtattccttctcggtacccccatttatatgttgactttatgatgggctaatagtaggaagtagggttgaaactggttcggatagtttccgtccgttcggaccatttttgggattcggatagtttcggtcagaactatccggaaattttcggattcggaaacgaattcggatattttttttcagaaacaaaaacgaatacagtatgggtaccgtactatctgtcggaatcggaaaatggtcggaaactatccggaatttttttcggttatccgcagacattgagcaaattttagaaaaaacacgtatatatacataacttcttcatacagaatctgatgaagacaaactttatatcaacattgtagagctcgatgagatctacaactttattattgactattttattatttgaggatatttaagggtctaaatattcattacaatataccatattaatttttacaaaatctaagatctacaattcaaacgacatctgatggagattgtcagggttatggataccacatacctaatagtagttgactaaatctcagcaggacccaccacataccatgtctaatacggaaactgacctcgagggagttccggataaggaaagacaaccagggttctacatggaaacgacaaggactactcggattgtatccatatttgtttccctagttctacttgaacaaggggacacctatgggtataaatacaagaccccctaggaggagaggggacacgatcacctcaatcaacatacacggaacaacagaagccacaacatacaagccaacatacgccaagacaagacgccggatatcgacttcaaggataggcacggctagttccctacggtgtctccggatactgtcaggagagacgaaagtgctatctttgatctcgccaggcacggattcgaggaggaagactatcctgttgtcgactacgagtcagaccttcagaccgccatgtcgacaacagttagataggctaccccaaaatattgtactggtgtgattatgatgaataagagcaacgaccggcttcggccaacaggatgtagggttattacctgacaattcagggcccgaacctgtataaaaatccctgtctctgtctcttttaccttagtctcgcgtatactctagtaccaacgatccccatactatgcaaataccagaattgcgacatcaaatgttgacagagatgtgttccatatcaaagttgtagagctcaacgggatctaccactttgtagtttataatatttgtatttgaaagcatttaaagtataaaacaaacattacaaatttcgaagatgtgaaataaaataaataacatctccaattcatacaatggtaagtaagttatacatctagtaaaaggtcttgggaatagaaaatgataatcatatttgcatatgaatctcttagaggaacatccatgaaaatagattttcacatatggttgtaggaccgtctacattgacgatacaaatgttggagatgttgaactaaaataataagcgatatctcttccttgatcaagaaactcaatttgagggggtttttatataccggtaaatattcgctaccgtattcgttccgtctcgtattcgccctgtatctgtattcgataatattcgatttcatttccgtatccgagttttcgattctgattccaattccaaaaaaaatatgaaaacgaatatgataaagctagtttccgtctgtttccgatctgttttcatccctagtaggaagtgagctctactattatccttgctctaatggctacaacagatgaccaaatccttactagaggagagcagccgagcggccacactgagcaacacaggtgaaatcctgattaggccgaccatatccaaatcagggcagtgctgtagccagggggagggagggctgccatctactgagtgggtggtggcgctagaaccctcgtggcgtcagcttcgcgccctagcgcgtgacttcccgcgcggttcttctcaccgtaaacagagtccaccagccgctgctcacgtggtttgggctgaagacgacgtggtggcccaaatctgtgaaacccggttcaaagtgcaatggaaggtaatattacccggtgttatgtgaaaatatgggcctcggcctggtccatagtgaaactttggctattaaatctggctcaaagtgaaatttactcttgaagagtatgtttgaccgttcgtcttattcaaaaaaaatttaagtaattattaatatttttcctatcatttgattcattgttaaatatactactactacttaaatatcacaaaattttgaataagacgaacggttaaatatatttaaaaaagttaatggcatcaaatatttagaaatggagggagtagtattttgtgccacaagcagctctatgataaaaatagaacggagatgctcaacaaagataaccgaacacaacgcatgctgatacatggcacggccgcatgcccttgggccgtgcatggcatggagttggcccgtgcagattgacgttgacaattaacatagtcattaaagcagcaaaggggaccggtatcaagtgaaagacgaacagttggaggctcgacatgaaggggtacgtaatcacaaaattagaagatgaaactattgttctttttttgacacgccaccaacacgaaacggatccacctaaagctttgcagtgttaatagagttgccaaccacctcaaccttgagaaacctgctaatcaaggtgggtttaccagatcaaaatcggctagcggagctgatttagataaattgggataaacacccgtgtcatgggtggaatggaagatttataggacaaatctacaaagaggatttgcacttttacggtgaagataggtggctttcagcttaaatcgacgaagatgaacgagctagactataaacacaaaaaaaatgcaaaactgaaaaaagattcaattggctaattgcgttgattgtacattggtttcttaaattggacgagctatggcatttatgaaggaattggtcttgccttctaaaaaaaaggaattggtcctactaggtctagaaatcagttaggactcgacaaacatcaaactcaatgacggaacccgagaaattttaaattagactcaagtcgaactctgctgatcagaccgatcacctgttgtgggtcagactagacttgcgcaaaaagcttaggtattttctaaatctaaccacatttcccttttttgtttgtttagatgccaaatctgagtcctaaccgaaacaacgattaattgcctagagtattttattagtttaatgttttatttatgagctagtcagctagtgggtgattgctaggccaatattcatatagtggtttttggggtctgagtcgacttgtgttgtagctaggcagaccggcctactcatataaaatcgttgctatggcgcagtccaatgtgtggacaggaacatttcaatccaactattatgaagaaaacattaaaaaaaagcctgataatcctcaacgtcgggcgcccgatcggccggcccgcacgcgccgctgccacgtggccccatcacgtgtgtccgtatgccgccacgcgtacacggacaatttgttttagctagtatacttgtgatgttgcactaagtatagatcaaattttgcagtgaattgaaacattcttgtgcaacaaatcacccatatatttaggaaaccctctattaagggaatttgtttcaatttttgttccacaaaaaatgtttcacctagtgtactcataatgtttcactatgtatagatctaatgttgcagtgaattaaaacattcttccgctatttgctgaaacattgtctttatataaggtgaaacagcgcccgatttaaacgattgaaacattttcgatctacttagtgaaacaatccgatatacttggtggaacaacgtgcaacatttataaataattcaataataagataattttcttttatcagaatataaccatgtgtggtcttgttttaaagatttaattacaacgaatttaatggtgcaatcggatcatgatttggataaataatttaagagaaaaaaattgtttaaagtggttttgcacgcatgtgtcatgctgacgtcgtgctgatatcagcatgacatgggcgcctgattttcccaccccgggatcgggcgcccgtgtttatacccaaatttggcatttaggattaaagtaggaaagattgccaaactttggaagtctaccggtttcctccgagtgggccggtctgatcgccgtgtgttgggcagtcagaccgccggttgagggccggtcagaccggcggtatgcggccggtctgaccggtaggaccgagtccgattttgtttcgtcgggtctcggggtttccttgctcgggaaggcatgtttcgggttttctttggtttctaccccgagttggacgtggaggagggcctgtagagggcaagaccaacccctatatatgggacatggccggttcattgtaaaaaaacaatctactatcaatcaatcgaatcgttttttcatattgcttttagttttctcttagtttgtctatctttgccggtttgcgctgtaaaccgtccaccgccgctgcgagagtgcgacatctttttgtaggtttgtcctgaaaatcttctgttttcaggattaaggtgctgcgatcgtgcttgtcaacttgtcaaaaaagttgccaacacgatttttggcgactccgctggggaaaagatccgttcatcgtcaactcgacttcgatttcgccatgacgaagccgccatccaagacggaggtggagccatccaatgtgataacggtcacattggatgacctcgaatgagaagatcgtaaagctatggaggagtacatcaacgagctcacacgggaggtgttgatgagagcaagcactaggactcatcaaggcgtgaccatcaagcccaggccatgtcccaagctcgctcccgacttggtaagtaatgatgaggtatcacaatctatccaacaacaaattgcatctacaatagattcatctatggttgcttttaaagatcagttagatgcaatttttaagggtaaatttgatgagtttttaaggattaaattcggccctcttatggacgattacacattaaaggataaagcctctaccactgctaaccaacctcctatagatgaaacgggtagtaaaaccgacggaacggcgttcacggccggtccgaccgggcctgacggccggtcagaccgcgacacagccgtcggtccgaccggccagacggccggtcggaccgggtatcaccctggcggtcaaaccgggactcaggccggtccgaccgcacctctgaacgccggtcagaccggcgcaattattccgatacagggaatagatccgatgactaatgctagttatttgtatcactttagaacattcgatcctcctgtatctactgctacaagtagtccccaagttcccccacatgttcctaatgcttataatgatgtttctaggggtatcctcccgataccagacaaggccaatataatcatattgtgccacaaacacaacctattaggccaccaaatccaccgccaaatcaacaagggcctaataacatggaggatataattagtgatattattaagaatagattcgggattgaaactaggaatcgtgctagaacttacaaaaaaccgtatcctgattattatgataatgtgccgtttcctcgcaattatagagttcccgaatttgccaagtttagtggtgaggatggtaagaccacatgggagcatgtaggtcaatttttggcgcaatgtggtgaggctaatagtgatacttttaaattgcgcttgttttctttatctttgtccgataatgcttttacatggtttacttctttataggcaaattctattcatacttggactcaattagaagaaaaattccatgattatttctatactggagaaactgagcttaggtcatgtgatttaacatcggttaagcaaaagtataatgaatctgtcattgattatattaagagatttagagatgttagaaaccgatgttatactttgaatataactgatagagatttggctggtcttgcttttaatggtttaattgctcctcttagagaaagactagatggccaacaatttcttgatgttagtcaactcatgcaaagggctctggctcaagaaagccgggttaaggataatagaaaacttgctagaccatttgacaaaaagcctaatgttaatgtggttgattactctgaggctagtgatagtgaggaagagggtgatcatgatatttatattgccgaatggtcatggactaataaaaataagccttttgtttgctctaacctaatgccgactcctcgcaaagatcgacaaagtgaggttaaatatagttttgatgtggccaagtgtgataagattttttattatcttttgcaagagaaacaaattagattacctaaaggccatgtcataccatctcaagaagagttgaaacgtcgagcatattgtaaatggcatgattctcattctcattctactaatgattgcaatgtgtttcgacgataggttcaatcggccatagatgaaggacgattgaagttcaccgatagctccaagataaagcttgatcatgatccttttccggtgaatacaattaatttcaatgataagaaggtgttgattcggccggagcaagccgaatctactaagggaaaggaactggtcattggttaaccgaggcctaagatggtagtgccaaagaagccggaggttggcgtttggaaggagaataaaagtggagcttcaacttctaaggcccctaggaagaccaaagtaacttttgatatgcttttggagaagtatgagaagcaaggtagtgagagaggtcgcaacaaagggaaaagaccaagatcacctcctagggagcaatttggtcattcatcaagacggtcgtattcaccttcatatcatcatccacaagacatgtcatggggttcttatccaatgccgccgccgggttatccttatccttacttcatgccatggggggcaacgccgccaatgtttaatcatatgcctccaatgcaattcaaccaagggtggggaggaccaaggaggccgattcatgagcgtttgtcttcaccaaacaatagccggttttatggtaagaatcaggctaatgaagaaaagagggaaggaaagcgcgtcaaggtggagacgaggacttcggaggtaattactatcaaagtggggtttcatgatgtgccaatacctactggagatggagttggagtgtccccgaacaaaaaatccgaagccggtaccagctcctcgcagtcagccggtcaatccaggccttctagccggtctgaccgcagtcatgcgaccggtctgaccgagccatcaggccggtctgaccgtgctccggatgtcggtctgaccggcgcgtctggccggtctgaccagtggtctatggctggcctgaccgggctccagcgccggtttgacaggaggattgcaaagggcgatgtggaagcttcatcgtcttcaaacaaagttaatacagggcattatttacctcctggaacagagccgaatcctaggtggatgcctaaggatttgatggcaactcaaaagagaaggttgcaacgtcttcgggcccaagagctaagagagaaaaaggccgaagagcaaagggataaaaggtttaataagttgcgaccaccaccggtatggaggcctaaatccatagagaaggcaaaaccgattgatgtagaggagaaggaagaacaatcggtagataaaggtgaatcatctccaaaagaagacatggatatcaacatggtatgtatgttgcctatggagttttgtgctatggatgaagccgaggttgctcaattctcattaggtcctaaagatgcggtttttgagaagcccaatgaatcaaaccgtcacatgaagcctctctatctcaaaggccatgttgatgggaagccggtctctaggatgctagtggatggaggtgccgctgtgaacttgatgccgtactcattattcaagaaattggggtgtgaggatgatgagttgaagaagaccaacatgattctcaatggcttcaatggtgaaccaacggaggcgaaaggtatctttttggcggagctcaccgtgggaaacaagacgttaccaaccgctttcttcatcgtcgatgtgcaaggtaactacaatgttattttgggtcgttgttggatccatgccaattgttgtgtgccttctaccttgcatcaatgtttaattcaatgggacggagatgatgttgaaattgttcaagcggatacatcggccgaggttgcaatggccgatgctacttttgagtagcatcatgggaatatccaatgcttatcggggagggatctttctagctatgattttattagtatctccgatggcaaatttgtacctatctctgtaaagccggctagtgtggcacggctaagccatataaatttgtataatgagtaaagaggctaatttagagtggttacaaaagagggtgcaagaatatcggtctacaaagaacgatattggtgaannnnnnnnnnnnnnnnnnnnntggagaagcttggaaaaggatttacatcagctgatccattagaggaagtagacataggtgatggaaccaaaccaaagccgacttttgtaaacaaaaatatgagagccgattataaggttaagataatcgagctacttaaaaaatatgttgattgctttgcatgggaatatcatgagatgtggggtcttagccgtgagcttgttgagcatcggcttccaattaaaccgggttttaggccttataagcaaccacctcgtcgttttaatcctttgctatatgaccgagtcaaagaggagattgatcggttgttgaaggcggggtttattaggccatgtcgttatacagagtgggtttctagcatagtcccggtggagaagaaggggagtggtaagattagagtttgcatagattttagatatttaaataaagccactcccaaagatgagtatcctatgcctatagccgacatgatgattaatgatgcctcgggtcataaggtgattagctttctagatggtaatgccggctacaatcaaatctttatggcggaggaggatatgtacaagacggcttttaggtgcccgggatttgttggtttgtttgagtgggttgtcataacttttgggttgaagaatgccggtgcaacatatcaaagggcaatgaatttaatctttcatgatttggtaggtattatcttagagatctacattgatgatattgttgtcaaatcggatggtatggaaggacacatagccgatttgaggttagcttttgagaggatgcgccggtatggtttgaagatgaactcacttaaatgtgcttttggtgtgtcggcggggaagttcttaggattcatggtgcatgagagaggagttgagattgatcctaagaagatagaaaatattcgtgatttcaaagcgccgacatgcaagaaggaggttcaaaagttgctaggtaaagtgaattatttgaggaggtttatttctaacctagcgggtaaaatcgatgcttttgttcctatactttgtttgaaaaaagaagccgattttacctggggggcaaaacaacaagaggcatttgaagagttgaagagatatttgtctactccactcgttgtgtgagcgcctaaagccggaaagccgtttcggttatatattgcctccgaagacaaagtcattggtgccgttttgacccaacaggaagatgccaaggaatatatcctcacatatttgagccgccgtcttttgaatgccgaaacgaggtatgtctttatagagagactttgtctatgcttatactatgctggggggatcctctaaagtcgacgtgcnggcntgcaagcatgcggttatgatgagtnttcaat

SEQ ID NO: 17200 - DNA, 9145 bp, Oryza sativa
  unsure (1)..(9145): unsure at all n locations
gacgtgtaggttagacaatcatgcngcacgccngcaggtcgactctagaggatccccctgctgcccatctgcctctggtccggtgccatcatctccatggccatctctctcgccgccgccgacctctcacctgcatacatcatctgtgactgcatgccggcctgctctatattggaacaacctacctgtatgaacaaacaaactcctcaattgatatgcaaactatccctcccctacaatgctaacaaagcgagtgaagctactgatctttaagctagctggtacatgcagtgcagcaaggaactcaatctacaacatgtgtagtagtgagctatagttagtgatggagaatcatcaaatatgtatcagtctcagaaattcagaacggtctctggctgcctaactacctatatactatgtagctaaatgcagcattaagaatggtccattattccatgcatggattgcattgctcaaggggagtatgaaggaaggaaggaagtggagtcagaatatatgcttcgggagatatttcaattcagctgagaaaaaaagcgactttgcatgggatctatacttgttctacctatctggtctaggaagaggaatagatggaagcacaaaagcatgcagtcgactcgatcttgagtcgtcgtctatctgtctgatctatacaacggcagttaatcccctgttttgtgcttactagtcgtcaaccgatgcgttgcacggtctattagtattgacagtaaaaatttaaattctaattaaatgtgtggtttgccttttgaaattatagatactcaaattaaaaaaagtccacgtcaattacaacttcttaataataattaaaacactaaaattgagagtgcaagatgggcacgatattatatttataaattataaattttagaattactaaattgaaatccgtgctatttctaattgcatgactatcaacacagtctacaatcgtattaatgtgatccatgaaattaacatgtgttgagtgcgctattattattcatattataaacaacaattttttataaacagagctcggataaattagatatgaattttcatattacatacagagcttggatgaattagatatgaattttaaaagttttaataacaatttgctatcagcaaaattaaaataaacgatttattgcgcaacaaaggagagcgctgatgttagcgaggggatggaccgtcgccgacatgcgggtcctacctgtcggtgactcaaggcaagcgagtccacggtggaccgagtccacaggacagggggcgattgtaccacgtgactacacgtgtcacacacgtggcgccaacgaggcagccagccgtcccgaccgagaggcgatggccaagcgcgtagcccgatggtcatcgtcggcggaggggcggcacaaagcagcggtggcaacgaggagatgcggcgaggcggtggcgcacacacggcaaaacaaagtggaggaggagggggcctcaccgacggtggtgacgaccggtggcgaaggacgacgacgaggatggtggccctaggtagggaaaaagaggactagatagggaagataaaggagaaaaggaggccggcggcgagaacatgaatggcggctcaccgccgagggggtgacggcgagatccggcggcgatcggtggtcatgaaccggcggacgaggcggcccacaatgatgcgaacccaatggcggtgttggcttgccgaggcgcggtggctagcaatggcaagcggcggccagagcaatggagatggcggcggtggctagggcgacagcgcggcgacgacctaggcatgggagcgagcagggagcgagcgaaaagagagaggagggtacgagtaggggtggaaacgagtcgagccaagcctggctcgactcagcttgcaggggtcacaacaaactaggcttggcttggcttggctcggctcagttagggaaacaagctaaaacttgagcttggctcaagccagctcgagctggcttgcaagcctttatgttgaaacacctcttcatatatatatatatatattgtaattattaaaaatagtaagaacaaattatcaacatgtacaatttaaataagtttctatattcaattcttcacaatcttaatgataaatttcaagttgacaaataataacgccataaaaagtaaaatagtcgatataaatacatgatggcttaggctcgcgagacaaaacaagcggctcgcgagccagttcggctcggctcatttcagcaacgagctgaaaaggaagcttgggcttggctcatttggcttacgagccgagccaagccaagccaaccaagctcgagccaagcccgagctaagtttacgagcccgggctttttttccacccctaggtacggggatgctttttatagcggtggggagtgcagtttgcggtggatttagcggcggccggcggttaggatagggtttaatcccagtcgcataggagggggtttcagcgcgggagatgcaggggagggaagccgagttggttagggacttggagagggacatggcgcggcggggcggcgcatgactgaggaggcggcggctagggcagccggccggaggaaggggacgggcccgacaggtgggccccacctgtcggtgacccgaccactgtcgagcgtgggcgagctgcggccttgggctggcctagcaaaggcgtgcgcgctccagggagagaaatgggggagtgggccggaaactgccgacggccgaagagagagaggaatgaattttcttaattaaactaaatcctgtgaattggtgtgacttattaaaattatttctttgctatgtaaattccgctaaaaatacgcaaattccgctaaaaatacagttagcgtatttaaacatggggaactcaagaaaaattctaccatactaattcctcttattatatgcatttaataattagggttaactccaaattaacttaaataatttcgcggagcgatttcttaatgaattagaaactagagaaaaagggaaaacttccgggtgtgacagagaaggggtaagtagttgtatattttaatagctatggaattgtaatagtatttcaaatggttaaaaagtaatgatattttttaagactgtgaaaattgtaatggcatgatctaattaatccatatttaacacccaccaactatttaaaataccaagtgtttaaccgtgttttagagaaagcaaaggtgtataaaatggacttgtcaaaaaagttgtgatggccatacgtaaacttaaacctccaatcagaatgggctgggattttgatcggcctcaccaaatggggccttcttcttcttgcttttttttttgaactaaaagggttcttcttttgtgtctttttctttttgagaacacccttcttttgtgtccataccctgaacaagacaaaaacttttcactcatcacatcgaatgtttagacacatgtatggagtattaaatgtggacaagaaaaagcatggagtattaaatgtggacaagaaaagctaattacacagattgcgtgtaaattgcgagacgaatcgtttaagcctaattgctccatgatttgataatatggtactacagtaaacatttgctaatgatggattaattaggcttaataaattcgtttcacagtttcctgacggaatctgtaatttgttttgttattaaactacgtttaatatttcaaatgcgtgtccgtatatccgacgtgataactaaatctaaaatatttccccaactaaacaaggcccgagttggcatccaacgtataaaagaaatccaacgtggcccctaccccgggaggacagagccattgaagggaggagtgccattccgctccgccgccgcctctggcttctgcggcgcttgcgatcgaggtctacctagccggacggacgcgccgcgctgatcgcggatgggcggccgggcgcgcgcgccaccggaatggcgtacaatcagcgctccagaaatcagacaacaggtttcgtgaatcgtaaatccttctctccagcgtctttcctggattaattaactcgagaaaattgggtatcgcacgaccgggcaatgtacgtattcattaattccttgtacgttggtagataaggtttctacagccgtatgtagaaaagaagatgaagcgggtagagcttgccagttgccacatcgtcgggtcgtaagtcgtaacccctagtcagtgccagaaatcgaaccgacagtaaacattcagaactgataatatggtcatcacagctaggttaagaatcggcactgatggttcccacaagacaaaaaataaaaaagggcagctcgatcaatccgttgattcattgaacctattcttcgagtggtcaactgaacctcaggtctcccgagatcccccaatcaacatagacaagtagacaaatatgacatatccaattaagatcaacatcactaatactccctccttccctaaatatttgacaccgttgacttttttaaacatatttgatcgttcgttttattcaaaaacttttgtgatatgtgtaaaactatatgtatacataaaagtatatttaacaataaatcaaatgatagaaaaagaattaacaattacttaaattttttgaataagacgaatagtcaaacatttttaaaaaagtcaacggcgtcaaatattttgggatggaggtagtatatcgcatcaccaacacatcatcgacatgttcattaaaaaaaaattcatcaagtcgactaagacccattaataaatataaatagatcgcatgcatgtttatctaacagatggagaaaaaaaatcaggaatcaacaaatgattaaaagtaaagcacatgtcacggcaggaatatataatcgtactcggagtaggcactgtgggtgcagtggtcctcggggatgtgggcagcctccatccctgatgcattcaacgccatagcggccaggaggaggccatagacgtcgaggttggagtcgccggtggagggatgcagggcagagaggtcggaggcggccggattcggtggtccatggtgagagatggggaaaaggggaggcaaccgttggtgggctcctgggcctcaccaccgacggggagaccgtcgccgccgatgcccccgtggccacgaggccggctgctactgccggtaaccatgaccataataaataataacaagaagcgtaaaaaggaacattacaagatcaactaaaatttagaataacaaatttaattaaattagaaattaaattactatatcaattgatagaatctgtcgtactaattttccagtcacaaattacaactcaccattatcagctttactgttgtcaatgataaatggcctataaagttgtagggatttatgtgtacatgttatttgtcaatcgtcgttagactctcgtctagtctcattagccattagaagctttatcgatcaccgatattgtagcaaggtgatacaattaacccaacacaattcgtggcctctaaatagctaggattcggtcatcatataattattaataaacagaaaaatgaaggacgacatgacaacaagtttcatgccgcaacgagcttcttcttcattcaccactacagcaacactttggactgcgagaatagacctccaaaggcaatgcctccataagaaaatggaacacgcacgcgccatccttgccatgatccaactagcaaaggccatactattggtttttacctagaataattttatcatccttgagaagatatcgagaggtaccatattaaaagtgagaacactagcatctgtagagacctcagcaactaaaatattttgttgattgcaaatctcaaagatccttgggaagcaagttttctgagggcaagtgccataccacgcatcatgccaaaaccaaatgtggtctccccttcccaaagacctttctgaacctaatcttatccatttcctgatattcataatccccttctagaactaggatccagaatctggacattgaaaaaccccagaattcctcacatactttttcctcaaaagctcaacacacaaactcttatccagggactctatttttatcaaccatttagcaatcaaggcaatgtttaaagctcttgtttcagtgagactcaaaccaccaaaatcctttggaaaggctagatcagtccacttaatcatatgatatttcctagaatgtttgtcaccagcccagtagtatctacctcttatactgtcaaaactctgatgaatcccttcagggagctgatgcatcgccggtagtgagaggagggttggcatgcgagggttttggtatagtctgcatatcgcctcctggaccccttgtcagagggatcgattctcatatattgccatctttggttgctgttttttttgtttgaacatgatttattatcatcatattattgtgatgggagcagttttggagatgggctgcatttgagcaaacttaaattgagatagctcaatttgggcacatgttttcattgtggatgttgacggttgttatcgatcagtttcgaccatcaatattactaaaacaggagagaattggtgatgcttgcaatgcatatgtttgttaaaataataatattccactagtattaggtctactaacctttttacagagaatgacaacaaagtggaggagaatcgacatcaacacaaacgataaatcaatcggacgatgtcgacaaccaaacttatgtatgaatgggccaagaacttagaattgacacgatgaattgggccaaagttcacaagtctgcagagtggagcaatagaggaagtcgctagccgaagatgggctggtttgggccagcccatggttcggccgaaccagggggttcggccgaacccccatctccaccgttgaggccagggtttggcatggacgtccaagatttcaccccaatgacggttggagggtacttcggacaattccccttccataaccgtcatacctacctctatataaagagcttactctcttcacttcaacacacacctcaagcaagagctctatcattcctctcaagtttagtttagtagtatctagctggtggaatagaattagaatagaaatcaggagtccggaagccttcggaagagttcgggtatggctctagtagctttccttttctcttttgtaagctttgtacttttattagaatactcttctaaatacattccgggtattgaaatactttccgagtatatgagtacctactttacattatgttcaagttatactgaatatactgctagcttacctggaagatcctttggtacgggtatagtgtttgcttatgcaattactctatgtcataataatgacattagagtagtatctggtagtttacacatggtgtctaaattacgggatatcattatttggggttatatattgcggatgagaggtgggccgctgatggtgacagctcagtacgggtattcctccgcgcctatatataatcctaagttaatttcctggggagggtattcctccatatttagccccggttggatggtcatgacgggctgtcataaggaactcgacagtcaggggtggcttctcgaagtaccaggagggcattggatagagggtattggctagtatatcagttaactagaatgtatgtatactatgtatattagaagtataggaatagattctctttctcttttctttccacctagcttagattatttattattatgaggataagtagtaatgcttgtgtgtcactctacccttggattatattaacccctgcttagaatatgattatcacaagtaatatataaattattagttgagttctctctacatgatctttccacgggataaaacaaatacgatacccttggaatactctcgagtgaaatgctacaatggtatatccgtgcgcctgcggatgaactctgtaagcataatataccagaagtgtttctacgccattgctgggaattatatttctagtaatgtcgttaagaaataccaacagtggatatgataaattctttcttaatatttggtcataaatgttttaattacaatagaatgtagtcatctatatattgaaacataattttgagcatgtacgagctgttgcctccaactgttttaacttaaccaaactttggtaacttgtactcttaaagtgtacacaaaattgtgaaagatctcatacctaaaatttttcaaacactacctatagattcaaaaacttcaagaagttttatggtaactggttaagtagatgtgaagactgaagaatcttcggctgcgtggagcttgggtgatcaggaggagcagagggcatgccgagagatgctgagatcggtattcaggagccagttatagtgatggggccagatggaggccgaaggtgatgatgaagaggaaggcatgtcgattcagctccgggcatgtcaacgatcgatcgaggatgcactagtgagtgaagatcagagaagaagaacaggtaaggaagtttattattatctctcattaacagtaacactgctatcctgatgttatgttttcgagtgaagatgcaaattttgtgtggcaattccttgtactcaccaaaattctatgatattaattgatacactttcttgttgtctatttttttattacattagcttcactgccacagaaaaggcaatttataccagtttagaaaaggaattagtgccaacaccatatttgtacgcattatgaatgtggattgagaatctgtcctattgagatcggtgagcaaaatataaatgaatcaatgaagcttgaattatggaaacacgatgcggacccgtgcatagatctagccatcaccacctacctattggcggtcggattcgacaaagtcaaggatagtggtgtagagtctccccgcttctcacctgagtatccaacacttgctgctgtgaaaaagtttgtccgcccgccactgttgtgctagtcgccccatgtgcggatctgttcgttgtgagctcatggaggtcggatctaaccgcccccgagcttgtggtagctagatccggcgaattcctcctctccacactccctccatctacccctcctttttt

SEQ ID NO: 17201 - DNA, 2139 bp, Oryza sativa
  unsure (1)..(2139): unsure at all n locations
ctacccgtccgccgacgctgccgccgagccgtactccacggcggcgcacgggcacgggcacggcaggtacgcgtacgcgccgtcgccgctggcgcggtggaagatgctgggctcggcgggcacgccgcggcggcacgagtacttctccggcgagtaccggtggtgctacccgacgccggtgcgcgagggcatctacagcctcgccacggacgccaaccgcctcaccaccatcttcagcgaggagaatcccaacgcctgtgccatcgtctgaccaagaaattcacaattgtcagagaataatcaaaagttcttcttaggggacaaactatatatatataactagtgattagaggaatatgatgctttcagcgttttaatttgtagataaggttggtgacagtagtgtgagtggagtagcagtagtagctttagttggtgaaatggacctgttctaatgtttcggcttatattctcattgtcccatgcatactggcttttgttagcacgagtacttttgttaaccaagttggcagtgttaattaagtaggtctagaaatagaatttgatcagcaccaacagtttttaccagggagaacgaaaggattgatgcatatggatatatatgatgctcattattctatacccatcatctaatttggcccgaaatttatatatgtaaaaggagatgcttcgttatcccctactctactcgcagacttcatctgactttgcttgataatggcagagagaggagcacagtacgtgggactttgcatgattaacgagtaaatttcactttatgccacctttaataaccaaagttttacaataaactaaggctcaacctatattttcatatactaacatcacacatagttacacttcattgcaccttggaccggggtttacaacatagattagcacaataataagatatgtagctggttatatactacatcctatcaaataaatcaaatggtatttcattacaccgggcaaatagcaaatacttttgcagcacactaaaccctgcttggcacacctctgcattataatccaaagctgattttgaattttattttttttattttaagattggttttatgtgtttttttttgttacttttggtgcccgttgtttgtatgactgctgagaagacaagtaaaaaaatatatatctaatgtaattcttaaaactcaaacttcaaaattcgaattgaattgagttggattataatctaaaggagttccaaagcagagccactggtatgttgcgccagtatacctttcatgttctgttattttcaaccaatatacctttcaacattgttatgttgcaccaacaataatgctagagatctaaactctataacatctttgataacttcaccactaaatatatatatagttttgtgatacggtgccttaaatatgtagttccgtgaaacgttcgatgataaatatatagttttgtgatatacattcttaaatcagtttgcgacgagctcacctctggccctctgctaccttctgtttgctcctccggtgacgcgaccgcagctacttgctccgccggcaccccgccactgcttgctccgcggacagcactgccgcttgctgtgccgccgtcgccgctcattgtgtgacgttcaagccctgctcgctcctttgccgccgctgcttgcttcaccagcttcgctgcttgcgccgacgaagccctcggctagggtttggagctacatttggggctgattaacaaagataatagttattgtttcctcgtgtaaaaatatagataatatatattacggagcacacacacgtgagctacccgctactccctccgtccctaaatataagggattttcgttggatgtgatacatcctagcacagcgaatttggacaggctctatatctagattcattatattagaatgtgtcacatccaaccaaaatcccttatatttagggatggaaggagtagtattcatgtgcaaagaatagtgctggctgtagcaatattattatcaaaaaaataaatnagaatgagaaaaataagaagatggaacaatngaaagatataagggtaaaaattttaagttcacatcaattactataaagaacattttaattatatta

SEQ ID NO: 17202 - DNA, 7551 bp, Oryza sativa
ttgatctatatcacaaaatagtcgtatgaatgaaaaaattataggctcaatcacacacaagtgataaaattactcacaggtgaatcaaactagaaaagaaaaaaaatgattcagccaaaaatctatctgttggctttgctagatcttgttataaggatgaagagaacggtctgtgtcttgtgactagtagtggagagagcaaccgagtggcaagcagtagccgacgatggaatcatggaaggatgtagtggtgtggtatagagatgagctcgacgttgcgcagtaacagccatccatcatctagcaagcacgaaaaaaaagcaaaaacattctcgttcatgtcaatagagataacgagcaaaagaaaaatagtaaacaacctccatcaccggcgtactctaccctatcctctgcggccagcaacatggagcatgatgtgcaaatgtaggacctgtacaacccatcaattgagattaggtaatattggagattgcacgtcaatttgatttgcaaaaaaaaaaaaaattgggccttcatgcgtgaagtagaaggagagtatgcagatacaaatcagagtgtcatttccttacttgcttgttctattaatatcgccgacgtggagtagccgctagttcttgctattggcccaggtgaacaccttcttgctggttaaggtgctgcccaacgtccggcagtgaggctcgaagcagtgctttcgcctcaactgccgccggccaccgctcgccggccgccgccatcaactgccatggtgtcgtcgtcctcctccatagtgtgtcgacgatctgtgggctggaatggttgatcgatttagatccgcaaaaaaggaaaaaaggaagtgggggcgagagtggttggttgggtacggaaaaaaatgaatatatatcgcaaggagagaagttgtttttatcgaagtaaatcatttactccaataatggtgggagcacgatgcagaacgtggggtgggatcgaaagcaggggagttgtttttattatcgaagtaaatcgtttactcgaataaaggcgggtggttgaggcgtacgataggagtaaatcgtttacttcgataacggtgggagtgggatgacgggacgtggggtggggtgggcctgggctgatgcatgtttggctcttggaatagctgtgctcctaatagtagttctgactaatataatttttttttgttgtaacatattataatatattttcttttaacccaaatcatgccatgtgcattttgctattccctccattgaaaactacttgttgttctacttttatcctaaaccaaacatttacagtttaatcgttaaatttctatatattcatataggttaacattataggttttatgtttttatgaccatgagaaatattttcataatatatgttgttaaactacatgaatttttaaaattggtggttaaagatagatgtctaagtcatattacaaagcagtggtttagttgtggatttatgggtgtatggttctactcacgaggatttaaattctagtgcttagattcaaatctttacgcccacaaatacgttttcaacggaaatttagtaagatgaaggatgtgatgctctagttgaacgtgtgtgagtgggcatatttaaaggaccgttagtgtggtgcgacatgttagcggtgtttgtgcgtatacgtctacagtgtaattgaaaaacaaaaagaaagaggagtaatttaaacggaaggaagttgtaatttttaaagactagctagttatatgctcatgccttgcaattttttttttattcgtttagtgaatggtaggtttattggttttctatattattattattccattttttttgataaatctgtttttaggaggaagtgagaagaagagggataggaggacgactttttaaagtagcggagaaatggtgggagcagacgggcacgccggaattgcgcgttgccgcaagcgtgcagcttgcaaatactctttgcgacttgcgagcccattacttatatatatatatgtatatataatatgtacatatacatatatgtgaaatttatatggtactaccgggagtccctccctatgcgccctcaattcgatcgctactaatgccaatgccaatgactgttaccgggtctaatgaatcgaatactcccgtccgtttttatttttctcggtggtcaacagaaggtcgtttatcttctacagtagatccaaaaattgaacgaagcctcccgagtttgttgtagatatgaaatttgaaacttgtgtttgtttatccaaagcgagaaagcaggatatttcttccgtcgttaaggaagagcagaacattatcgatctaaaattgttctctgcgtttggagggttcataacccaactgaagtcagatttgtagccgccggcgaagccctagtatggaggattccagttccaaggtttgctatcatattcatctgttattttttcatcttttggattcttttcctgatctcgattcctttattgatagtttctgctcctaattcgctttctttatgttttgcatttgtagcaactttgcagtcctgcagcaggtgcaaatgtatcaggtggtggtggctctagttctgttttcaccagaaactatcatgctggtgtaaatgtaattaggcgataagaaattaagaagtaatgttctgctcccacttctgctgccgtcgtccatgttctgcaacatctctaccaaatctgcaacatgttctgctcctcagaaatcagatagcagatcatgctctgctccaaatgagtgcatgtccatctctaaacccaaaaaaagaagtgatgttctgctcccagttctgccgtgtgccatgatttgctacatctctaaacccaaatacaagcacaagcagaaactacgatccatgttctgctacaagcgcagaagaagcaggaatgttctgctctcgtttctggacgggccttgctctaatagtagattaaatcgtttgaaggaccagaagctattctattacatatccatagtttaaggaacgggagattagcttctgctgcatgcgcatgcatacttctctgatgcagattagtttctgccattttttttagttgatgctctgccaattttttctgttggctctaataaatatcttctgctggctagtagcagaaaatcaatttgaaaagagcagaacatcaacaatttcatgtgccgccaaacagctgatgttctgcttcctttcaaacagaatctctgctcgatcttgtgctctctttccagttctattctgctcctaattggatgagcagaatatcttctgtccgcttaaatttttttcatgtgagcagaatatcttctgtccgcgttttttttttcatgttctgctcctttcccgattcacattatgttctgccaacgatattttcaaaacagttatgttctgccatttttttagctgacgttctaccggtttttaaaattggtttgcatgcaaccgatgatttagaaattatttgaactaactacaagctaaaattttgtgcaaatattattggattatggattattccactaacctgatccaataagcggagggagtaactactcccggtagtagcaaataggtaggtatatatatatgtatatatatatatatatatattacacacttgcatatatgtgtacactatatgtatatctatatctatatataaagtattttttttaatttagttctgttgccttctcgtattgttgtatcatcaggaagtagtatgaacctcttataattctgctgcaccaggaaatggacgatattgtcctcggtttgtttcacgatgtgttcactttgcgcaaagaaatgaatccagtattgaatttgttgtgctgacggcacaactgaatctccattctccaacggggaaaaggaatgtgtgtgagcaacgttcaaaggaggaacaaaattgaactataaacagtacttacaaagtccacgcactgagaatagagacgtcgagggcctttaagtggtataagtcgaagacttctttgtggcggatccaaataacatcttctccttggtaataatctgagtttcgcaccctagctccgaacatctctctacccatcactgatttgtccatgtaccattgatggaaccggtacatctgtgtaggtagctctctgatcttatcaggcgtgactagcggttcaccgagtttaaacatgtacatgaccggagccgtttcgataggtgcgtcctctagcaactgctccatactctgtcccgtatctttcaagaagttgcatatctctagttgtgccggttctacgacgaatggttcaacctcttgtcgtggctgttgccccagctgagggacttcctttctgcacttcactgctgcaaggttggcttgaagagccttcctcaatgttcgatcatagtcagaaacttcgaccggtttgcccggttcggccatcttaataaagtgatcctaaacctccggggctatagggatcttcttttctggactacgtggcttcaactgctccctaacttccgctctaacggcttcatcgagctcctccggagtcaagtcgtacgcccttttcttgagagcggggagccgtggctcgtcagatttggctttcttcttcggccttgacggtgcgggttcatatgggcgggaccttgacggcgtagacttggtagcaggtgcacgcggaggagtagttgcccgcgggcccgacggtgcagacttggcagctggtgcacgcggaggaggtggtggtgcaggggaaggagccggaggagattgacgagccggtgatggcggaggagactgtgcttgcggcggggaaggaggagcgggcagctgttcttgcccgggaaacacgatgtacttcttacgccagagtatgatggcgtgggctgtgtctccaagtctcttctccccgtctcctcctgggatgtcaagctcgagatcctcgtaggttcgttccaccagctctatctcgaccttcgcatatccatgtggaatgggcctgcaatggtatgtacccgaaaggtccgtgggtatggccatgcccaacgcgaccttcacaagaaatatagttcattaattactaatcaacatatatatgtaacaaatttcgcatttcgcataccttgatagacaagttcctgaagggagtatgcatatcgcagggtgttcgctgcgtgatatcatcaacggggaagtgggttgcttcgtgagctgccactgccttaataccctctgatccaacttggcccgttgatgcgcagctgctgcggttgcgcgaggggctcaccatgacgggcgcttgtgtttccattccgcgctgctcggccaggcgttggtccacctgtcttgtcacctcctcttgcatccttgcctcataggtggacaccctgtactcaagatcgacgatcttagcctctgtatccctcttgctcctcatccgactcctatacatgtggatgtcctctttgaatccatatttccaaggaaggacacctttcccttgcgttcgtcctggatgctcagcattctgtagtgcgagggtgagctcgtccttctctctgtcgggctggaaagtcccctgtgtagaggcttcaattgcatccgcaagtcggcgtgctgcatcttgaatctcatcgccgaatatgagggagccatcacctagattgagcgatccatcgtgtgtatagaaccagttccttgatcgctcaggccaattagccgtggccggctcgataccccttgctatcaagtcggcttccaacttgtcccacttggggattgcctttccatatccgcctgacccaagccggcgatggtatttcttcctagctgcattggctttgttcttttctatctgtgcttgcccttgcgctccagtcttgtatgccacaaacgcatcccagtgatcccttagcttgttatgcacgttgaaatcaggtgtcaagcccttgaggatgtatctcttgtacagatctgatttgtagctctggaatagttctgccattttcttcaggggccattctttgcatctgggacgatctgcatcagggatcgtgaatgtctccaagatggtggtccacaacatgtccttctctgtgtcagggagaaagctatcttcatccccgcgtgacctagttcgacgccagtacactatgctgatggggacgttgtctctcacgacccaaccacaatgattcacaaactttcgtcctatacccgccggggctactggttcgccgtctggggcaatctcagtaacgatgtgccttccctccagcttcttcgcgggacctcttttcccgcgtggcctcttctatccggccgacggttgactatcagtcccctcttggttagcctcctggttaccctcatcgttgccctcctcgttcaggtattggttgggatcctcgtttccctcctcatccacctagtactgactgctgccctctgcgatcgtgtctaacaggatttgttcgtcatcgcagtctgccatctgtacgtgcaaagaaaaaaagacagtgaggtcatgcacatcgacatgtacaggtcatacgtctaaaccctacaattatacatgtataattcactaagtcgttgttctcgttaagtcgttaagtcgctaagacgttgttctcgctaagtcgctaagtcgtcgttcgtcaaagtcgctaagtcgtcgttcgtgaaagtcgctaagtcgctaagtcgctaagtcgctaagacgtcgttctcgctaagtcgctaagtcgtccatctcgttaagtcgctaagtcatcgttcactaaaacgttctcgttcaaacgttcgaccgtgagtgttttcgttcaagctgtgtcggcggcggcagtgggcggcgtcggtgttggcggcggtgacggcggcggcgttgttggcgtcgacggcgcgcagcggcggctgtgcaggccgacgcggttggcagcggtggagtcggcgcgcggcggtggcggcggcagcggtggattcggcgcgaggtggcggcggtggagtccgcgcgcagcggtggattattccgcgcgaggtggcggcggtggagtcagcgacggcgatggcaaagtacgatggtgccggcaacgatgatggcggcgaggtccggtcggccggcgcgtgtcaagtttgagagagacagagagagaatgcgagatcagaggcgcaagatttgcgccctcaccttgagggaggcgacgcgctgccggtggcgttggggagggtggctgagctcggcgagcacgacgacgacgacggcggagacggtggcggcgtctagggcggtgatggcgcgcgaggaagaagatcgatcgtggagaagtctaagtgtggcgcggggaagccgatgcagtggatatttaaacccggtcatctttcgtcctggttcgtggcttcaaccgggactaaagatatctttagtctcggttggtattaacaaccaggagtaaagaacaaatgtttactcgggtaccgagctctaatacagcgtctt

SEQ ID NO: 17203 - DNA, 2234 bp, Oryza sativa
  unsure (1)..(2234): unsure at all n locations
gtgggtcaataaanattgagtatcgctctcggtaccctgatgaaatatttttcaacaagtaatgaatatctgaaataatttttgttaaaatagttttttaataagtaatgaaacatctaaacatttcctgggtagtgaggaaatatttctcaacaagtgatgaatatctgagataatttttgttaaaatatttgtaacaagtaatgaaacatctgaaacatttatttacacatgacgaaacaccattcgatatttggcaaatatcagacattcgagccgtagcgctccctatagcgtattggttaactatacaacatgcctatgatttgacccccttcccatccactactgccacccatgcggctacaccctcactatggtaccacatgtagttattttgttataggtcatgacattctacgttaaggagctagggatgacactatagcaatgggtgacatgctcaagtcggtgatgagatgcaaacgagcggagtggtcaggatggagtgttccagatctacgatgccatcatcaccttcttgaggtcaccgacttgagatatggtggagtgcggctacccaatcgggtctttttgtccaaacttcaggaggacattggcccccatacttcattttccgcagcataaaaaatgctagttgtatagttgcttcatttttcggtgcatgtatttcatatatgttcagtggatattctcaacctatggatttttccttgattgtgtgggtgttcttgatctacgtggatgttgattctgatgtgttaggttgtcggtgttcttgactatctcattggagggtgacggtgggggtagggggtttgaaagcaatcagcttgaatcgagctgattcattgagcggcatccccttttgttctggctagtgtaaagctatgagtgtcggttcccagtccatcattgctgctggacttagtgccgctaatttggtaccggcgcagcatcatattcggcattgatggtccgtcacaaaccaagacctatgattatttctatagcagtgcttagagctagcagttggctatattggttaaacttgctagaaggccctactaaggggactgagttttctccagtaattttagtgggaatggcatatgctagcttcgatatattctaagttacatactagtacatatacgtaacaacagtaactttgcccctgcaacttactgtgcaaggatggttgttggactgctcacataactactaattgttcaacgcacccttgcattgttgtttcggagataaatactaagcacccttcacctttttctccattcttcatcgaggctacaaccaaagccacctagttgctagttccatgaactctggataacacaaaaaaaaacgtgaaatataaaatcaatggtcggaatctgagaggctacgaccttttgtgacgaatttcttatgacattagagctattcgtcactatgccatttcggtttatgatgttcaataggggtggtgctgattactgatgaaaataaggtgcttgtcactagaccaaatacagatagtcataaactagtccaacgatgtattgtgacgaatatttttttttgtcgtaagagaccaaccagcaaacatcataagttcctaacaatgctggttgattgtgcaagctaccaactccacctacatgctctcttagcctatcctttctataatagccattccaaccaacgttaacaaatgctttgtatccttcctcctttttattccggtccctaaacaagaagcaaaagaaataatatgctctatctttttattccggtccctaaacaagaagcaaaagaaataatatgctctatctttggacttgttgtactcaagccatccaccaaactcatcaaaccatgccggattgaattttctatctttgttagaaataactgatatgggaaaagcatgatcaccaggttggcaaggcccattctctgagtactttcttctcaccttggctctttggttgggatgataatcatcaattcctttccttgagcctggatcatattcgatcgtcttttcccaactggcatcatctagtcgaagggatatgaactccccacattgcttgtacaatctggtgctttccgcttaagaaatttctccatagaaacctattagagacaataaaaattttcaagcttgggtnccgngcacgatatcaaaggcattcaaggggagcgcg

SEQ ID NO: 17204 - DNA, 5611 bp, Oryza sativa
  unsure (1)..(5611): unsure at all n locations
agagagtttgaataatanaatctcattcttgcatgcctgcagtctactcttatgatccccagacttagtgacttaccgattgtatttggagacgataccagccggcgttggggccactaggcacgggcgcaccttcaggcgttgggcggtgggcggccagccagttagggcaggcgtcaggctttggatggacaggtagggtgcacaacagtgggcaggcagaccataggcagaggtgcagacgggagacaccgcgatagaccgagagatgagagtcgcacgtttgatttttggaggaggaagcattgaaacggtgccgcccctagcgccttgattcctggtcaccgcccttcccccttcctgtcgcgcgcacctggctcaggaaacataagcgacttctcaaatcctcctatctgttgggcgttgtagagctgtagttttggaccagagacttggaggggacttcctcggtttgggttgggggaggtgcctatgtgttggagatatgggagtaacaagttatttagaattttgggccggttcttgggcaacccatcccgacccattgggctctgcccctgcatgcatgcatggtggtgccgtatgcgcgcttttcttaccgtgatcatccggatgcccttggataggccgatcatgtgcattgatccatacataatattcaatcgtgtacatgtttgtgttccataggcggatgcatcagccggcgataccgggagccgagaggacaaccaccgtgcttgttagcggatacacagtaaattatattttgaatgttatttttataagatgcaccactagaaaactcatttttccatggggccaaaacctatttctccatgtggttggatcgtcgtttgcccggaaaggtctgtgaaaatagcgatttttccatgcggttgacaatttttttttatttttagactttttttattttttttaattttagtaatagatctttcccaaaagtatttttgaaaaccgaacaccagcaccaatggcgtggcacgagactggcgtggaaggacagcactgccacgctagctgcgtgtggcgtgacaaagttatttggccacaacaggcgggctggcgtggccaaaaagttcaaatttagaaatacttttgggaaaggtgtgaaaattaaaaaaaaaagaggtttaaaaaataaaaaatttcgtgggtggcacatccacgcaaaaatccgatttcggcatgcggttgtttatgttgtccacacacaaaaataaaaataataaattaataaaatctcaaaaaataaaaaaatcagaaccctagcttctctatggtggcagcggcgcggatctggccgtcacggggccggcagcggccgattgggaggcctcgtcgtcattgttgtcgtcggcggttgcaccgttgaggtccctgagctggccgccgcctactcccactcggaggagaggaagagagagagaggagatgagaggaaaataatatgaggagaggaggtgagggaaaaagggagaggagattaggatggtcaaatttgaagtgttgggagggaaaagggagaggatgagaaaaaaaaatctgtggatgcgagggggtatttttgcatgcggaccggttaagaggtccaaatgtaaaaatagactcatttttgtatgtggcccggtaagatggctacatgcgaaaatagatttttgcatgccggcatcttaaagaaccatatgcgaaatatgcgaaagggaaaataagattttgcatgggggcatattaaagagccatatgcgaaaggaataagttcactttaggtccctcaatttgtagtacagtatgattttcgtgctcagttctgaaaaccggatatgtcagatcccccaacttataaaaccatgcaaatgaggtccctcggcagtactaaccccggttttagctgatgtgacacctacgtggcgcgtatgtggcttctttgactaggtcttcggcccacgtggcattgacgtggcgctttcgtggcaattcgatcccgaaaaataataacacccgtgggagccacatgttagttaaacaacaaaaaatggtgaggccatatggccccacatgtcatcccaccactccctcctctctatatgtggccagtgcagaggggcggcagcgggcggaggggcggtgccggagcagtcatctcctcgccggtctcgccggactcccttccttcaactgcctcgccccggtggacggcgggggaaaggagtggcgtgcggcggcgggggagaagaggagcggcggtgggtcatgggcggagcagaggggcggagtggcgatgggccgcaagtggagtggggcgggcggatgagaaggacgtcgctggggtcgtccgcctcgcaggggtgggagaggagatgcgagcggcagccgacgagagaggagcaacgtgtgggctccggttggctagaggagaggagccgcgggcgacagaggacacgcgagcggcaattggcgggaaaggagtcgcgagcagtggctagagcagcgcgcgggtgaggagtcacgtcggcggcccgagcggccctgggcgcctgctagcgggaggagaggatccgctgcggcccgttgatgctccgcccgtggccctccacctcctcgtgggcctcatccctccctcctcacagcgctcccctctaacccgcgtgacgccgccacggagtgcatccacgtaaaggctgcgggcgcagtggagcggatggtcgtcgtcaaccgttgcagcgctcgccggcaacctcttcctccgccgcccgcggcttgcctctgccggcatgctctggccgctgcactccgcccgccctgctctccagctgctactgctccatgtgagaggagtgttgtgacgatgatgtggggctacatgggccctaccgttttttattattttgtgtgtgaaattgacatgttggtttcatagggttttattattttttctagatcaaattatcacgtaagtgccacatcaatgccacaggggccgaagacttagtcaaaggagctacgtaggttccacgtaagccaaaaccgggggataatactgccgaaggacctcgtttgcacggttttgtaagttgcaggatgcattgtatccggttttatggtcaagggataaattttgaactcggtgataaattaaggccccgtttagttcctcaaaagtttttttccaaaaacatcacatcgaatctttggacgcatgcatggagcattaaatatagattaaaagaaaaataattgcacaattaaggaggaaatcgcgagacgaatcttttgagcctaattagtccatgattagccataagtgctacagtaaaccccttccaacatccagtcaaacatccgatgtgacacccaaaaattttcatttcgcgaactaaacaggccctgagtgatccaaagtgaacttattcctatgcgaaaataacggtctatttttacaggcacgaccagttacagtccgtctgtaacctataggattctcgtgcagaaaattcgtttatgtggtaatgattggaataaaaatattctagcacagagtttgataaaataagatttgccaagactctaaaacttttagcagtccacattgtcacattgataacttccattagttcaaaggttgagtgatcatcacacgattaggtctcacacattgcagacaaacaggtactgttgcgataattcactggtggagaaaccatctttcgtcggtcggccgaatttcacaatagtcccggatgcaataaaaaccggggctaaagatgatctttagtcccggttaaaaagggtaacgggcatatttgatctttagtcccggttggtaacaccaaccaggactaaagatcatcatctttagtcccggttcaaatgctgtcagggcctgtcaggccccccaggatctttagtcccggttggtaacaccaaccgggactaaagatcgtaactttaccaaccgggactaaagatctcggggatctttagccccggttggtgactaaattcccacccctatatatatgtcttcttcctcctccagctgcccgagcaagcttcaaaatttcttcaaaaaagaggggaggtcatacaaatcggaggtgcctaaaaggtttgcaacttcatcctccaatgttttttttgtcatattacatttgcagctatgttttgcacacttttttgtctccaaaatttagttgtaagttgatgaggtagaaaatttgtgtagggaagaaagaatatatagaaatttagttgatttgctaaagaaggttttataaaatagttgacaaggaaaactatagtcaaagttaatcttgaatactagaaaacaaactaaaatgaaaattaaaagatgtaaaacacattaaaattagtttaaaactttagaaatagtaaataagaattatttggtgtaatattttatgatttttgtatgaataaagatatgtcattattgtatgactgttgaaacagtttgtaattatcttataattattgtatgattgtcattattgtaagaataattatttttgtatgattttttttcgactcatgtagatggatcggcaatggatgtacgctgaccggcggtccaaagagtttattgacggcgtgcactattttttgagagtggccgaagctaacaggcaaaggggttttatttgttgtccatgcaataagtgtaagaatcagaaggagtattcttcatccaggactattcatttccacttgtttgagtaggggttcatgccaagctataattgttggacatcccatggagagcacggtgttaaaatggaagaagatgaagtgaaagacgacaatattccggactttgctcagtacgttggatttgaaggaaatcaaacgggcgaggagaaaagggatgttgatggtaacgacgttgcggatgatcttggtcagatgttgcaggacgccaaggaggactgcgaaagtgaaaagggagcccataaattggacaagatgttacaggaccacagaacttcgttgtacccaggttgcgagcaggggcacaaaaagttggataccactctgaagttcttgcaatagaaggcaaataatggagttagtgacaaggcatttggcgatttattgaaactcgtcaagaacattcttccagagggaaacaaattgcccgagacaacgtacgaggctaagaagatagtctgccagctaggactggaagttcagaagattcacgcatgtccgaatgattgtatcctatattgcgatgaggagtatgagaacctagaagcatgccctgtttgcaaagcactacgatacaagattagacgagacgatccaggagaagttgacgggcagctaacaatgaagagaattcctgctaaggtgatgtggtatttccctataataccacggataaggcgtttgttcaggaacaaggggaatgctagactgatgcgatggcacgctgaagagcgtcaacaggacgggatgctgagacaccccgccgatggttcgcagtggcgaaacatagacagaaaatttaatgaatttggataggacgcacgaaacaatacggttttga

SEQ ID NO: 17205 - DNA, 1473 bp, Oryza sativa
ggtgcattgatagacatcctggtaccccaacctggtaacgacatcgatgtgtacctaagaccactgatcgaagatcttaagttgttgtggaagaaggaaggtgtccccatgtgggacgaggacaaacaggaggagtttaacatacgagcgctgctgttcataaccatcaacgattggactgcacttagcaacctatccggacaatccaacaagggatacaaggcttgcactcactgtatggatgaaacagaaagtacgtatcttaagcattgtaggaaggttgtatacatgggtcatcgtcgattccttgcagcaaaccacccggtatggaagaaagacaagcacttcgaacataaggctgaccaccgtacgaagcctaaacatcgcaacgggaaaacagtgtttgctatggttaaagatcttaaagtagtgttcagaaaggggcctggaagccagcctatagagagcgaagatggtcacgcggcgatgtggaaaaagaactctatattttgtgagttaccctattgggaattcttggacgtacgccacgcaatcgacgtgatgcacctcactaagaacctttgcgtaaacctttttggctttctaggtgtatacggaaagtcgaaagatacactggaagcacgtagtgatctgaagcatatggaacaacgcggcgaccttcacccagaaccaaaggagaaaggaagccattacttgagtccagccagctacacacttagcaaggcagagaaggaaagtatgtttgaatgcttggagagcataaaggtaccgtctggatactccacgaatatcaagcgaataataagcacgaaggagaagaagttcacaaacctaaagtctcatgactgtcacgtgttgatgacacaactgctaccagttgtaataaggggtatccttccagacaatgtccgggcaacaataacaaagctatgtgcattcatgaacgcaatttcgcagaaggtcatcgatccggatagattagaagcccttcagaatgatgtggtgcaatgtctcgtcagttttgagttgatatttccaccttcatttttcaatataatgacgcatctgctttgtcaccttgtgaaagagatcagtattctcgggcctgtgtacctacacaacatgtttcctttcgagaggtacatgggcgttctgaagaagtatgttgtaaccgtgctcgtccagaggcaagcatcgccaagggttatggaacagaggaggtcattgaattttgcgtagaatttatcgaagatcttcgcccaatcggggtacctgaatcacgccatgaagggagactacggggaaagagaactctcggaaggaaagcaataatgacggtagacaacaatttattccgtaaggcccatttcacggttctgcaacactcttcattggtagctccttacatcgaggagcacttggctctagttcgcgccaggaacatcggtaagt

SEQ ID NO: 17206 - DNA, 1943 bp, Oryza sativa
cgcggtgaatgcgattctagtcgtacccccgagtattgccgtaattattgtgtacacgatgtaaactattttggatgtattgattatccatataaatcaattgatgtatggcatatgttaattacgcacgattattagaggttttaacaagtttaaatcatgtatatgctagttatatgcgatacttacaatttttaaaagttttaaatcacgcaggtggcaatttcatatgttaattagagtttttaacatttaatttactatcattcatatgctaattataattgactagagaatttttcaaagtttcaaatcatgcatgtggcatttacatatgttaattagagtttttcacaatttaatttactatcattcatatgctaattatatatgactattcgaatttttaaaatttttaaattatgcatgtggcatttacatatgttaattagagtttttaacaattaatttaatataattcctatgctaagtatatatgatgattacaatttttattaattttaaatcatgccgtatgtatatacatatgttaattagagtttttatcaatttaataatatcattcatatgctaagtatatatgattattagaatttttattaattttaaatcatatatttgcttattacgttttatccacttaatttattacagacaacaataatttttcgaagaaattgtcattaatctttgtactttaaaaaattgtaatgcattatcttttattttagaaacacatatgtaatagaaaataatattcagtgcgcttatcagtagtcccggttcttaaccctaaccgggtttaaaaagaatttggaaatagcgggaaaagatctttagtcccggttgaggagaacaaccgggagtaaagatatctttactcccggttgttgagaacaatcgggagtaaagatcttttctttagtcctggttgttctcaacaaccgggagtaaagatatctttactcccggttgttctcatcaaccgggattaaagatctagggctatatatattcccgatgcgcgccctcgtcttctctactagcacttagaactttttgcccgatcgatctctctcggcttctccttcgccgccactgcctagggcatccccgcgccgacgctgccgccgtatctcgccgtcgtctcgcgctcgtcatcgtcaccgccgcctccgcctcctccgccgccgccgcatatctggggtgagagccgccgcgcgccgcctccctttcgatctctctctccgatctcgatctctctctctccctctcggatgacaccggccgccgagttttagacgccgacggcgaccttgtaacgacacgacgccgtgccatgacgacgccgggccacgagacgggacgactccgcatgccggcgtcgcgccacgccgatgctgcgcgcggagccacgccgtcgccgagccagcccgacggcgattcgctgacggcactccgacgttccgctgccgccacaccgagaacgtgaacgagcgaacgaatgtgaacgagaacaaggtgaatgagcgtgaacgagaacgagcgaacgaacgtgaacgagccaacgaacgtgaatgagaacgagcgaacgaacgtgaacgagaacaaggtgaatgaacgtgaacgagaacgagcgaacaaacgtgaacgagccaacgaacgtgaatgagaacgagcgaacgaacatgaacgagaacaaggtgaatgaacgtgaacgagaacgttgtcggacgaacgtgaacgagccaacgaacgtgaacgtgaaatgccattataccccggttaatgaacgtgaacgaacaaacgtaggtgaatgaaacgtgaccttaacgagaacgcgaacgtgaacgatatcgtgaacgaaacgtgaacgtcaaatgcaatatatggtacttcgcggttatcataatacatctttt

SEQ ID NO: 17207 - DNA, 1365 bp, Oryza sativa
  unsure (1)..(1365): unsure at all n locations
gtggctcccttgattgcnatcggttctcggtacccgaactaactaaacttgtattatttttttcgcaattaattaattaatgcatagatggtggacagggcatggatggataaagagagatatcgtgcgtcatacattgaaggagtcgacatattcatgaaagcagctaataagaatgttgcatctaagaagaccaaagatattagatgtccatgcgtgcactgtaaaaatcagaaaagttggaacgatccatctgaaatcgagcaacacttggtgacgcttggatttgttgagggatacacaaactggtcacatcatggagagatcccaagcaagcaagttccgaaccaggctacagtacacgacgaagtgttgagctgggacgaggatgtcattgtagtagctgaagaagaagaagaagaagtgcatgcagtaaaacccgttgatgatgatgatgttggtggcaatggttagcatagtatagatgatgatgctgatgatggtaatgtcagtgtagatgatggtaaatttgcagatttggaagagatgttgcgtcatgctgaacctaaggttgttgctgggtccgctcatgggttggacaactttgatgcattgaaaaagacagcgaatgatcttttgtacaatgaggcaaagggctgtgagaaggatttcacattgttgcggatggtgcttgagcttatgagattgaaggacagaaatggttggtccgacagtagttttaatgacttgttgcttctgttgaagaaactttttccgcaacccaactccctgccaacaagcacctatgaagcgaagaagcttatatgccctttgtcactgggtgtgcgaaagatacacgcgtgtgttaaccactatatcctattccgtaaagagtacgaggatttggacagatgtccaacatgcaagagtagtcgatacaaaacaagccgtagccagtccgagggtctagattttgcccttgacgatgaagaagagtccgatccatgcaaagacagtaacaaaaagaagatttcccagcttgtcatgtggtaccttccggtgaaagatcgtttgaagcgtttgttctcaaacccgagggatgccgaatagatgcgctggcatcatgaaaagcgaaaaaaggatgggatgatcgacatcctgcagatgtaagacagtgaaaggaatttgacagaaattatataagttttcggaggacccaagaaaagtaaggttcgcattttccacttattgaatgaatccatccgtgacttggcaactaacacatcacggggcagaacttcttactatttcaacctcccaacgtggttgtttcaaaaagaaagattttctgttaccattcttgtt

SEQ ID NO: 17208 - DNA, 2897 bp, Oryza sativa
  unsure (1)..(2897): unsure at all n locations
ggccgccnntttgattgcatgccgtacccatacccgaagcgttgatacggggacgattcaaacatacgccattctatcgatgtcatgcacctagagaaaaatgtcttcgatagcaccattgggactatactgggcataccaactaagaccaaggataggctaaaatcacgtaaggacctcgtggatatgcaaataaggaaagagcttcatcctgtggatgaaggtaataatggaaaagtgtacctaccgcctgcttgctacaccttgacaagagacgagaaaatggcattgtgtaaatccctacatggggtgagagtgcctactggcttctccttaaacattaagcgactagtgtcgatgaaggatctgtcgctttcaggctacaattcccatgactgtcatgtaatgctcacagtattcctcgccattgcaattagaacaatcgagcagttcacgtaaagatggtcatcacaaagctctgttatttcttcaattccatatctcagaaaataattgatcctgaagagttaggtcctctccggactttcgctatacagacagtgtgcgagcttgagatgtgtttcccaccatcatttttcgatatgatgcaacacctcatagttcatatcgtgcctcagataattgcacttgggcccctgtacctgcattagatgtggcctttcgaacgatacatatccattctaaaaggctacgtacggaaccgcacccacccagaggaatccataatagagggatacacaaccgaggaggtcgttaagtgttgcattgattacctaaaagatgagaaagcaattggtttaccgatacctcgacatgaaggtagattatctaggaaaggaacaaaagggaagaaaagaatccacgacaatgactacaaaaaagtgaaagatgctcatttcactgcgctgcagcaactcgcaatagtggagccgtacatagagcaacacctgcatgaattacaagcaacaaatgcgggtcgatctaatagatggatcatgaagaaacacaagcatcactttactaaatggttcaagaacctcgatctactagatggcataccatagaagaaagaacaattaaaatgctagctgacgggccatcaagtgtgtatacctcatggcaagcatatgatctgaatggatacacgttttacacaaaagcgaaagacaaaaggagtgcatgccaaaacagtggcgttcgagtagaagcaatcgacacaactgggcaaaagagcacatattacggattcatagaagaaatctgcgaactagtctacgggccaaatatgcagattccactgttttggtgccaatgggtgaaacacccagccggcgtgtctgtggacaactttgggctgacaatagttgactttgaaaacgtaggccacaaggatgacccatgggtgcttgccgatcgggtcgctcaagttttctatgtgacagacccatctcatttgaagaaagacatagttatttcgggaaaacaaaggattttgggagttgatgatgtcgaagatgtcgaggcatacaatcaatatgagaacatgacactattaacagatttttgaaacaagatattatgcgtcgaagaatcaattggtgaatcgccgaagccatacatgagagatgaaggtgtagggaaaagtgttagatgctaattcattatatatgtatcatgttggacgtatcgatgaattttaatgtattataatgcgtgacaatgatggatgagatgaatttttgtatatggaatatggtgacatgataattgttggatcaagaaatagtttggtataaatttatttgtatgcatgcattaaaaaaatatcaggtgcaaacaataaaaaatcatattttattttttttcataaattaaccatatttgtgtaaaaataaataaaattattttttcagttgagaatgacatgtggggccaaagggttttcgctggcggccggctttgcccaccgctagcgaaaactgttttcgctagcggcccacataagctaccgccagcaaaaactattttcgcttgcggcccacataagcttgccgccagcgaaaacccttttcgctagcggcccatggaatcctccgccagcgaaaatgttttcgctcgcggttggcgcgttcctccgccagcgaagatgtcttcgcctataagttgctagcgcgcgtggctgaaaaatttcctaaagtccggggggcggccgaaccctataaatttgggccaccagggttgcccaaattttttattgcccgcctccagcgataacccctaattacccggcaaccggccggctgttttcctccttcattttggaccacaggttccttcatttggggcgcctccaccggccgccggcgggtttctttcttcttcttaaggccgtccctccacgcgctaatataattcaaattacggctttttttttgttgggcgggtctttaagaacaggtgtgctgtacatattttttggcggcccgagagtccacctaggtttctgctctacctccccaccttcgagaggagcctacctcctctccccaactcaaaagaggcgttgtatagtattctttatgcgatatctcccacctatcttttcttcctacgacttcaattggatagaatcctctcgccccgaggatctactcaacaaaaataatttctctcttcttttctggtcagacatcacaatactctctctctaatgtcgcttcacacccacatatacgaattctcgtcgtaatctctcatactctcgttcgtaggcatgttatactagctcaacctgtctgatatatcacaatcctctctctgtcacccngaactcaatcctatttgttcgtctatatcttcacagatactatcgctct

SEQ ID NO: 17209 - DNA, 20381 bp, Oryza sativa
accgggtcctcgtcgtccacccccctccctgccacctccaagacgccgccgccgcgcagggactcgtcgtcgccgcctcatttcaccacggtgagcccacgccctccgcctcacctcttctgtcttctctctgcttaaccccatcttctcctcctcagccgcgccgggactcgtcatcgcgccggtgtaccttggagatgccgtcgaccaattcatactatggcacatgaatgatattgaactagggtcaacggatggaactgatcgtccaccaaggataccggtgtcaccgtcgcgtccaccagtcgtagccagtccgagggatagtcctattgcttcaccccctagaccagagccaccagttgcatcacctttaggaccagagccaccagttgcatcacctcgaggaccagagccaccagttgcatcacctccagtaccagagccaccagttacatcacctccagtaccggagcctcccgttgcatcacctcagacattaaaggatgcagaagaaccatcagagcctgtacaagcagagcctacaaagctagcggcgggtgaaattgaagcggtgcctgatcagccaatgcccgatcaaccagagcaatcacaaccagagccatcgcaaccagaggaacctaagggtgctgatgtgccagtgatggtaaggacgcacaagcacaaagcaaaaagtgagtccaagaaacattatatggtaacagattccgaggaagggacaaagatatcataaatgccgaatttgataacagaaaattaaaagggttcaaacagacattcgttgactatctcaattatatcaattccccagacgtgccacacgagtttgagaatggcaaaccattcatttacgactggcaactaagagaaggaccgtgacaactaagaaggtggcacgattggtacattagggcaagcaccatgaaaggcatcgattcattcacagttgccgtgggggagaacatcttctggagcgatccttgtctactccaagtccatttctccgatatgcattccctctaccgtaggaagcagctagactccaatttgattgccatctggtgtctgtaagtgctacacttgaacgtgttaatagatcactacacctatatgcgtagctcatttgatcatccattgttggcaggatgaattacgtggaagcggaagcgatgaaaaagcctgtcgcctacctaaacccgtgcaggataagtaagccgaaccacacatacacgctaaatgagaagaagctaccagaacaaaagagaggaaagcttacatagtacaaaagcatcttgaaaagatgctcgatgtcgctacgtacgtagctattgcgcttgaatctacgtaggacaaggagtgtgtttatgcccaatatgcctttgagtaagttgtaatatatatgcactaagagtatatacatataatcatggcttgactaacaattccgttcgcagcgaccattggatagtctttcttctctatccaaagtacaatgaagtcatcgtcttggattctctcgacaaagatggcaacacctatcaggaatttctaagaattatcaatctgtaagtaagatattagcatgatgtgttttaacctctgatgaacacaaattatttatgtccgcaaaacagtgcatttaaaaggtattaccagcgaggcggacaacgcaaaaactcaagagaacgcatatccgtccgcaataagtggccggtaagtacatatatatgtatgccacacagtactacttaattttcataaatgcttgtgtgtttccatgtaataacctattataccttataattattttgatgttgaaagtgtcacaagcaaccggtgagaacagtactatgcggatattactgttgtgagttactaagggttaatgggaaatattgtgcgaattacgacgaggtaagtaatacagactagttaaattagtcgctaacttgtattattgtgaatagttaatttccttaattctgtcatgatctgatgcagcttccaaaattccccaagtctgaaagagagctcaatgatacatccattcagaacattcaggcggacatgtgctacttcatccaccgtgagtgcgcacatcagcttgggcggtttttcgacaacaaaggagtcttagccctgctggagaacgaatccctatctaactggaccaggcgtataatatagctagggttttctaattcattcaaaatacttgtaaatgttatgtcattggtcgaatttaatttgtcaatgtacatatatatataggtgcttccgaatatttatatatacgtatattattctgcttcatatatactcaatgcgtggctctaaaatacgcgaaagagaacatactctgtcgatagctcgattagttatatcaaccacgtctgactctgaaatacgcgcacgacgaaaagaaaaaatagtatatataataatgttttaattttttttaaaaaaattgcatcttcactggcgggccacgtgtcagaactaggacagtccatatcttcgctgtcgggccacgtgtccatccacagaagccttacttcatttttcctagcgtgccacgtggcctaaaatactgagccgccagcaaagaattatcttcgctggcggccgacctaaggctaacgcaaatggagatacttctttgctggcggccgcattatgtccgtcgccagcaaagacatgtcttcgctggcggccgtcctaaggctaccgccagcgaagacatctctttgctggcgggcgttcctttctcggccgccagcgaagatgcattttggctggcggtaaataaccgctagcgaaaatcgacattttcactggcctttgctttctggcggttgcgatttccgccagcggaaatccaaaatggctgccacgaaagatggttttcgtagtagtgactggtccaaatgcatgtctttgcgagtaaaagctgtggatactaacattttagctagcaaagtggatagggggaaggaaccatcctcaccttatgaaatgaaattgagggtgtgtttagttcacgctaaaattagaagtttggttgaaattggaacgatatgatagaaaagttggaagtttatatgtgtagaaaatttttgatgtgatggaaaagttagaagtttgattgtttgaagaaaaagtttagaactaaacaaggcctgagaatgcatccattagacttcggcatttacaggagtgcaattgaacaaatatgagttgatacattagaaataagggctcgtggttcgttgagtgttttgtagtaaacgaggggtccacctggaagatttgtttagcaccaaaaagtgctgtaaattactagccgaaaaatttgagcgagcgggcacaaataaactgttccacacactgcccccttttgtaaggcaaaaaattccattgctattatcagagcctacgtaaagagcacaacatgcacaccaattttgtactgctagaaaaaaaaaacataatcaccatgccattgctctttttattcatattagaatccatctcgttacttgcatagtacaggtacccgctgccatgagcccatgattctgatgtcctgaataaacggacgagtatataataccgccgattatccaaattgagcaaatgtcacatcaactccaaattgcattgcaccagttcgattgatttcatggaaaaacacaagaggacagtaagagacctgtgtaccccatccacagcccagtaactttccatgcaataatcccaacacaactactatactgctactttgctctgactgaaccaccactacaccatcaatttcgccgatgtcattctcgttattatcacttttggatatgcaattcaaccatccactaaccaatcaatcaatcagtataggaaagaaatgaactgcagatagaaattaacatatcctgaagacctctccaaagtgacagtgctgccgatctcaccgatgttgctatcctgtgtgtgtctctaagacgagagggatgcacttgactccatgaccagcatggttcacgagccagtcgtatgaaagattgtggcattcctccgaagcaacgagagccctacaacagctagcactaactagtgatgaaactctatgccatatgccagccaaaccaagagtgcacattcctggtgccacccatacccaacctgtagggtgtacgggctggtgcattacacttgttgtgggatggatggcacatgctatttcttgcaaagctgagataagggaatctaccccctgccaacacaattaatacttgtgatttgtacaaagcaaagatgagcaagaacagttgagcagctgacgaccgggaaatagttctgaacatggccagctgagactgacgcatttaatgagcatgtgatcttagaaaattcatatcaactattcatgtttttggttttagagcaccgaaaattcatcatacattttcattgtttttctcaagtttccaatcatgtttgacgggtgccgactcagaccacataaattgacattctcgctttttttagttatttggttggtctgcctcaaattttccgcaactattttgtttgattggtgcataccacagttgcaatcctggcaacctcgcccataccttgaataccttgttgttggcccatcgcgtcaaggcccagcactgggcctaggcaggttgtgtgaccgcctgagagccacagccgtgaggggtccaacccggtatcccttgggtacaaagtagtgcagtggcgcagccaattgcaactagggtactaggcccagagatgattcgagttcgattgaacggctcatcggtgtggattgccgaactgactccaatcccaaactcctaatgatcgtttactcgattcgtcgtctcctcctctcgacctctcctcaccatgacagaccagggtcacggactcacggtcatagggcgtaggcagcggatggcgacagcctcgacaccaccgcagcctgcagcttgcaggccacaacacagtaggcagcagcggctcccagcatgcacaactgcacatgtaggctaccccctgacaatttttgctacctatgcggcctacctataagacatccactatgcatagttaaattcgtaaattctttagtagtgttgctatgcatgatcttgagcttcagtagttagatgtgaagataacatttttacatggagagcttgaggaggagatatacatgaaacacccagaagggttcatagtacctggtaaggaggattatgtttgtaagttgaaaagatccttatatggtttgaaacagtctcctcgtcaacggtataaaggtatgattcatttatgttgtcacatggctttaagaggtctgaatatgatagctgtgtatacattaaatttgttaatggatcacctatatactacttgttatatgttgattttatgctgattgctgccaagagcaaagacgaaatcattccattgaagaaccatttgagtagtgagtttaagatgaaggattttgatgttgttaagaaaattttaggtatggaaattattagaggccgacattctggtttgttatttcttaatcagcaaagttacattaagaagtttgttcagcgtttcaacatgcatggtgcaaagcccgttagtacttctattgcacctcattttaaattatcagctttacaatgtgctagtactgatgagggggtagaatacatatcaagggttccacattctagtgatgttggttcttttatgtatgccatggtttgctttcgtccggatttatctcatgctatgcggttggtcagaagatacatggctaatccaagtaaagaacactggaaggctgttcagtggattttcaggtacttcgaggcatggtagatgctttcttgaagtttgtcaagactaataagggacttgttggctttgtggattcagattttgctgctaatttcgataagcgaagatcactcacaggttacgtgtttactattggtagttgtgttgtgagttggaaggtaacattgcagcctgttgttgcccagtctatcactgaagcagaatacatggatattgctgaagcatgtaagtaatcattttggttgaaatgattgtctgctgagctttatggagttgattcttgcattagcctattttgtgagagtcaaagtgctatatacctcactaaagatcagatgttacaaatcacattgatatcaagtatcattatattcacgatgtagtcgcacaaggtaagctaaaggtatacaatataagcactgtcatgataatcctgctgatacgatgacaaagccagttcatgttgctaagtttgagttttactcaagcttagttggtgtagtggtttagcccaagaggctatttagcgctgaaagtatttttctttgttgtgttcaaggtgaaggattgattaatgctacaagaagaaatttatttcaaggtggagtttgttgagttgtgatccaaactccggatggagcgaagcggaggcccgtcgctagaggcttgggccggagtgaggcggattgatttattgtgatctaaattcatttgcacatgtagtgattgatctattgttttttatcgtttatttgcctatcatttcctaacaaaacacgaacagattgtatatacgaaacatctcgccaaacatcgatttggcaaaggagcgggctgacttgccagctttgttcagtgtagtggggtagcaggtggtgttaaggctggactctggagaggtggaggctggagagggtgctcccgatgtgaacgtgttcctccagcgtgcccgccgtgcaaagctcggcaaccatctttaacctatcgccgaagattcgtgcacgaggcagggtttcttctgtcaccgttgccgccatccctactaggcactgccatcatctactccacgggaggggagggattgactggatatgtggggtggcgatggtgtcagcaccactgctgtggataactagcaagagggaaagggagagagagaagaaaaagaagaaattggcgaagaagatggaaaacatgacagcgatgatatgtttttaattttatgcgtattcaaatggcatggatacaaatagacaaatttacctaaaataacacatttgtaatggcatgaatcaaattaacccatttacatatggatatggttggtctatttggcagtagttggctacttggccttggaaaggggaaagagagagattttatttttaattcaatgtatatattttactacttactagtcccaaaattaatggaacttgtagggcaggctccttaccctgtagtattttacagtaagtatctgatattttttaaaagtttatttctctttgtagttatttatttttctttagcttcattagcccctatgcacttacatttatttgacaacatttttaacggccaaacaatttattttggtattatataaatagaagggagcgtaagttggctgtaagaacatttgacattaatacaatttttactgtagttcttctactgaccagcacatgaaaatctgcatgtacaggaagaatagtgctagtagtcactatgatcagcgtcccttttcatgtatctggtcaagctaattaaaagggcaccacagccaccgctggtgcgagtatgcaaacaatgggggaaccgggtactcccaatgcctccatttcctcatgatcctctttgtttcattgagttattttttcccaatcctccgccatggttgtcaccgcaagattgtgaattcaattacgaggcatgagcagccggaccatgggatattcaggcactcctggtgtttcacattcctaatggcctctactgtagctgccatgtaatgctagtcactctggccactttcttgccattattttacgaaatatatatatatccactcgagtaatggtgacatgaaaaatactaataaactatccagagcagattgcttactcccgctctgctatcaaaagagcatacacaaatctaaagcctaaccaaatgatgagcacctagcagcgaacaccctaatttatccttgcctctttcacgttaccaaatatgtagaagcttactgtcagtctcaattaaccaaatatagtactagctgcaaacaaggaatatatatgtgtgtgcatgtgtacgtacgcaagtgattgaatcgaacaagcaattcacccaaaagtacagtagactagaaaatatctcctacagttttcgtttcaatatatatatatatatatatatatatatatatatatatatataagcagcaaaccaataatttcgtattatatacggattcggtttacaatagcagaaaatgaaccctagacgaactcttctatccgatcacttttagcatgaacagtgagaataggattcacttgagtatccagaagtaaaaccagagacgatcacctaatagctggcggcgttcaccagacatctgctaggtcttggctgcgcagcagctaacaaaatcaatcctaatccctcgttacatggcctatggcctgtttatatacatgcacattaattaatacttctccgtttcatattatataagccgtttgactttttacttagtcaaaacttttaggtttgaccaaatctctactattataaaaattaaaaatgtttttaccagtattttggtatgtcattcgtgtatgagtcggtttttaagttcgtttacttttagaaatacatatccgtatttgagtcggtttctaagatcgttcactttcggtaatacagaagtaatcatataagaaatctgtttaaaaaaactcgtatgttagcttaagatgatcggtctcttaactacaggtcatgattttctaaaaatatatatattgaagcgaactcccataatgaaattcatcttaactaaaccatataacaataataacattaaaatagacttcacccgttgtaacgcacgggtattttttctagtttaataaaaaatagtaatatctacgacaccaaattaatttcattaaatttaatattgaatatattttgataatatgtttatttgttctcttcatcctcgcagtcgcagctgctgtacatatccttagttcggagatcggcctcggatcgattcgccggtgttttcttccaactcgatctctaatgtcacccaccggctccttgtgccatcgatacccacacagccagactctctatgtgttaacaccttcaccgatgtaacggcgagccagtggctgtggatttccaaagatggcgatttgttcctcttctctgttcttcgatggcttgttttcatgttctgaacgtttttattcacacagtagtgggcacaaaattttttgatatggagtaatttgttacactgaaaattttgggttacaagaaactaaaggtatttgattacacttaataaaattatgagttataggaaattactccctccggattgatattacttgtcgttttggacaagggtatgatttaaaaaaacaactttgaccattattttttattataatatgtatataaatattaacaaatatatgattttattaaagtatttttaagactaatctatacatataggcaccatatttcaaacataaatattttagaaattatttatcaccatagattttaaagtttgaccaccctcttatccaaaacgataggtattattacctggagggagtacaggttatttttaatgagtgaaaaaaaatccagaggttccaacgttcaagcagacttcttgtgtgccgtctaactttcttgcgttgtgaactaattaattttcatatcctactgttgttgccatgtatcgtggccacagtctacacgtgcttttagcactaatctctaactaatttcttgtaacaaagatgaacgaagggaaaggaatatagagatctttcttgactgcgttctttcataatcatcggtaagtatacatgaaagcaaattactctgttatcatcaactgcataggtcgcaattattgatcaactacctagtgtgtttttggcaagaaactacaagcataatttcataattacgtttctttggaccaaacaaaatacaagcgtcacctaagtatatgtgatagaagtgtgatagatatcatgggcgctcacagtgtgtccctgatatttaccattcctcatgtacaccaagtagacctccatactccacaatgagtacttattgtgggtccaccgaaaccatctattttacttttcatctcctaatctctgtttatatctaatctgtttcttttctcacctaacctgtttcttttctcaccggggaatttttcatcttctaatctctctctcctctctttcttttctcaccagggaatctgaagtggtggccggcggggcggtccgagaagcgatggcgctaggcggcagggcggtgcccgagtgcctcccctcctcctctcccggccgccacgaattgaggggcggagtggtcggggagctacgaccggtgcggatcaggtggcagggtggcaatagtgctctggttggcgcagatcaaagggcagcgcggccggcagcgagctccgtctgttgtgaaggcaggggccgtgatgagccccgtggcggcgctgtcctatctcccagtcggtggtgccactacaatctccggcgaggtgagctcaggaatggatggtggtttccctcgccaatgcctgcgccgaagccacacccacgaggctctgcccaccacaacgcgacaactcgcctttttccctgcttcacaagtcgttcttcgttcgaagaatgagtgtccaagtttggctccgagaaccttattcggttctgagtactgccgatgtggcgcccgatatttggtttttgccatggagctgaacgccacatccttgcagtgtgaacaccctaattagactagtcttattgtctggcagcctgggtaggtaccaattctagaccattcatctagcacgattgaacgactaagatagactcagtaacgagcagtaccactgtttgattccatgcagtaccaccacctgaagggcatttttgtaattttcacatagcctctgttcagatcagatcggctcggccagcctcccgcccactctccatccaaggctcccagcttccttggggcagcatggacggcgttggtagtgggctgcagcattcagggcgacgacaggctacgggatctagggcggtagcaggctgcgggatctggtacagcgggctacgtgatccgggtcaacggggtgcatgaagccaatgatgacaggttgtgggatgcaaagcacggcagcggactatgggatctagtcgagggagtgcgagacctgacaggtgagctccattctagctcgttcgcatcttgcctctctagtttaaacgtctagatcagtactatgtagtactagtaccgcggggtaccaaatgttgaacagtaaaaaaacctctttgcagattgctcatcgcaatccacatgagaaaattgtttcattgttagtagcctattatagatttttcgctagtttaatttgttgttgcagttctacctttcagtgcggctgacaactattcaagtacacgttcatggtcgtgaatgattgtgtgcaacgactctctatacttcaaaaatcatgcttcggacacaagttttggacacatgtgcatgctgctacaatgtacaccacatggtaggaaagctctctttgaatgacgccatgcaagaaacataagaaattgtaagatcaaacctaacaacggcatgactgaattccccgtgcttcccatcccgatctggaatgtatatttcctatatgcgtgtccggcgttcatgatgaattggggataaagcaagacgatcgacaaggctagtggaatcctctaactgttccacaagtggaagaataaattggaatcaatatgcagcagaaaaaaagtctgttgctacagcttgcatttgattttgtggacgctgtggcattttttatcgaactggcaaaggcaacaagtacgtgctaccaagttgcttttgttataattggaatcgatgagatgttattctccactggactgaaaatcttccaccgtatgttattgtcctttgaagagatgatcgactccatctctgataccatcccagctctcatgtattcctgatgtttctcaagcctcagaaagatgccgctatttccaccaaatgtgtgtgcatatattctcgaccctgagtaagagtgtgagatcgaagaacgtaaactgcacacttcataacataacctactcacagagctgaacttatattgttgtgagcttggggtggttcatgatatgcaaaatgttggatcgaacacaagtaaccaagcatacttaaaggggttgatggtagaaacaacagaaagaaaacttttagtggacataaaagttaccatcgtagccgatagagatcgatctgcccggtgtgcttcctctagtctaagagtgtccttgttgccgctctgactagtgtagatatgtggtggtgcttcttacgttgggcgttgaagtgtgctgataggcaagtttcatttcaagcatatgtaatttttttagtggtaattcagtatagataaattttcttttaatttaatcatgcatgtcaatataacagtcttagttttctaaggaggatgagcaatgcgacactctgattttgggtagatccagagtggcatccaaaagtacaaaagatgttggagcagctttggcacttcctggaacgtgccaatccgcgtaggctgcgttctgagcgcaccccgttatgttgaaaaaacaaacgcgatatgtatttgtgttcgagtcttagtaagagtcggcatcatgtacgttatggttgtatgggcctgtagtctctgtccaggttgcatacgtatatatatgagtcggggttagtgtcagttaagaaattgagttttttaccgagtctatgttagagttatgcaattttaaaatatgtttctcttctgtgttccatggtgatagcgtccgctgttttcatctgatcgattctggtgaattccaacaagcttcaccagcaaatagaggcactgttgacattaaattgatatacggtgagcagtgaatgcactttcgcgtttggtgaaaattaggtaatttcagcagcactgaaatttacgaaattccatgattttcggcactattttggaccaaaactatttgaaaatttaataaattttgactgaatttgaataaaatttgaccaaattcaatagaaatttgagatgatgacttgccggagccgaaattaccgaaattttcagaaatttcgaactgaaattgctattactgacagtgacatcgatttcttcttttcacagatgcatggaccaattgaaggaattaagatgaatatgcgctgtccgtctctgtctccgctgttgcaatactgttgtgtagtgtttgggcactctggtgtctccctttcccaatggctactactgtagctagcatgtaaaattagctattgtggtcatgccccttcttctcagctgcttgaattttgagaaatatcagcttgggtgttgtctcggatgctcaattgcattggtatatatttctggatgtcatgacaactctgattggagttgggcttttcttttcttttctttttttcatttcatcgatatcaaatcttttctcttgagatattcataaccaagttggttatatgaaagcttttgcacacaccgactgatgcgatttacacaattaccagatgtattcaaagatgcaatttatcagtggtattattcgaactgtcagagtattgaacaaaatggtattgccacacataatttttctgaattggggtcttgatgtctgttgccacatgatacgcaaatgctactcaactatcactcgccatacacttatcagactcaccttgttttacttcaagcatgtacagaaacagaagcataaattaatagcctaaattgaacgatagactttgcaatacacatttactaaaaacatttgagatgtacctagtggcctcaatccttcagtctcttctgaatctgagactcgatgtgccgcttgtaccctgtcttggcaattataattatatgacattgcatccatttgcagcttcactggccagctccaagcagccttcttgccgggcttcactatcgtttgctggtgcattacagtactatcgccttccattagttcttgattatggcaaatttctggccgaactgctgacttgtgttaaagagtgtaaagtaattcatttttccctatggtggctacgaattcctcgtgctcaccgacctgcgacccgtctcaccgagctgctcagcgattaattttttgagatgatgaaatgcgagtttgataactatttatacgacattgcagaagtgtgagatgaaagtcgatcagatcggctacctctacgaacttcaaatttgagggtcttttattttcactaaaagatttttggtttttggtatttctaccatttcaccctctctggtagatttggttattgtgtcctattctacaccggtcgagtactcaatgctaaagtgtgcctatacaacagggtaagtacaaacatgtactgtagtatcaactctctgtgcaacagtgaagattaatttgcccatctgttcaggcccgcgactactgctgccctgcacggtcgtcttgatctacaattgcaaggagaaaaaatgtcggacgagcgacagctgagattctaggagatcctgacacctccatttcctattgaagcttaatcttgtcgtttacccggcatctatatccacatggatatgctatgcatatctacttgatctattcatctcggagttgtgaatggcataggtatatatatggagatgcttgcgtagtggtgtgtacgttgtcatctgttgaagtgtatcgatcggcctaccatatcaaagtgttaattcaacacccaaaagtacatgaagcatcaatttatatagatggcaaaaaaagttactggtagggcttgatacacagtactaaaaggcaagtattccttccgatcacaaatacttacatttcttaggagaataaccgatcgaaattagaatatttgactataaagtaattttaaaatacatagtttgaaaacataaaaatggtatgtgcaaatttataacgagaggtacttttataatctcataaatttattgtaaagtaaatttgaggtcagagtcataccttaattaaagagacccagaaaaaagacgacttcatgcttggttctcacgagcagggagcagaaatagatcttatctgcatatatgattgtatgattttcgtcttattgttaacacagccaattaggcaaactcgcagtccattcaagataaagcattgtaacatgtctatattgttaccatataacatcttctcttatctataaaggataaataatcctactgtagtttacccatggtactcatctaccgcttccacagctgttgtgtatgtaggatcgaatcataagaactaagccaaccagaggggggtgaatgattggtatacccaaaaaccgaaaacttttagcggaaataaaagttaccctcgaaatcgacggaagtcggtctgaccgagattgatctgccggtctgaccggtgttgaatctccggtctgaccgccgaagtcgcctgccgcgcctgtcgccaccgccggtctgaccgccgtgctcctgccggtttgaccgccgcaatgccgccggtttgaccgccggtgagttgccggttagaacgtcgaaacccggtaaacacaaatcgaaaaactcttaaagtggatgacgactttattgattctctctgggtttacaaagtgcaccaacagtactccttacaaaaatttcgactaaactcgaaaccctaactcaaaactcaactctattgctctctaaagcggtaccgggaagcctcacgctccccctctatttatacatgaggtaggcagcctaaagccacgaaccaaactcatactaggagtcctaaacactttagaaaacccattagtacaagaaagaaactttacataatcaatcgtaccaaatttggactccttccaaattcgactccacatcccatacgcacacaataactccatcgtatgccatatggaatctccatcaaccacgtgcatcaactctagcctaagtatcccgcatgatctctgactacaacggacgtcgtcttatccccaagccgactcccggtccatcaccgcaaatactctcccgagacatcgagtcacctacacatggaacaaacaaagaaaccatattccgagaccaagctatctccaacttgactcattagcagtaaacaatagtattacatatgtatagtatccatctagaagtcataatcatgaaataaactcggatatccaaataaacaacccgaaaccgaaaccgacacagtgtcagccagtcagaccatgggctggccagtccgaccgctcgatcatcgccggtctgaccggcaacacctgcccggtctgaccggtcacataaaatgataaacctgtgattcacctgtaaatccaatcatctccaaaaccacttcgtgaataaattccaaataataaaactaataatctccaatacccaattgttcatcacagaataataatcaaaaacacatttgattttacagtgtatgtccgatcgatcacatagacttactccctatgtcccaaaaaaacataactagagtttgaattctgtcattaaaaaaaaaccaacttctatcatcatactccctccgtcttataatataagagattttgagtttttgtttgtattgtttgaccactcgtcttatttaaatttttttgcaaatataaaaacaaaaagttgtgcttaaagtgctttggataataaaataactcaaaaaaataataataataattccaaaattttttgaataagacgagtggttaaatagtacaatcaaaaactcaaaatcccttatattatgagacagagggagtactttcagcacagaaaacaagaagttttattccttgaatgccctttacctacctaccaccattactatcttttttattaatgatagtcattttggtcacttttacttctaactaaatttaccttgggatactagaaatctttttttttttcggagggagcaatacatatgagaatgcaactgtcacatgattcgctggaatatagtgccatatccactactcagcgtccctcgcttgtcagtcaccgcgctgagacaatgggactttctagtatctcattccatgaaggcatcactcttgcttttcgtccattgtgggctgatggcgtgcaaagatcaattggaaaggaaggtagggtaggaattcctgatgcctccctctccaagctcacaatgcgagagtttcaaccgccagccatcatggataaagagtttccaagacaaaattcttatcttacgttttctgtttcagctagtttttattcttggattcaagatatgattatttcagtttcgtttacaatgcccattattggagaataaccccatacttagagtgttgtataaactattgtataaaaggactaaaatactcataagagggtgttgtatatatgtagccaattaagggcaaagatgtaatttcccgttacttacgaataaaaggagctctccaaaggcaatagggggatctctcccccattccactctttctcatcctctctcatccacttatattctcctcacgagatctagcttgagctccctccctttggagggaggcccttgccatgcatgttggattttgcaacaacacccataatagatcggtgcacaaagagaaatacttgctaactcctatttgccaccaagtaactatacatgtgtatgcacaactagtagtggatattgcaagagaaggacttgaaggcactccttcttaggcctgcaggaggcgcacttgcaggcccgtcaaccagaataatggcgcagaaaactttttattgttgtttgaaacatttataagtaacgctctaattatttatttcaaatatgagcattttgccaacgtcaattatagcatgtgaagattttttttttcgggcgggaaaaggatgtgcagagtagttactgctattctagcacgacaagggatcaccggtggagaaaccctttgtagtcccggttcgtaatctccctttagtcccgatttccaaaccgggactaccaatccggaactaaagatcgctatctttagtcccgggtgaaataaccgggactaaagatcgatgtttagtcccggttggtaacaccaatcgggactaaagatggctcagccgtctcggttggtgttaccaaccgggactaaagatcgagctgacctcttttttcttgcatggccctgttgctgcatggtttatatatatataaaccgtgcatatatatgtttcagtacatatatgcttatataatatatgcatatatatatattatattatatttatatatgtttcaatacatatgtacaggcataatatatatgtatttatacatatatatgttatgcaaatgcatatgtatatatatatatatatgaccaaaatatatttacattatagaaaatatgtacacatgcatatagaaacatatatagtcatgtattaattacaatccattatatgtcctagctagctacgatttcgacgtagtagtagtcgctagctcagaagctaagaacctatgaattgtgtttctgtcgtagtagaattcacccttgggattaaggatttgttcattgatgaatcccatgggttgttcttgaaccgccgcgataaatttcttgtgtgtggtcaggttatccctcatgcgaataaactatatgaatgtatgaaattgattagtaattaaacaagaaatcgatatgtaatgaaattttgaatttatttgtacgtacatcgagctctcttgtgatgatgatttagtcttcaaggcagtggcaatactcgcacacgtaatagccgcacaagttagttcccttcttttgctttgcgcactacaaataaatgacaaacaacgagagatctaattaatatacacttgtatgtatttgaatcggagaaatataaatgtagagcatgtgtactcacaggaaatttgaacttccgcctaagtctttctctccatttgctgcggaccaaatgacggaaccgataccaagccctacatgcagtttaaagctatgattcgtagtagcaattaacataacaagattttcttaattaacagaggaacttatgacggtacctgtctataagttcgaaaaccttgtcaaacgtagactcttttttatccattgagtcatatacgttgatggtgcaggccgacaggtcgaagagtaaaagcacccagtggaatctgcaatgtgcgtgggatgcattacatatgaaacacttagcaagttcgtacgggaatgaaatttggtataggaagacagtaaaattaaactaactctgtgttgtacggcaacagtctgaacgtcttgtaatgctgcgccttcaagagatggacgagattgtcctctgtggcttgcggatattggtcgagcattgcgacgtttactttccgagggtcgatgaatccagtatcgaaaaccccccgccgtcgggccctttgaatctccattctacaacgataaaagggagtatattattttctatagtctacttatatacaaggacctaattaattaaaggaggcgtagtaagaaatctaactgaacgatatacttacaaaatctagcaactcataatagagacgtcgagggcgtccagctggtatagttcatagattcccttgaaattgatccagagaatgtcatctccttgcaagaagtccgtgtccctgatcctcgctccgatcatctctctaccggtggcgctcatctccatgtacagctgatggaacttgtatatttgtgtgggtagggactgcagcagcttaggcttgacaagcggtttaccgagttcgtacatgtatttcacttccgccttttcgattggtgcgactcctagcaattgatccatagttagaccagtgtcagtaataaattcttctatcgtcatttttttaccgatcaccaacggctcgccctcctgggttggttgctctccaagctgagggactggtttggactttccagaagatgctttcttcagcgttcgctcatagtccgatagcttaatg

SEQ ID NO: 17210 - DNA, 2821 bp, Oryza sativa
tccgatagcttaatggcctccttggcaggtgcagacatacccttgaagaagttcatgacactcgaatctataggaatcttcttttctggacttcgaggcttgaattgtctcttgatttctgatgccacgtaagcgtcaagctcctcttgcgtgcaatcgtaccccaggtccttgttcttggcagcgtcaattttcgccttcttcgttgcccttctgtgggcaggcggtggagcttggggggcccttgactttgaaggtgccagaagaggagcttgcggaggagtcggtgtaggagaccgaggaggagtcggtgcaggagcctgaggagcagtcggtgcaggagcctgaggtggagacggtgctggagcatgaggaggagacagtgcaggatcctgaggaggagatggcggagccggaggagatggtgcacgagacgccgcttgtcgcccagggaggatgatgtactgcctgtgccatagaataatggcatggcttgtgtctcgtagatgcgtctcaccgtctcctccagggtaatctagctcgaggtcctcgtacgcgccttcgaccaactcaacttcgaccttggagtatcctgctggaatcggcctgcagtggtaagtacctgaagggtccgttgggatggccatgcccgatgccaccttcatgtggtgagaggttatttattagtaatcaacatatataagcagcaactagcggaatgggcaaatctaaaatatataaactacgagcttacctttattgataagttcttgaaaggaatatgcagctcacatggtgtccgctgagtgatgtcatcaacggggcaggtggattcgtcctgggtttgcatggcgtccatgctcagtgatcctacttgccccgttgaggcgcagttgctacggtttcctgacgggctcaccattgcaggaggaatggtcggctggggataattggactgatgtgcggccatgcgttcatcaaccttccttgccacctcctcttgcatgctgagctcatagctcgataccctgaactcaagatctgcaatcttcgcctcggtatctctcttgctcctcttccgactcctgtacgtgtggatgtcctccttgaacccaatcttccaaggaatcacctctttccctcgtgttcgtcctggatgctctggagtctgcagggcgagtgacagctcgtccctctctctgtccggtcggaacgtgccctgagaagaggcttccactgcgtctgttagtcgacgcgcagcctctcgtatctgatcgccgaagactagtgagccatcagctgggttgagcgtttcaccgtgagcatagtaccagaacttcgatcgttctggccaattagcggtggctggttcgatacccctctcaagcaagctagcctccatctcctcccacttcggcatcgcgacactatagccgcctgaccccaagtggtgatggtacttcttcttggcggcattttctttgtttcttttcatcatcgcctgcccttgttcacctatcttatatgcaacgaactcgtcccagtgatcccttagctttgggaatgtgtcgaagttcggtgtctgccccttcaggatatatttcttgtacagctctcccttgaagctctgaaactgttctgccattttctttagagtccaccttttcactttgtcctctgtacccgtgggaagggtgaatgtctcgagcattgtggtccacagcatctctttctccgaatttgggacaaagctctcatgatctccgcgtgcccttgttcttcgccagtacaccgtactgacaggcacgttataccgcacaacccaaccgctgtgacgtacatagttcttggcggcttctaccgaggcactaggtcgttcatcttcttccacttccgttatgatgtgccgaccctcaagcttcttcgcggcacctcgttgcctgcgtgccctcttctatccaacggagggttgacttccactagcctcctcctcctggttcccctccacatccctttccacgtgcccctcctggttcccctccgcatccctctccacgttcccttcctcgttcaaatactggtttggatcctcgttcccctcttctttgttccagtactggctgcttccctctgcgattgtatcgtacaatatctgttcctcatcgcgatcagccatctgttcatacaggaaacatctgctaagtcatgagacatttatgttttaacaatcttatattaaaactcaaataatcttatatgctaagactaaacgaacagtcatgtatgctaagtgtaactgtcgtatattagaaccgtacacaatcttagaagctaagtctaattacaaatctaataatcttatactaaaactcaaatagtgatgatatatgctaagactaggtgacgtatattataggaccctagctagtcaataattatatactaagtctaattacaaatataataatcttatattaaaactcaaataatcttatatgctaagacaaaaatagccatatatgctaagtgtaactgtcgtatattagaaccctacacaatcttagaagctaagtctaattacaaatctaataatcttatactaaaactcaaatagtgatgatatgtgctaagactaggtgacgtatattataggaccctagctagtcaataattatatactaagtctaattacaaatataataatcttatattaaaactctaataatattatatgctaagacaaaaatagccatgtatgctaagtgtaactgtcgtatattagaaccctacacaatcttacatgctaagtctaattacaaat

SEQ ID NO: 17211 - DNA, 6536 bp, Oryza sativa
aaagctagatttcacctatgacctagcagttttaactgaaaacagcgttaagttgaagttgtcattaatccgcgagggttcatccaccttccccaagcctcgcttggtcgggtttaccctcgcatctagttttccacacttccaacatcacaatgaccttcccacccatcgggcaaggtctcacctcattcctaatataagcaagattaaaatctatgaggctagtcaagaatagtacaagtcccggtgctcattaaccgcgagcacgactattcgaatagattggtttactcacgctgcagtggatgtacgcttttaatcccacactccgtgacttgcccaacacatgagcctagtcccaacacatgagacccggcttttcggtcattctcgcattttggcacccgctccaaggactataaatctccaatgcactcctagcacaacacaccccctcgagccagcagtgaggggagtcctggcacttacgggatcataagaagttacattacatatacggcatatataggtgcattttagatttcctgcgtgcaaaacaacacaacccttcatcaacatcacatcatcctcatacagatccaccatgacaggggtgccgccccacgagggattcttaatccaccgggtctataccccgtcgaggagtgtggtcgtactctgatcatttctgcctagcttcttgatttgggccttaacagagtagggtcgacgactagcccgttccagaaccacccatattctattcatggcacccagttgaaaacattttgtttcattaggttttcggtttttgcaaaggtttttgcatcgcgggtggcgctcatgtctccacccatcttctagcaatcactctcaacgagtgaccaccacaaacacatccataaccaactacgatggagtgtataattgtctataattaagcaaatctaagcaatgtcaatatttgaccacgcataaataatagactcaggcaacaaggatataataaaggtaacaaaatcaaggatggttcacatacaactttaggtacgcattttataattagcatgcaactttatttataaacaaaacatttataaaatgggttcaacatgctcaagagggaagcgcggtgatttgccttgcttttagaaattgatatcttcacgaaatccacgtccgttgaatatccgcaatatctgatacgcagtcagtacgagaaaaccatataacaacctccaaataaactaccaaacatttcaaagtgccatcggatagatcttgattttagaagaattccagaagttcaacggtgtcaatcggagtcacggtttgcaagatatgaatttccgaagtttttacggatttataatccaagaaaaaattattcctctcattggaaaggaatattcctcacggggtccactgtcagtagctcaggaaggccggtgcatggtagatcgggtctaccgagtgcgcggcaggccaaggtggtggaccacgcgcgggaacaagggtgggtcccacgtgtaagtgtctatcggtacagagtggattaataggagattacatgtggtgggacccatccataagtgactcagtggtgagagacacttgagggggatcaggaggggttactgcccgaggtgtggggagggatataataaagacttttggtggaggaggtggcggtctgtgggttttggcccgagggagtagaagggaggtgaaatagacttttggctggtcaaacggtctcagggagaagtcaagcacctacaaaaaaaatttccatgaaacaacagatctgtaaggtactccttgcttgcaaaaatatctgatcaaaaggcagagaactgtcccacactatgcccagggaattccaacaattgatcaaaaaggggcaaaggaagaaaagatgttgtaaatcttctaccagctgagaaggacaaagaacacagcacagatcacaatttggaggcgcaaaatgcttatgatgaagcatatacttagtatttaatctattcatcagaagcagccatccaaaaactttcacttttgaagtaactttgctattccataaccatataaattgctggggaggttgcaaagcgcaaaaattcagagcatagaattttttataactatatctcaaagttccccaaataaaagcccatatgtctttctcatgatccaaattatgttgctgcaactaaatctgaagtgtctggaactcctgcaaggcctcttgagacagaggtacattgaaattatcctctgaagggactgagagagatttttcgactgaggaattaggactcagagcaaaagaaaacaatctgagcatcaaaattgaaaggggggcatcttaccacacatcataccagaaagagcatgaaactccatcacccacattacatttagcaatacaaatgaacagatccatcagactacagacatccttccaccaaaaggaaccttttagatttgacaaatgtgggattctgttaccataataagaagaccaaataaggttcacccaaggcaagtctctcctattatagaatttctccaaaagcttgaacagtagagcctgattctgaattgagaggttaataactcccaaacctcctttcaatttaggcttacaaacctttatcccaagccgctagggactttttgtttgaattcaaatctgaatccactttttgttgctccggtgcaatatatgattaggaaatggtcagaaaatgtgaagtgcactgctccaactgaatgcacttctttgattactcgcatagcaaaggggcttggggttctttctcatgatcagatagcttacatttcagcccatcgtacctatgttgatgaatcttacttagtgcaaggtcacatacttaagcatggagtagatggctctctcatattctttttcccaggttgtacaaatgaaatcccattacccaatccagggtatcatttgtacaactgtcttgagctaaccattcccctatagacgttagaggaatttcgtctaggtacgatgcatagggagccatgtaacatggcaagagaagagcatgaaggatcaacgtcctcaccaccagtgcagatgtacgaggctgactgggaatagggatgcaaggggggcaggcaagcgggtttttttagcccacttatctcacttctagttcattttttcttctaaattttgtactactatgtggaaaatgaactagcaagcgggtttttatgcgggtagcaggactacccacttgtatccctaactgggaaccaaccggagacgctcccggatggacccaagtaccacactacaatgccggaggttcagcctggtagagtgctagtgaacaccggtggcaagtgtctcaagacacatcgtatgggaactcccgttcttccagcaccagtggcatgctgcgaatctccaagatgtggcgcttcaattcctctcgaggggtcttgggagagctcactaggagaatggacgcactggagttgcaggcgggagaaatctagcacaacctcgaaggacacatggcccaaacgcaagaatggcagcgaaatgctgatgttcaattcgccaacatcaacaatttgatgcagcgacagcaagttgacctgcaggcatactttcgcttccaaggattcaacccctattagggaccctaagcgaaaagcaagcttgggggagatgcctctcccccactgaggtaacttgtatcacattgtatatttctttcatgcactgcatttataaacttgaaaacaatataaaaatttgcaaaatagaaaataccgaaaagataggctagatttgtatgctaggtaagacaacctagttctgcatgttgatatgatgaatagttgctctgttctatatctcttatgtatatgctaatagttaagtattctctcaagtttaagtaaggaaagccaaatattattcgggaacctgagagaagtaagttgcacattgcatgatctaagtctaggttgttgtgagatatgagatagtgaaatagagttactatagccttactccaaagtttgacttaaattccagataatttgtttttcaaaatgataaaattctaaagttactcatttgatatgaattccagccaatgccaaaaatgttatgcatcgttgaaaccttatacattttggttgcttgtatgcccattaaattttgtcaaactttatgacttatgtagatgctttttatactttatgatcaagatcatgcacccacatatgtgcacatgtgctaagtttctacactggaagctagcatctattccattccatcatataccatatatgtcatccactaaataagtactccatgatatttatacctctttttcaaaagaaaaataaaagaggagattggctagagagagagagagagagaaatattctctctcatattggggcatgaactctctcaaaaatattcttgagaaaaaatatatttagccaaaaagactctctcaaaagctttaaaaaatgaggaagaggtatacaaaaggagtaattatgttcatttcatttccaccatatattccaaacacgatgcacgatcttgatcttaagtatgatttgctatctgctttatctagattttttgacttagtaataaatgtgattgcaagtatgccttgttcttaatccctaacaaaccgcacatattcagctttagtgtaggagacaaaaaggcataatcttggtgaggaacaatattcatacacattgagtgatttagagaatcacttgaggaacttggttttatttgcaaaatcatttgaaaacttccggaataagagttaggcaatggatgagataattgtactctatgatctatgttgtctctcaaccacccaaggtgaagagaagcatgtgttacgacatgagattgggtgtgtgggtaagccaccatgtctacttgcttaatacgagagagagtactcaaactttgcacttgtacattctagatatataacatagtagcaactcctgatcaacaaccaagtttaatttttgtgattcctttactcgggatgaacaaaggttcaagcttggggggtttgttgacggtcattacagaccaatttcgaccatcaatacaactagaataaaggagaactagttatgcttgcaatgcatatttgttttagaataatctatttccacttgtacttggattctatctgtctgtaaataaagagatacaatatggaggagaaccgatagcaaaatactcgaacaatcaatcagatgctttcgagaatcagatttgtggagaaatgggctagaaactcataattgacatgatcaaatgggcccataatttactgatctgagtctagaagcagaagaggagacgacctgccgagtactaggctggttggcctagcccagggttcagggtttggctgaacagtaccagcaccattcaatccaggactttgatcagacggtgggaattcactcccaatgacggttggagggtattaccgacctttccaaccgccacaactgttgttcttcagctataaaaggccctcacctcctccactccttttcacactcaagcaagttcaagatatctcttctacactttagtttagtattctagtgctaagtagagtagaatagaatatctctcggagtcttcggaggaatttcggtatggctttagtagttttccttctttcttttaagactctcggagtaaatgaaatattattctttatatcctctcgatactttagtatttctgagtactgtctttgctttatatctgtatcggtacagtcgtaaagttagccgaccaaagaggtgcagtggtgtgggtttaatgtccgatactcggttactctatgacatctcgagggatgtagagtagtatttaataatgtagacgtggtgtctagattattaagtattattatctgggcatatatgctatgtgtcagtcgaggtgggcagatgatggtgacagctcagtacgggtattcctccacaatagtatatattcctaagaaactttcctggggatggtactcctccgtatttagccccggttggacaaccatgacaggttgtcggaagaaactccgcaacctggtgcccagttggacaaccatgataggttgtcggaagaaactccgcaacccggtgtggtctctcaaagcaccaggagggcactgttagggggtattggctatatggttgtatactagtaggtgtaaagtaaagttgagtgtatactagaattatagggattgattgttcttctatttctcttccacttagtttaggaaagattgaatgagatatataagtgctttgcttcatgtcactctacccaaataaatatcttaaccccatgcctagattttgattatacaagtggcatgtatacattattagcatagttatctcttacaatcttccctgggattaaagaaatacgatacctgtaatggtccagatgctatcaatccccg

SEQ ID NO: 17212 - DNA, 3311 bp, Oryza sativa
gcaataaatttttttgtctttcttcacttcaaagcccaagggcgaaaatatccccttcttcgggcgggtgaaaccaggaatgcgtagttgattctttttctactgactcttgttgttaaaaccggactcagtgtgtatgaaaatccaacatttttttctctaagtgaagaaatgtttttttaagggctcatatcacaaaaattgaacttgattaatggttattattattttttcccgttgcaacgtgtaggatcgaatcacaagaactaagctaaccagaggggggtgaatggttggtataccaaaaaccgaaaacttttagcggaaataaaagttaccctcgaaatcgacggaagtcgggctgaccgagattaatctaccggtctgaccgagtagatgccgccggtctgaccacccgtatgccgcaggtctgactgccgcgtgccgccggtttgaccgacgatagattgccggttagactgccgaaacctggtaaacacaaattgaagaactcttaaagtggatgacgactttattgattctctctgtgtttacaaagtacaccaacaacactccttacaaaaatttcgactaaactcgaaaccctaactcaaaactcaactcaattgctctccaaagcgatacagggaagcctcacgctccccctctatttatacatgaggtagcaagcctaaagcccggaaccaaactcatactaggagtcataaacaccttaggaaacccactagtacaagaaagaaactttacataaccaatcataccaaatttggactccttccaaattcgactccgcatcccatatgcacacaatacctctatcgtatgccatatggaatctccatcaaccacgtgcatcaactctagccttagtataccgcatgatctctgaccaccacgaacgtcgtcttatccccaagccgactcccggtccatcaccgcaaatactctcccgagacatcgagtcacctacacatgaaataaacaaagaaaccatattccgagaccaagctatctccaacttgactcattagtagcaaacaacagtattacaaacgtatagtatccatttagaagccataatcatgaaataaactcggatatccaaacaaacaactcgaaaccgaaaccgacagtgtgtcggccggtcagaccgcgggctgcgccgttctgactacgcattacacgccggtctgaccggctaccagagtccggtctgaccggtcacatgaaataatgaatcctgcgatcacctgtgaatccaatcatctccaaaaccacttcaggaataaattccaaataacaaaaccaataatctccaatgcccaattgttcatcgcagaataataatcaaaagcacctttgattgtacaatctcccccttgatgaacacatttgcaaacccattaaaaatgttttgatgtttggaaaaatataaacaaaagtggtaaaaagcacacttcgtacaaatatacacatcgtgctcaaaaaatccaaaagaaaacttctccccctttttaaaagaaagaaattccctcatgaaccaaaaacatgctcttctcaataacaaaattcaccttgcttctcccaaaaatccaaaaattttcacataacttttcccccttttgacaatgatttcatcaagcataggaattatgttcattaatgttcaagagcttagcatacatataacatatcaagtcatgtgttgcaataaaaagaagatgaacccatctataatataacaagcatgcattaaagtataaccatgaaccaaagattttacaatttagcttgaatcaacatcttaacaagcacataggttgaaaaataaacactaaacacatatacctattgcatttatcactctttctcaaataaactttagcacaaaataaccaagagaatatttttaactttttcttttcttgagcctttttgctcatatttttctcttttattccaggtacgtccttgttgtcaagactgtttctagggattcgatacccattattttgctcacatcgaatacgtcctcgtcgtgaagacttgtttccaaggattcggtattcatttttttcatattttttattctcttttcacaatgagcaattaaagctatttgaggaataacaattcaataaagcatatatatataaagcatttataaatcaaaccatatgctagcatcaacattgcatatttgcttaattcaagtatagaatttaagtgtcatgcatcatctcccttaaaagcaaaatctaaacctcatgaaaagactagaatacatacaagctatgctagagacaaataaaccttcaaagtattgctagcatgcacaagaaaataccatatacataaacaaagctctcttttctcaatttttttcattggcatattatttcttgataaaaccatgaggtacaaactccccctcaaatcatgccaaaatgatgaattatgcccaattcaccacgaagaaaagcaaagcgattagaatccaaaggtttagtgaaaatatcagcaatttgcaactttgtgtccaaaaactgcaattcaacatctcccttctcaacataatccctcaaaaagtgaaaacgaatatcaatgtgctttgtgcgtgagtgttaaacaggattcttagcaatgttaatagcactagtattatcacaaaagagaggtagtttctcaaaagtaagaccataatctttcaaagtagataaaagccaaagaatctgtgaacaacaactagcagcagcaacatattcagattcagcagttgattgatcaacactagattgtttcctagaaaaccatgcaatcaatgatgtaccaagaaaatgacatgttccactagtacttttcctctcaattctacaaccaccaaaatcagcatcggaatatccacttaagcatatagaagatgaagtagaatatcaaattccaaactcaagtgtatgattcaaatacctcattagtcacttgaccgcttgacaatgtgaagcacgaggagaagtttgaaagcgtgcgcacaaacacacaggaaattgtatgtctgccctagaagcagttagatacaacaaagatccaatcatacttctatattccttttgatcaacaacttcaccatcttcatcaggatccaacacagctgtagaaccaattggtgttgaaattggcttgcaattctccatcttaaactatctcaaaagatccttcgtatacttcgtttgatgcacaaaagtaccttgaggagtttgcttaatttgcaatcccaaaaagtacgataactt

SEQ ID NO: 17213 - DNA, 1236 bp, Oryza sativa
  unsure (1)..(1236): unsure at all n locations
ccctcgagaaccgaaacgggtgtttttccaaaaacaacttttttttttagaacccggtccaaaaatggcaagaggttaaaagccaactgtttccaagatttcaatttaaggcgggttacccctttccggataggttgncaattttggtacaaaaaccacaacgggattgccacacttagaggggtccttaaccgtgagccggtcactttatacaaaaattgtccgacaatgtggcgtttatggccaaagacttgtactntaggttgaccggttttgatcatctcgggagagtagtatttcaggaggccttctaacaagaacacaagtacctcagctcggacgtggcttgtctgnggcactcatgtccggtctaacgtaggtgtncgcagtctgacgggctggcgcttgtttgccgggcctagcgaacttgtagcggtcgttgtcgtcgctctcgtcttggaaaaacgaccatcctccccgtgaacatgtgacagtgtacgtgaaatatcgggtgtagtacatgcactagcctcatcaaaagaaacttcgcaagtctcaacgattttgttagtctcaaaaataagtacacgatagccacgagtgtgtggggggtaaccaagaaacaatccatctgtagaacgtgcctcaaacttattcaaatttccagatttcaagacaaagcatttgcatcaaaaaatgcgcaaatgtgatactttgggttgatgtccaaatcgaagttcataagaagtttttccaagtttagatctcaagaaaactcgatttgaaatataacaagcagtgttgatagcctcagcccaaaattttcttggagttttatattcatccaacatcgttctagccatctcaaccaaaacacggtttttcctttcaacaacaccgttttgttgaggaacacgaggagaagaaaattcatgttcaagacctctttcgttgcaaaattgttcaaatgaagcatttttaaactcaccaccattatcacttcgaattcttttcaaagaaccaggaaattcaagatccaatcgatgaaacaaaccacgaaagtgttgaaaagcttcgtccttagttgccataaagaaaacccaagaatatcgagaaaaatcatcatcaataaccaacacatacccctttctttcaacagattgcactctagctggactaatagtgtccatttgtaatagctgggtgcgaaggagaaactcatcaaaanggacgtcg

SEQ ID NO: 17214 - DNA, 1584 bp, Oryza sativa
  unsure (1)..(1584): unsure at all n locations
aaaaataggcgaaaaaagatcgatcggccgaaaacgtttaagtgttggtgaagaagacgagggcgcaccgggaatatatatacccctggatctttactcccgattgttctcaacaaccgggactaaagatatctttagtcccggttgttctcaacaaccgggagtaaatatcttttcccgctatttcgaaattctttttaaacccggttagggttaagaaccgggactaaagattatagcactgcatatgattttcgcttacatatgtgtttataaaatagaagttaatgcattaacattatttaaagtactaagattaatgacaattacttcgaaaaattatttttgtctgtaataaattaagtggataaatcgtaataagcaaataaaattaataaaaattccaataatcatatatacttagcatatatatgaatgatattattatattggtaaaaactctaattaagatatgtatgtacatactgcatgatttaaaattaataaaaattgtaatcatcatatgtacttagcgtaggaattatattaaattaaatgctaaaaactctaattaacatatgtaaatgccacatgcatgatttaaaccttttaaaaattcgaatagtcatatataagtagcatatgaaagatagtaaattaaattgtgaaaaactctaatatatgaatgatagttttaaaaatatattaaatttaatacttttaaaaattctccagtcaattataattagcatatgaatgatagtaaattaaatgttaaaaactctaattaacatatgaaattgccacttgcgtgatttaaaacttttaaaaatcctctagtcaattataattagcatatgaatgctagtaaattaaatgttaaaaactctaattaacatacatatgaaattgccacctgtgtgatttaaaacttttaaaaattgtaagtatcacatataactagcatatacatgatttaaacttgttgaaacctctaataatcgtgcgtaattaacatatgccatacatcaattgatttatatggataatcaatacatccaaaatagtttacatcgtgtacacaataattacggcacgtactttctcctcactattgttccctccttgtgatcgctgcgtgagtaaggggtgtcttcatttgatagggggttgcccatccaactgaaagggggttgcccatccaactgaccgtaatcctcgtcagtcttgtcctcaactccgacgattttttttttgcctgggagaaccacttgacgcttaggcttatcaggccctctgcccttttttcctttgtagacatgtccttcacgaaaaagacttgcgttacatcattggcaaggacaaaaggttcgtccgagtatccaaccttgttaaggtcaacagttgtcatcccactgtcatcaatcattacgcctccactagtcaacctaacccattggcaccggaacagaggaaccttgagaggaccatagtcaagttcccatatgtcctcgatggcaccgtaatacgtggcagttgttccntcgtgtcccttgggtgcagagtgtcatctaacngncacac

SEQ ID NO: 17215 - DNA, 2259 bp, Oryza sativa
  unsure (1)..(2259): unsure at all n locations
ttaaaatgtggacccattgttctcatatcccctggaatgtcgcgatcgacccaacgggtccccctcgccagaaaggcaagttgttgtttgatcgactcgttacccataagatgttgtcgtagccacgcggggaaagtatcaatgtgatgccgtgtagtccatgcatcggacttaccgatgttcctggcgcgaactagagccaagtgctcctcgatgtaagaagctaccaatgaagagtgttgcagaacagtgaaatgggctttacggaataaattgttgtgtaccgtcgttattgctttccttccgagagttccctttccccgtagtctctcttcatggcgtgattcaggtaccccgattgggcgaaggtcttcgataaattctacgcaaaattcgatgacctcctctgttccataacccttggcgatgcttgcctctggacgagcacggttacgaacatacttcttcagaacgcccatgtacctctcgaaaggaaacatgttgtgtaggtacataggcccgagaatacggatctctttcacaaggtgacaaagcagatgcgtcattatattgaaaaatgaaggtggaaatatcaactcaaaactgacgagacattgcaccacttcattctgaagggcttctaatctatccggatcgatgaccttgtgcgaaattgcgttcatgaatgcacatatctttgttattgttgcccggacattgtctggaaggataccccttattacaactggtagcagttgtgtcatcaacacgtgacagtcatgagactttaggtttgtgaacttcttctccttcgtgcttattattcgcttgatattcgtggagtatccagacgatacctttatgctctccaagcattcaaacatactttccttctctgccttgctaagagtgtagctggctggactcaagtaatggctttctttctcctttggttccgggtgaaggtcgccgcgttgttccatatgcttcagatcgttacgtgcttccagtgtatctttcgacattccgtatacacctaggaagccaagaaggtttatgcaaaggttcttagtgaggtgcatcacgtcgattgcgtggcgtacgtccaagaattcccaatatggtaactcccaaaatatagagttctttttccacatcgccacgtgaccatcttcgctctctatatgctggcttccaggcccctttccgaacactactttaagatctttaaccatatcaaacactgttttcccgctgcgatgtttaggcttcgtacggtggtcggccttatgttcgaagtgcttgcctttcttccgtaccgggtggtttgctgcaaggaatcgacgatgacccatgtatacaaccttcctacagtgcttaagatacgtactttctgtttcatccatacagtgagtgcaagccttgtacctcttgttggactgtccggataggttgctaagtgcaggccaatcgttgatggttacgaacagcagcgctcgtaggttaaactcctcctgtttgtcctcgtcccacacggggacaccttcttttttccacaactgtttaagatcttcgaccagtggtcttaggtacacgtcgatgtcgttaccaggttgcttggggccttgaataataatcggcatcattatgtacttcctcttcatgcatagccagggggggaggttgtagatacacatcgtaacgggccaagtgctatggccgctgctcatctctccaaaaggattcatgccatccgtactcaaaccaaaccgtatgtttcgtgcgtcctttccaaattctttaaattttctgtcgatgtttcgccactgcgaaccatcggcggggtgtctcagcatcccgtcctgttgacgctcttcagcgtgccatcgcaacattctagcattccccttgttcctgaacaaacgccttagccgtggtattatagggaaataccacatcaccttagcaggaattctcttctttgttacctgcccgtcaacttctcctggatcgtcccgtctaatcttgtatcgtagtgctttgcaaacagggcatgcttttaggttttcatactcctcaccgcgatataggatacaatcgttcggacattcgctgacgggtggggcccacccatcatccccttcctaacgccgctcccgccgcctcgcccgtgccctagcgccgccgccgccgcaaatcccgccgctcccgtccgccccacgtgcnntcnggagggtncgaagtagcagtcaacaccct

SEQ ID NO: 17216 - DNA, 1320 bp, Oryza sativa
  unsure (1)..(1320): unsure at all n locations
ggtgtcntttgatagcgatcttgtacccgatgagaacaaccgagagtaaatttactcccggttgttctcatcaaccgggactaaagatattttcccgctatttccaaattctttttaaacccggttagggttaagaactgggactattgataagcgcactgaatattaatttccattacatatgtgtttctaaaatagaaaataatgcattaaaattatttaaagtcgaaaaattaatgacaattacttcgaaaaattattgttgtctgtagtaaattaagtggacaaaacgtaataaccaaatatatgatttaaaattaatataaattctaataatcatatatacttagcatatgaatgatattaaattgttaaaaattgtaattaacatatgtatatacatacgacatgcatgatttaaaattaataaaaattctaataatcatatataattagcatatgaatgatattaaattaattgttaaaaactctaattaacatatgtaaatgccacatgcatgatttaaaattaataaaaatttgaataatcatatataattagcatatgaatgatattaaattaattgttaaaaactctaattaacatatgtaaatgccacatgcataatttaaacttttaaaaattctaattatcgcatataactagcaattacatgatttaaaattgttaaaacctctaataaccgtacgtaattaacatatgccatacaacaattgatttatatggataatcaatacatccaaaatagtttacatcgtgtacacaataattacggcaatatatcggctgtgatggttgaccgcacgtactttctcctcactattgttccctccttgtgatcgctacgtgagtaaggggtgtctttatttgataggagtatgctagggtcaatcgtcaccgtgaaagggggttgcccatccaactgatcgtaatcctcgtcagtcttgtcctcaactccaacgatttttcttttgcctgggagaaccacgtgacgcttcggctcgtcaggccctctgcccttctttcttttgctagacatgtccttcacgtaaaagacttgcgttacatcattggcaaggacaaaaaggtcgtccgagtatccaaccttgttaaggtcaaccgttgtcatcccactgtcatcaatcattatgcctccactagtcaacctaacccattggcatcggaacagagggaccttgagaggaccatagtcaagttcccatatgtcctcgatggcaccgtaatacgtggggtaccgagctcgaattaggtcgatagtgcacggctattctaccggg

SEQ ID NO: 17217 - DNA, 13171 bp, Oryza sativa
  unsure (1)..(13171): unsure at all n locations
cgatgggctttgtttgactaagaacctncagnctgcangcccgcaggncgactctagaggatccccttttgggtcgtactcttcatgtcttgggctctcgtgtagaatgtgtacccattgatctcatatccctggaatgtcgcgatcgagatgttgtcatagccacacggggaaagtatcaatgtgatgccgtgtaatccatgcatcagacttaccgattattctggtgcgaactagagccaaattctcctcgatgtaaggagctaccaatgaagattgttgcagaaccgcgaaatgggctttacggaataaattgttgtctaccgtcattattgctttccttccgagagttccctttccccgtagtctccctttatggcgtgattcaggtaccctgattaggcgaaggtcttcaataaattctacgcaaaattcgatgacctcctctgttccataccctttggcgatgcttgcctctagacgagaacggttacgaacatactttttcataacgcccatgtacctctcgaaaggaaacatgttgtgtaggtatacaggcccgagaatactgatctctttgacaaggtgacaaagcagatgcgtcattatattgaaaaatgaaggtggaaatatcaactcaaaactgacaagacattgcagcacatcattctgaagggcttctaatctatccggatcgatgaccttctgcgaaattgcgttcatgaatgcacatagctttgttattgttgcccggacattgtctggaaggataccccttattacaattggtagcagttgtgtcatcaacacgtgacagtcatgagactttaggtttgtgaacttcttctccttcgtgcttattattcgcttgatattcgtggagtatctagacagtacctttatgctctccaagcattcaaacatactttccttctctgccttgctaagagtgtagctggctggactcaagtaatggcttcctttctcctttggttccgggtgaaggtcgccgcgttgttccatatgcttcagatcattacgtgcttccagtgtatctttcgactttccatatacacctaggaaaccaagaaggtttacgcaaaggtcttagtgaggtgcatcacgtcaattgtgtggcggacatccaagaattcccaataggataactcccaaaatatagagttctttttccacatcgccgcgtgaccatcttcgctctctataggctggcttccaggccccttttcgaacattactttaagatctttaaccatatcaaacactgttttcctgctgcgatgtttaggcttcgtacggtggtctgccttatgttcaaagtgcttgcctttcttccgtaccgggtggtttgcagcaaggaatcgacgatgacacatgtacacaaccttcctacagtgcttaagatacgtactttctgtttcatccatacagtgaatgcaagccttgtaccccttgttggactgaccggaaaggttgctaagtgcaggccaatcgttgatggttacgaacaacagcgctagtaggttaaactcctcttgtttgtcctcgtcccacatggggacacctttctttttccacaatagtttaagatcttcgaccagtggtcttaggtacacatcgatgtcgttaccaggttgcttgaagccttgaataataatcggcatcattatgtacttcctcttcatgcatagccaggggggaggttgtagatacacatcgtaacgggccaagtgctatggccgctgctcatctctccaaaacgattcatgccatccgtacttaatccaaaccgtatgtttcgtgcgtcctttccaaagtctttaaattttctgtcgatgtttcgccactgcgaatcatcggcggggtgtctcagcatcccgtcctgttgacgctcttcagcatgccatcgtatcattctagcattccccttgttcctgaacaaacgccttagccgtggtattatagggaaataccacatcaccttagcaggaattctcttctttctcctggatcgtctcgtctaatcttgtatcgtagtgctttgcaaacagggcatgcttctaggttctcgtactcctcaccgcgatataggatacaatcattcggacatgtgtgaatcttctgaacttccagtcctagagggcagactattttcttagcctcgtatgttgtctcgggcaatttgtttccctccggaagaatgttcttgacgagtttcaataaatcgccaaatgccttgtcactaacaccatttttttccttccattgcaagaactccagagtggtatccaactttttgtgccctgctcgcaacctgggtacaacgacgttctgtggtcctctaacatcttgtccaatttatgggctcccttttcactttcgcagtcctccttggcgtcctacaacatctgaacaagatcatccgcaacgtcgttaccatcagtatccctttcctcctcaccggtttgatttccttcaaatccaatgtactgagcaaagtccagaatattgtcgtcttccacttcatcttcttccatttcaacaccttgctctccgtgggatgtccaacaattatagcttggcatgaaccccgactcaaacaagtggaaatgaatagtcctggatgcagaatactccttctgattcttacacttattgcatggacaacaaataaaacccttatgcctgttagcttcggccactctcaaaaaataatgcacgccgtcaataaactcttttgaccgccggtcagcatacatccattgccgatccatctacatgacatgaaaaaaaatcgtacacaaataattattcttacaataatgacggtcatacaataattataaaataattacaaactctttcaacagtcatacaatagatgacatatcattatgcatacaaaaattataaaatattacaccaaataattcttatttactatttctaaagtttcaaactaatattaatgtgttgtacttcttttaattttcattttagtttgttttctattatttaagattaactttcactatattttccttctcaactattttataaaaccttctttagcaaataatctaaatttctatatattctttcttccccccacacaaattttctctctcatcaacttacaactaaattttggagacataaaagtgtgcaaaacatagctccaaatgtaatatgacaaaaaaaacattggaggatgaagttgctaaccttttaggcacctctgatttatatataatcaccaaaataaattcacaagaaattttggcatgacctcccctcttttttgaagaaattttgaagcttgctcgggcagctggaggaggaagaagacatatatatataggggtgggactttagtcccgggtggtgttatgaatcgaggctaaagattgccgagatctttagtcccggttggtaaccaaccgggactaaagttacgatctttagatcccgggggggggggagggggctgacaaaccctgatagcatttgaaccgcatcttaccaaccgggactaaagaccaaatatgcccgttaccctttttaaccgggactaaagatcatctttagctccggtttttattgcaaccgggactattatggaattcggccgaccgacaaaaaatggtttctccaccagtgtgatctatgccttaatgtggatcttgggtatggcagtcgaagcatctgctcaattcatcaagctggctcccttttttttttgtctgacgataggtactggttctaaaaccggcatctatcacatggctcattaattagtgccgcttgtgtgacgccggttacagaaaccggcacctatgcaggcttacaaactggaagtaatctatgtttctgtagtagctagttctattttcagcccaataaacgtgaactaaagggctctcacagcttccgcccacctaaattggaaacactgatatgtgtttgtgcattgcttacacttctgctcataaaatacactctttttactgattttttaatctggtagcatgaaaacttaccagcatgatcatacatgttcaagcataagaaatcgagaattcagagaacctttcagctcttacaaaattatttaaataagaaaaattagattgtacataactctataaggatataattctggaaatttgctcagaaaccaaaacgtacttataaatatcaaggattaaatttccgcacaaagtgaaatattcaacagatcacactaaacgatatccctacatacactctacacaattatacaacagaaacaattactttttgaaaaaaaaaatccttgtgtcacattatatataagttcatcaatttttttgatgttatacaattaattttctcctttttctatttaatttatcacaaacaaaaacatgatattatcggtgtatttagttttcttaatgagcttacaaaactatactagcaaggtagcatttacatgcaaaatattgtgaaattttgcataataatttgtctgcactttcgttaaaccccatcaaggtagactgatatcgtcgagtatatcgaaatattgtcccaatatccaaattggaatggccttccagccatactggaattgacaagcttaattaatctgtagagttaattaaatccagaagatacaccccatgttgctgtagtaacctatatgaaagaaaacaaaaaaaattgagcaaatgcctataattaagccgtaggctataatcggtttgccacacatactgattataagccgtacatgttattataatctgtaggtgaaacttttatttatatgtctttattgatttaaaagctaatactaaaagcaagctctataaaaaaaattaaaaccaacttcaaaatttaatttgaaaattcaaaatttgcagacacttataagctatgtaaggcaaaatattgtaggaaaaaagagcgggattgtgggaaccatacatatgaaatctactggcttggctttttcttgataatatgctctcacgcatgatgtcgtcatttatacacttgtgcttgtttaccagagaactacaaatagtgggtgacaattaagtatacgataaccaactaaagatagcataataggctttgatgatctattgcataaattgtccccatctttcttatatggataacaaaatagaccgttattctcgcctttaatgggcattgacaccattgttgaatttggctgtgggaaaacccactagttttccgttctttttcggacatgtaatgcaatacgcattacgtacccattagtcatatttatttgacgttggtagctagtattaaatttacaaatataagcacatgcgatacagttacacggcatgggcagtcgatgcaaactagctgagtgaatatgtacgtgcacttcaacaattcaactggaagtggctaagagaggatggaaaaagtctgaaatattctctcgaacatttctttttatagaaataactgtttcacagaatatgggtactgcattgcgtggctcatgactcatcagagatatggaccaaaatgacatagacaaattggtcctctcgaatggggcccataacatcaaacacggaggtgcagctagcgggcccacattgatgcgggacagtgccgaccaggtggcgtctctctcgagtcttgacctagctatttcatcgcaaacgtcaccaccgactgaaaccagatcaaacctacgcgcccctatagttgtttttttattgacagccagtatacataattgaatgttttaaattaaaaagagcctatatcttgttctaactcactattatacctgttcatcttgctaggttcaagcccttgaagagtttctttcttcagaatcggcagcctttattttattccatcgaccatcgagggccttcctgatttctcgaggataagatagcatggtacttacatataaccgatcattgtccaacccccaaaatgtgatgactgatgacttgatatttgttaataatttggtgtttagcagacaatctgattactttctaatcacaagtctataattggtcccacagttggtctatgagtccgtacatccatggcgcatatgcattcctttggaatttatattttataatttgtagtattacagttgatttacattttctcgaaggcatacaataattcagatatacgtttgtatgttttcattcacgttagaccatgtcgtattactacctccgtcctaaaatatagctatttctagcacagtgtcttgtcctaaaatgaagctatttctccacctacctcctcctctcaaccaatcacaaccattattctttgtctattttctcttttcaaccaatcacatactttctctaatcattctcacatactttcttaatacccgtataacctaaaaaataactatattttgagatggaggaagtatctatttaagatctgttgcaatgcacggacacctgagtagaagaaacacaagctttaaaactaatgtatgttggacttagatagcttntcaacagactctagcagntacatctgccatatctaaatgcaaagggatatgtgtcattaacaggtcagaagcatgcatggttaatattcctgaaatcatcaaatctttaatttttctaaacgccaaactgcgcacccctgaaagctctattgttcagctggagttgcttattgcgattcatagtccactcatcatcatagggaatgttacgtaggacctcaaacatcattgacttgatgtgttcaacacatagtacatggaaaaattaacatgcgatgtgtcgcctctatactcgatctaaatctgaccaccttcaacacattcatgaacgaagtgatactttctgttgatgtgtttgctccggccatgaaatatcggattcctctttcttcctcactccgaacatgatcttgggtatcggttcatctttgccggttcatggttcctttatgaaccgatagtgacgaagctccatcaccgccgattcacaattgttatgcagtgagagtagctcgatctatctatatatagagccaaattattaattatgcaaacgaactaaagatagctgaatagagtacaatactccctctatactcgtaaaggaagtcgttttggacagcgacacggtctccaaaacacaactttaacttcttgtttctataaaaaaatttattgaaaaatgatatatgtatacttttatgaaagtatttttcaagacaaatctattcatataatttttacattttcaaactcaacaacttgagagttatttatgatttatatttctaaggtttgacttaaacattgtccaaaacgacttcctttacgagtacggagggagtatatcgcatgagagttaactgtatcactaccgtggatatgcaaataaccacaggctagaccgtcgttcttgcgtttaatgggcattgacaccattattgtctaagagtttggggcataggaaaacccgctaattccactctttccgagacatgccatgcaataatcaccatgtgctccaagctaagtacgcgcaggagctcggcttatatatacatcagcaaattcatgcagtatgcattatgcagtgacaaccaatcagcttggctgcatcacttcaaaatattggttcggacatctaataaagttgtaaacaagataaatttgttcggaaaaaaaatgtaagctgccactaatgatatatttgttcgggctagtactagtatttcatatatgggccagaaagtcagacggacaggtgcgggcccagttgtcagacagaagtgcaggcccagttgatccgcggtgtgttggactccagtaggagcagccgacctagggctacgcggctgtagctatctatctcatcgggggatgcgtgcaacgccgccaccgacagacacaccgcgtgttctggacgctgcccttggagaggagatggagcccgcaaatccgccgattccgccgccgccgccgccgccaccgcctaccaggaagcctaccaggaagaggggaaggggggcgacgaagggcgacgacccggtcccggatgaagcagcaccaccatgcaagccgtcgctgcctctggccacggggagcagaagggggcgcagccatgtacctccgccactcggagttggaggagacggcggcgaggagggcgtcgacttcgtcagccacctccctgacgccgttcttggcatcatcatctcgctcctcccgagcaaggacggcggtaagaccagaaccctctccaaacggtggcgccctgtctagcgcaccacgccgctcaacctcgaagccagcgatctcgcccccggcgccaacggggcggcgctagccgtcctcctcacccatatactcctcgctcatgcggggcccgtacgccgcttttgcatccccgcgcagcagatccacgagcgccccgccatggtcgaaggctggctgacatcgccaaggttcaacaacctcgaggagctcgagttcacggaagacctctgctatatgagacaactccttccgctgccgccatccattttccgcttctccaacaccctccgcgtcgctgccttcagccaatgccgcgtccctgattgcaccgacctgatgctccagttcccccatctcaagctgctctcattacggcaggtgaaaatctccgaaacctccctccatagcatcatcgccggctgccctgcccttgaaaggtttgctgctcagaaatagctacggattccgatgcctccggatcaactcccctaccattagaggcgtcgccttccattctccctactgtgggagtcacggcgatggagaggtgggttatcacttagaaaatgttatcatcgaatttgctccatgtcttgaaaagttgctccatattgaacgctcgatgggacttggagttcgtgtatccgtgattatggcacccaaactggagacattgggcatcctagacaacgttaacgatgtctattcccgactcaatttcggcacagtggttttcaaggtataatatatgtatatgtagttgtggcttccattatccctataaccccctagcaatttattgggattaattacaagctgcattttacattaatttctatgtgcgtatattgttaataatatgtggtgttagagtatagctatgtacgtccagtccattgtcttagagttctctctagatgatattaggctgatttagacaacatcattgagcatataatcattcgttcttcatgtcactgttctaaagactatggcatactaactagattatcgcttaagtttacaggatagcaagctcttgcacactatgattttgtttggttgtgtgcatcctcagtagatgtagcggctggatataatttttttacttgattagatatccattatctactcccgccatcccaaaatacgtttagacatcacctatagtactacaaatctgcagaaaccctacctagatttgaagttttaagttggtgtctaatcgtagtagtaggtagctatatttttagactgggggagtagaaaatatgatcgacatgtcctaatgttatgttccgtacttaataaagggattcgaggttgttaacttcacaaggccagtgtcgagtgtaaaggttttagctctcatcatggataatctcagcttggacagggttatcaagttaatgatatgctttccatgcttggagaaactgtacatcagggtaaaatacttttcttttcaagtactgtgttgccatacttcttttgttagtttacataatcagaaggtatttaatctattattccccaatttttttttcaggggatcaaatatggggaaactaattactggcgccgcaaatatgggaaaactatcaaaagccttaacatatgtctcaagactattgtgctggatgattatcgtggctcgaagccgcaagttcagttcgccagattcttcatatggaatgcggctaagcttgagaatatgatatttatgagtggacctaacaacgacaacacatatgttattgcagaacagcctaagctgctggagtttgagaaaagggcttcaaaaactgctcactttcattttagatccaagaaatgttattatgattgggtgcatatcaaggatgtccatgatttgtctctttcagatccttttgaatgtacctgttgagactgatgggtgaaattcttgtaccttttcaatattcgagctaggcaagaggactttgcggaggtgctctgttcgaatttaagactgatggatgttgtcactgagctgaagaactatattgatcatgttgaagatttatcttaattactgtacctttggatgtttatgaagaaaaggattgatgtattgggctgttgtttctcagataccattgcatgtgtgttgttccattttttgctgtaacagtactggttaataaaattgttgtagcagtcatattttttgattttttttctatcctcaatatttttttacacactagaaaagtgcctgtgcttttcaacgggtaaactaaatcatggcacattttatgtgcagtattcgagcgttatgagttgtgaaattgacacatatcactggtggagaaaccctttgtagtcccggttcgtaacccccctttagtcccggtttccaaaccgggagtaccaatccgggactaaagatcgctatctttagtcccgggtgaaataaccgggagtaaagatcgctatcttagccacgtggccggctgagccatcttaccaaccgggactaaagatcgagctgacctttttttttttttgcatgcccctgttgctgcatggtttatatatatatatatatatatatatatataaaccatgcatatatatgtttcaatacatatatatgcatacatatatatgtatatatatatatattatattatattatatgtatatacatgcataatatatatgtatttatacatatatatgttatgcaaatgcatatgtatatagatatatatatgaacaaaatatatttacattatagaaaatgtgtacacatgcatatagaaacatatgtagtcatgtattaattataatccattatatgtcctagctagctacgatttcgacgtagtagtactcgctgctagctcagaagctaaggaccggtgaattgtgtttccgtcgtagtagaattcacccttgggatcaaggatttcttcgttgatgaatcccatgagttgttcttgaaccaccgcgataaattccttgtgtgtggtcaggttatccctcatgcgaataaactatatgaatgtatgaaattgattagtaattaaacaagaaatcgctacgtaatgaaattttgaatttatttgtacgtacatcgagctctcttgtggtgatgatttggtctgcaaggcagtggcaatactcgcacacgtaatagccgcacaagttagttccctgcttttgctttgcgcactacaaataaatgacaaacaacgagagatctaattaatatacacttgtatgtatttgaatcggagaaatataaatgtagagcatgtgtactcacaggaaatttgaacttccgcctaagtctttctctccatttgccgcggaccaaatgacggaaccgataccaagccctacatggagtttaaagctatgattcgtagtagcaattaacataacaagattttcttaattaacaaaggaacttatgacggtacctgtctataagttcgaaaaccttgtcaaacgtagactcttttttatccattgagtcatatacgttgacggtgcaggcctccaggtcgatgagtaaaagcacccagtggaatctgcaatgtgcgtgggatgcattacatatgaaacacttagcaagttcgtacgggaatgaaatttggtatgtaggaagacagtaaaattaaactaactctgtgttgtatggcaacagtatgaacgtcttgtaatgctgcgccttcaggagatggacgagattgtcctctgtttcttgtggatattggtcgagcattgcgacgtttactttccgagggtcgatgaatccagtatcgaaaaccctccgccgtcgggccctttgaatctccattctacaacgataaaagggagtatattattttctatggtatacttatatacaaggacctaattaattaaaggagacgtatagtaagaaatctaactgaacgatatacttacaaaatccagtaactcataatagagacgtcgagggcgtccagctggtatagttcgtagattcccctgaaattgatccagagaatgtcatctccttgcaagaagtcagtgtccttgatcctcgctccgatcatctctctaccggtggcgctcatctccatgtacagctgatggaacttgtacatttgtgtgggtagggactgcagcagctcaggcttgacaagcggtttaccgagttcgtacatgtatttcacttccgccttttcgattggtgcgactcctagcaattgatccgtagttagaccagtgtcagtaataaattgttctatcgtcatttctttaccggtcaccaacggctcgatctcctggtttggttgctctccaagctgagggactggtttggactttccagaagatgctttcttcagcgttcgctcatagtctgatagcttgatggcctccttgacagatgcagacatacccctgaagaagttcctgacactagggtctataggaatcttcttttctggacttcgaggcttgaattgtctcttgacttttgatgcaacgtaagcgtcaagctcctcttgcgtgcaatcgtaccccgggtccttgttcttggcggcgtcaactttcgcctttttcgttgcccttgtgtgggcagacggtgtagttggagggcccttgactttgaaggtgccgaaagaggagcttgcgggggagtaggtgtaggagcacgaggaggagtcggtccaggatcctgaggaggagtagatgctggagcctgaggtgaagacggtgctggggaagcatgaggagaacccggtgcaggatcctaacagtanatgncgnagcgntgnagagtgttatcaagtnntcaataggtntcactgtgcgcca

SEQ ID NO: 17218 - DNA, 2678 bp, Oryza sativa
aggagatggtgcatgagacgccgcttgttgcccagggaggatgatgtaccgcctgcgccatagaataatggcatggcatgtgtctcgtagatgcgtctcaccgtctcctccagggtaatccagctcgaggtcctcgtacgcgccttcgaccaactcaacttcgaccttcgagtatcctgctggaatcggcctgcagtggtaagtacctgaagggtccgttgggatggccatgcccgacgccaccttcatgttgtgagagattatttattagtaatcaacatatataagcagcaactagcggaatggctaaatcttacctttattgataagttcttgaaaggaatatgcagctcacatggtgtccgctgagtgatgtcatcaacgggacaggtcgattcgtcctgtgtttgcatggcgtccatgctctgtgatcctacctgccccgttgaggcgcagctgctacggtttcctgacgggctcaccattgcaggaggaatggtcggctggggataatgggaccgatgtgcggccatgcgttcatcaaccttccttgccacctcctcttgcatgttgagttcgtagctcgatacccggaactctaggtctgcaatcttcgcctcggtatctctcttgctcctcatccgactcctgtacgtgtggatgtcctccttgaaaccaatcttccaaggaatcacccctttccctcgagttcgtcctggatgctctggagtctgcagggcgagtgtcagctcgtccctatctctgtctggtcggaacgtgccctgagaggaggcttccactgcatctgttagtcgtcgcgcagcctctcgtatctgatagccgaagaccagtgagccatcagctgggttgagcgttccaccgtgagcatagtaccagaactttgattgttccggccaattggctgttgccggttcgatacccctctcaatcaagctagcctccatctgctcccacttcggcatcgcgacgctatagcctcctgaccccaagtggtgatggtacttcttcttggcggcattttctttgtttctttccatcatcgcctgcccttgttcacctgtcttatatgcaacgaactcgtcccagtgatcccttagctttgggaatgtgtcgaagttcggtgtctgccccttcagtatatacttctggtacagatctcccttgaagctctgaaactgttctgccattttcttcagagtccaccttttcactttgtcctctgtacccgcaggaagggtgaatgtctcgagcattgtggtccacagcatctctttctccaaatttgggacaaagctctcatgatctccgcgtgcccttgttctgcgccagtacaccgtactgataggcacgttatcccgcacaacccaaccgctgtgtcgtacgtagttcttggctgcttccgccggggcactaggttgtctgacttcgtccacttccgttatgatgtgccgaccctctagcttctttgcggcacctcattgcccgcgtgccctcttctgtccagcggagggttgacttccactagcctcctcctcctggttcccctccacatccctctccacgttcccctcctggttcccctccgcatccttcttcacgttcccttcctcgttcaagtactggtttggatcctcattcccctcttcttcgttccagtactggctgcttccctccgcgattgtatcgtacaatatctgttcctcatcgcgatcagccatctgttcatacaagaaatagttgctaagtctataggtcatttttgctttaacaatcttatatgctaacaatcatatatgctaagtctaactgtcgtatattagaaccctacacaatcttatatgctaagtctaattacaaatctaataatcttatattaaaactataataatcttatactaaaactcaaatagtattgtattaaaactgtaatagtcaactatgctaagtctaagtgtcgtgtattaggaccctagacaataattatatactaagtctaattacaaatctaataatcttatattaaaactcaaataatcttgtattagaactctaataatcttatattaaaactcaaatagtcatatatgctaagtctaactgtcgtatattagaaccctacacaatcttatgtgctaagtctaattacaaatctaataatcttatattaaaaatataataatcttatattaaaactcaaataatattgtattaaaactctaattatgttgctaagtctaagtgtcgtatattaaatctaatagtcttaattgcattaaaaatctaacaatcatatatttacatcacttgcctgcgcgaattccttcgagggctagcgaccactccggcttgagggacgacgacgacaacgacttttctgcaacatacaaaaagatgtattaggataaacgcaaagtaacatatattgtatttcacgttcgcattctcgttaagttcacgtttcgttcatgatcgttcacgttcgcgttgtcattaagttcacgtttcattcacctacgttcgttcgttcccgtgagttcatgttaacgtacgttaagtaatgttcgcgttcttgttaagttcacttttcattcacgcacgttcgtgcgtttatgtatgttcacatacaacgttaagttcacgttcacattaggttcacg

SEQ ID NO: 17219 - DNA, 1576 bp, Oryza sativa
  unsure (1)..(1576): unsure at all n locations
ggcgacgggaaacgccggaatttccgacggccacgaaattagggcacgatcaaggcggcgaaaacgccggaagaaaggggataccgggtgggccccaccagtcagcgagggtggcggacggccccccccatcagcggcgcgcctggaaagtagaccaaatggcccgggggggagaggagagagaggaaaagaaatggtccgaaccggcccaagagggggaggggggaaaaagactttttagagcttttctttttataaaacctttttaactttgtttatttcttcttaattattatttgtgctctgaaaattccactaaaatttatttacgcattttaggcttttaggaaatatacaaaaatcctccaagccttatttgacttttaactttgcacattttaattgttggagactttcacacggattttaattattctaggcataatttcgaggatgtattttagagttgttttcggacgcgacaaacctacccccttaaacggaatctcgaccccgagattcggaagaactggcgaagagatcgggatgggctgccttcagctcgtcttcacgctcccaggtagcttcttcctcggcgtggttgctccattggaccttgcaaaaacggattacccggttcctggtcctgcgctccatggtgtccaggattttcactggcctctccacgtaggccaagtcttcgcgaacttcaatttgctctgagtcggcctgctcggatggcactcgaagacatttcttgagttgcgacacatggaacacatcatgcacgttgcccaaggaggcgggcagctccaactggtaagcgacttctccgcaccgagcaatgatacggaaaggacccacgaaccgaggtgcgagctttccctttgtctgaaacctgtgtacacccgcaggggcgtgacccgaagatacacaaagtcatccactgcgaattccaggtcacggcgtcggttgtctgcataaattttctgccgagactgggccacctttagattatcccgaatggttctgactttagctttagcttctctcaagatatcagtcccgaacacttggcttttcccaacttggtcccacaatagcaatgtcccgcatttcattcataccacgcttcataggtgccattngtttgctggcttggagctggtattgaagaaactcggatatggggactttattccagtttttccgaattttagcacttgcccgaagatatntttaggatttgattagacgctcggcttgtcatatgctgtgggtgaacctggtgctgaaattaaatcgggaccaccttttttgtagtttttcacaagggaagggaatggttccccattaaaacaatattttgggaccgccgggactcccaacctcccaaaaaaccgcgtgtttgtcctccaaggggcttcaagaaaaacggctcctggttttccccacacaccctttaagttccccttgtgttgaaaccggagaaacccccactttccctcctcttgcttggagaggaaaaccgcggttggtgtttttttccctgcacataaagggcgaccttttttct

SEQ ID NO: 17220 - DNA, 5938 bp, Oryza sativa
aagttagcagtcaaagacgaaagatacaaacgaaatgcctaagcataaaatcgacgaaggtgttcaatattccaagaattgttgatgagagtaccatcttcgcgcttgagtcgataagaacctggccgagtgacttcggcaattatgaacggtccttcccataagggagataatttacgccgatcctgtgtggtttgaattttcctcagaaccaggtcgccgactaaaaaggctcacgatcgaacattccgattatgataacggcgcaacccttgcaaatatcgagtcgactgaattaaagctacttctcgggcttcttctagtcgattgatgtcgtcaactcggccctcttcatagtcctcctcgttgaagttccgaaatcgtagtgattcaaattccacttcactcggcaacattgcttctgcaccataaaccaaaaagaacggcgactggccgatagcccgactggaagtagtgcgtaaagaccaaagtacggacggcagctgatctacccacttgccaacatagggacgcagtcagtcaaaaatgcgtgctttgatcccttgaagtatcatgccgttagcgtgctcgacttgtccgttactcatggggtgtgccacggaggcgtaacaaattttaatgccaaagtcttcacaaaagtctctaaatgctccgccagtgaattgagtgccattatcagtgatgatccgattaggttccccaaaccgatgcacaatgttgatgaaaaaatctctagctttatttgccgtgatcgtgatgaccggtttagcctcaatccacttggagaatttgtcgatagccacaaagagatgcgtgtaaccgccgactgcccttttaaacgggccgaccatgtcaagcccccagaccgcaaacggccaggacaacgggatagtttgcaactcttgggctggcagatgaatttgtctggcaaaaaattgacaaccttcgcatgtccgcacaatcttgtcagcatcagacacagctgtaggccagaaaaaaccttgccggtaagctttgccgacaatagtccgtgcagcagcatgattaccacaaataccagaatgtatatccttcaacaattgtctcccttcttccaaaaatacgcagcgctgcagtattcctgatggacttttcttgtacaactcagtcttatgaataatgtaaagtctgctgcgcctggaaatccgctcggcttcatttttgtcttgagggagttcttgtttggtcaaaaattttataagaggttctctccagtcggtttcaatcatgcttacgccttgagtatccatggcttcaagtgtttcttttctgggcacggttggttcataaagatgttcgacgaacacatctgaaggagctgcttcccgttttgaaccaaaattggccagcctgtcggcagcctcattgttatgtcggaggacatgggtgagctcgagtccatcgaatttatcttccaacttgcgtacctcttgtcgataagcagtcatattatcatctagacaagaccactctttcatgacttgattaacaaccaactgagagtctccacggacgattagtcagtgaatgcctagagagattgcaatccttaatccatggagtagcgcctcgtattccgccacgttatgggacacagaaaaatgtatccacaatacgtagctcaatctttctccagtcggggaaatcaagacgaccccagctccagtgcctgtaagcctcttcgacccatcaaaatgcatagtccaatgttccatcttttcctctggcatgtcttcttggcactcggtccactcggcaaggaaatcagctaacgcttgtgacttgatcgaagttcgtggcttgaacgatatgtccaaagacatcaactttaaggcccacttcgcaatccgtccatttgcttcgcgattatgaagtatatctccgagtggaaacgatgtgaccaccgtgaccgagtgactttgaaaatagtgagataacttcctgacggtaattaagacaccatataataacttttgaacctgaggatatcttgtcttggagtcgactaaaacctcgctaacaaaataaattggacgttggactttttgaatatggtcttcctcttcacgctcgacgaccaggaccgtactcaccacctgggaggttgccaacacatataacagtagcggttcttgtggatgtggcgaggctaaaactggtgtagtggtgagaagtttcttgaagtcttcaaaggctttttgtgcttcgggtccccactggaaattgtcagtcttcttcagcagcttgaagaagggcatcccccactcgccgagtcgtgagacgaaccggctgagcgccgccatgcaaccagtcagcttttggacgtgtttttgggagcttggcggtttcatgttgaggatggcgttgattttctccgggttggcctgtatgcctctttgagataccataaatccgagcaacttccctaacggtactccgaagatgcacttttccgggtttagtttcatcttgaaagcacgaatgcttgtaaaagtttcttctaaatccgcaatcaggtcatccttctgcttggtcttgacgactacatcatcaacataagcttcaacattgcgaccgatctgagttgaaaaacatctttgaatcatgcgttgataggttgctcctgcgttctttaatccaaagggcatggtgatgtagcagtaggccccaaagggcgtaagaaacaaggtcttcaagcagtcggattcttttagtcggatctgatgatatcccgagtaacagtccaagaagctgagtaactcgcagccggccgttgagtcaaccacctggtcaatgcgaggtaacccaaaagggtctttgggacaatatttgttgaggtcggtataatcgacacacatgcgccattgccccgtctttttccgaaccaggactgggttagccagccagtcgggatgaaggacttccttaatgaagcctactgctaacagcttggttaattcctccttgatcgcatccttcctgtcctgtgcaaaatggcggagtcgttgcttgatgggtttggcctcttgcttaacatgtaaagagtgctcaatcacctctctaggaatactaggcatatcagatggtttccacgcaaagatatctttattattttgaagaaaggtgatgagcgcgctttcctatttacaatctaactcagcgcctattacagcagtcttatcaggatcggagggatctaagggaatctttttcatcttggcatcaccttcttcggtcttcgtcagcttggttgcaggcacttctccctcgcttgccgtggtcgcagccagtcggatctcttcgcgggcaagagtagtctcgtgggtttgggccatctcgcaactttctttgtcacatgtgacggcctgcttgatgtcgctccgtagtgatatgactcctcgaggaccaggcatcttcatcatcatgtaggtgtagtgtggggcggccatgaatttagctaaagccggtcgtccgagtatagcatgatatgctgtctcgaaatcagcaacttcgaagcaaacattttctgtgcgaaaattctcccaagtgccgaaggtaactagaagagtgatctggccgagtggtgtagctgacaatcctgggataacaccgtgaaagggtgcattactcggctttaattatgtgcgaggaatctgcatatcgtccagggtcttagcgaaaaggatgttaagtgcactgccaccatcgatgagagtccgtcggagcttgacattgcgaaccactaggtctagtaccaaggggtaccgccccgggtggaccactcggtcgggatgatcggagcggtcgaacttaattgctatctctgaccaccgaaggtattgctatctcccgttctgttagcttctgctttctcttagattcataagccaggggtccaccgaacatgtgattgagttctttgcggtgatcttgaaaaccagtcggggcatcgtcttcatcatctttcttctttgatgtgccttgatctccgtctgagggcttacgcgcgttcttgacatattgcttcacaaactgtttgtagacgaagcaatctttggccacgtggttggagttgggatgatgcggacattgggagttcattattttgtcgaaggtgttgacgcgggaacgttgttgggaagacggagaggtggtcgccacaagttcttcgggcttacgcttgcgatccttgtggttgttacttccactccctcctgcagtcggcgtatccttctttggctttcaagcggtgcccgactgcttggacgccgtgatagcattttcggctttggcatactcattggctttttcaaacatctacttgaccgtcttgggaggtttgcgtccgaacttgccgactaggtccttgtggcgaatgcctttagtaaaggcggcaatgatgacgtcgtcggcgatgaagtggtcgcgtagctctgcccatgatccgatcgtgccgcggggtagcccgtggagccatgaccgggcagaatccgctagggccacaggtagataattcgccatggctttgctgtctcctcctgctgcgcggattgcgagaccatagacggtgagccaagatttaggcttggtggtgccgtcatatttctcgattccagtcggcttaaagccggctagccaatccactcgacgcagatcgcttgtgaaggcagcaactccgtccatgtcgtcgtcatagcgatctggtgaatgatggcctcttgctgcgcggcgctggttgatggtgtcgcaaagatcgatggggcgccttcgatgtggggagtgtggtcgttcaactcggcgctccctatatcgttcggaaggcaaacgaatagaccgttcatcgtgtcccctgctcctgcgactagattcggcgccggcaatgctgaggcttggctggtgattgtcttgagatcgaagatgagggactcggctaccagtcggggtgtcgcgtcccaaaacgactctaaaatacatcctcgaaataatgcctagaataattaaaatccgtgtgaaagcctcccacaattaaaatgtgcaaagttaaaagtcaaataaggcttggaggatttttgtatatttcctaaaagcctaaaatgcgtaaataaattttagtggaattttcaaagcacaaataataattattaagaaataaacaaagttaaaatggttttataaaaagaaaagctctaaaaagtctttttccccccctccccctcttgggccggctcggcccatctccttccctctctctcctctccccgcggcccattcggcctcctccccgtgcgcgcgccgctgacgggtggggcccacccgtcatccccttcctcccgccgctcccgccgcctcgcccgtgccctagcgccgccgccgccgcaaatcccgccgctcccgtccgccccgcgtgcaatcaagaggggggaaatattccccgtgattccctccctctttccccccatttttccctccctttctcccttggattcattcggaatctttccccctaaacctcgccggcgcatcaatggcggccggatcttccgcgcccgtttccccctcatccggctgccctctctcactcccaaccctatataaacactccccgtgccttcctccaccgtttacgccactcgccggtccctctctccgccggaatcgagcttgcgccgtcgatctttctcttcggcggaaccgccgagctccggactgccggcggcggcggcccggacctttctccgcttcggcgcccgcttcttcgggtatggcgcaaccttgccggactcggtcaccccttcgtttcgcccgccgaccggcggaacgcccgcgtccccgtttaaccgagccgggcccggcggcttccttcggttccgggcgccgg

SEQ ID NO: 17221 - DNA, 1233 bp, Oryza sativa
  unsure (1)..(1233): unsure at all n locations
atgatttcacggtatggtcatcgggttaanccaatgctctggcctttctncatgacttaaatgaccaaagtgtccatgaaatacttgaataagtttgttgtggttttcattgatgacattctggtatactcacaatcagaggaagaccatcagcaccatctccgtctggtattgggaaagttgcgggaacatcaattgtatgccaaacttagcaagtgtgagttctggttgtccgaagtcaagttcttagggcacgtgatatccgctaaaggagttgctgtggaccccgaaacagtgaccgccgtcactgattggaagcaacccaagacagtcactcaaattcgcagtttcttaggtttggcaggatactaccggaggttcatcgagaacttctccaaaatcgctcgacccatgacacagttgttgaagaaagaagagaaatttgtgtggagcccgcaatgcgagaaggcgttccaaactctcaaagaaaagctggtttcctcgccagtgttaatcatgccggatactcgcaaggacttcacggtgtattgtgacgcttcgcgccaaggattggggtgcgtgctcatgcaggacggtcatgtggtggcctatgcctcacgccagctacggcctcatgaaggcaactaccctacccatgatttggagttagccgcggtggttcatgctctaaaaatctggcggcactatctcattgggaatcgctgtgaaatatatactgatcataagagtttgaaatacatcttcacccagtcggatctgaatcttcggcagaggagatggttagaactcatcaaggattatgatgtgggaattcactatcatcctggtaaggccaacgtggtcgcagacgcataagtcgaaaaagccaattgcaacacttcttaacgtcccgggcaattccaccccgaacttaaatcaacagattgaaagccctggatcctaagcataagggggtcgcgggattctttggctgcgttggaaaccaaagcccacctttgctcgatcaaattcgcgaggcttcagaagaacgatcccgacatgcatggactcctcaagaatatgaaacagggtaaagccacttgtttcacagaaggagaacaccggacccctatggaaccggaaaatcgttatggcgttccagataacaagagacattaaacaggtgatactttacgaaagctcacgaaagcccttatttcaatcacccttgga

SEQ ID NO: 17222 - DNA, 20557 bp, Oryza sativa
  unsure (1)..(20557): unsure at all n locations
gtcaactccttgtaacatacttattttattgnnnctcctcnncccttccttttttcttcttntnnttccttntctnngtttttttnttncnnccaaanccccnnnccncnnnaggtgatgattgcgaactcgctcgnnacccancancccgnnctgttgacgctcttcagcgtgccatcgcaacattctagcattccccttgttcctgaacaaacgccttagccgtggtattatagggaaataccacatcaccttagcaggaattctcttctttggtacctgcccgtcaacttctcctggatcgtcccgtctaatcttgtatcgtagtgctttgcaaacagggcatgcttctaggttctcatactcctcaccgcgatataggatacaatcgttcggacatgcgtgaatcttatgaacttccagtcctaacgggcagactatcttcttagcctcgtacgttgtctcgggcaatttgttttcccccggaagaatgttcttgacgagtttcaataaatcgccaaatgccttgtcactaaccccattttttgccttccattgcaacaactccagagtggtatccaactttttgtgcccctgctcgcaacctgggtacaacgaagttctgtggtcctccaacatcttgtccaatttatgggcctccttttcactttcgcagtcttccctggcgtcctgcaacatctgaccaagatcatccgcaacgtcgttaccatcagcagctatttcctcctcgcccgtttgatttccttcaaatccaacatactgagcaaagtccggaatattgtcgtcttccacttcatcttcttccatttcaacaccttgctctccgtgggatgtccaacaattatagcttggcatgaaccccgactcaaacaagtggaaatgaatagtcctggatgcagaatactccttctgattcttacacttattgcatggacaacaaataaaacccctttgcctgttagcttcggccactctcaaaaaatagtgcacgccgtcaataaactctttggaccgccggtcagcgtacatccattgccgatccatctacatgagtcaaaaaaaccgcacacaaataattattcttacaataatgacagtcatacaataattataagatatctttattcatacaaaaatcataaaatattacaccaaataattcttaaaaactatttgtaaagttttaaactaattttaatgtgttttacttcttttaattttcattttagtttgttttctattatttaagattaactttcactagagttttccttctcaactattttataaaaccttgtttagcaaatgaactaaatttctatatattctttcttccccacacacattttctctctcatcaacttacaactaaattttggagacaaaaaaagtgtgcaaaacataggtgcaaatgtagtatgacaaaaaaaaacattggaggatgaagttgcaaaccttttaggcacctccgatttgtatgtaatcaccaaaataaattcaatagaaattttggcatgacctcccctcttttttgaagaaattttgaagcttgctcgggcagctggaggaggatgaagacatatatataggggtgggactttagtcccggttggtagcaccaaccggggctaaagatcaccgggatcattagtcccggttggtattaccaacggggactaaagttaagataccaaccggggctaaagatcaccgggatctttagtcccggttggttaagatctttagtcccggttggtgttaccaaccgggactaaagatcccgggggggcctgacaggtcctgacagcattcgaaccgggactaaagatgatctttagtcccggttggtaacacaaaccgggactaaagatcaaatatgcccgttaccctttcgaaccgggactaaagatcatctttagccccggtttttattgcatccgggactattgtggaaatcggccgaccgacgaaagatggtttcttcaccagtgtatagttattgaaagatattacagttgggggttactatttaattgaaactaaagtattggataggataaataaattgcctacaatatgcaagcatgcagtggcgcttctcttttctagaactaataaagagagatgtatgcacgcgccggatattctaggacagatcgatctggtgatctgttctttcctatgcatgcgagcaaccaaatctgagatggacatgggctgatgcgagcgtatatgaggatggcaagtgtatatatacgcggtcgtacgatgactgtagaggttccccgatgacggttgaatctgatacagtcgatgtatttgtactggaatcgaacgacttaccaaacaatcagcaaaaacatcttctatttttataatggtagagattgggcatcctttttatttttatatggaagtctgcagtgtgactataacctagccatattagggttgttacccttgctataagggagcagctaaaacatgtcactttggctgtatgtacatatgattggatgtaaagaccgggtttaccccattttcttaaaaaaaaaaaagctaaaccaggtctctgtcaaataatagactttcttcaaggaacatataaatatgccattcaaaattggagtgtgttggggcttattaccatatgaagaaaatcacgcatttttaaaatgggagtgcgttgttaccgttgcaaggcatgttttggcatggtatgtactccctccgtctcaaaatataaatatttttagctataaatctggacatgcaggcaaaagttgttacattttggaatggaggtagtacataggtagaatggtgacttttttaaggcagtgcagactataaaaattgttgaggtaaaaataaagttgcgtacatcatagtaaaatccctattaggattatttctataaaatcatttttggtgaatttatccataacgtacaaggtagctagacatgatttgtacattgcaatgttgctactcccttcgttttatattggaagatgtttgatgttttctgtcctagtcaaactccaagtttatagaaaaaattgacaatatctaaaatacaaaattaatattattaaatctaacatggcatatattttataatatgttttatacagataaattcatttgatcaagtgtgtggagcattttgtcaaacacatgaccggcattggcaaagttttctattcagaattgtaacaaactccaggacgccgagcacatgtcgccatgaactccaggacgccggctgatacttgaggatacctagtttttttttttcaaaaattggagagcctacctgctagaatcgccaccgccgctgggatgggggagttcggtatgagggatggctggatcttggacagcacgatggatgaggcagcaacggcacagtggaggagccagccgggaccgtgcgacgacgacgacatggagccatcggcgacacggtggaggaggcggcggggatggggggatgcgggaggagctgggaccacgcgatgacgatgacggcatggagttaggaggattcgggaggcgcagcgcgcatctggagcagcgtgaggaggcacggcggtgaagtcatcgcgttgggaaagcacagcggcggtcgtgggggcatagatagcacggttggagggtaagcgacaaccccggcggtagggaggcacggtggaggatttgaggggtaggcgacggtgccggcggtagggaggcacggccactaggggaggggaggcgcggtcactgccggggtggagggcggccgccggtttcgtcgaaagaaaatgattcgcgggtaggagtgcgggcgtaatcatggcgcggtcgagaggatagggtcgccgaggatagaatcagtggaagatttcaccaaacggattaatggattatattatttaacctaccggatggacggtacagattgatccggatgatttggcttatagaattggaaagggcaactcctactttttatattagtatagatgaagaaaatcgatcacgcgcacagcctccactggcagctgtgtcgtgtgtcttttacaaaatataagggtcataggatcgttgttgatccaaatttaattagcaatgatattaatttttgaagtcgatgttttacccacatttttttaatatatatatatatatatatatatatatatatatatttatatatttatatatatttatatggaagtctgcagtgtcagtaacctaccgaaattaggattgttacacaattacagtacttgctaagggaacagctaaatctacctcctccgtttcacaatgtaagtcattctagcatttcacattaatatgaatgtgagaaatgctagaatgacttacattgtgaaacggggggagtaattaacaggcgactatcaaattatagagtttccttagagcagcagctgaaagcaatgccattcaaaagggccttgggcttattcccatatgttgaaaatgattgcataggccgcaaacatgggcaatatcatgttttctgttttggaaaataaataggacacttattgcaaagagggtgatagattttatttagaaaaatggaaattgctaggcatcgccgcatcggtacactattttcttttcagttagaatcttgcccatctgatctatcttgagattttgaggacccattctagatcagacctgttatataatcccaaaccgcattagagacatggcatagttttccgatctaaaggggtgtgggattagataactcacaatctttttttggaagaagtacgaattgccccaccttcccccctccgaagtatcgtggtcaaccgaattaccctccgaaacccgaaaaatagacattctcaaccactaactatacaaaccagacaaataacccccctaagcaccgttttgagctattttcgacttgagcttgcacacgtggcaatccagtcagcaaagaaaattaaaaaaactcatggacccatctagcatcccttgccctccccaatccctctactctgtttctctccctctcgctcactcggcagacctcggtcagctggcggtggaggcggaggcggagagaactcgggtggccggcgctatcggcggggcgacaaggaggctgcagcgtgaggaaggcggccgccgcagcagtggctagggagcgagctcatgacggtggagcaggcagaggcggactgagcggtcggcgacagagaaggaggccgccttattcaccgacgcttccggccggcgccgtgcacagggctcgctacccatcgaattcccctcccacctccatttcctccttttccccatccacctccgctctccctcccacatcccctccacctcccacacactgccgggtgcagcccgcccccacgtgccgctacccaccgcccatctccgcgccgcgccatgcgcgccgtcgcccactgaccacgtatgacatgtgggtcaagtgaaagataggaagagaggaagagggggtatgacatgtgggtcccaccattttttaaaaaaataaaattttgactggactgccacgtgtacgccacgtaggacaaaaccgctctttattagattaagggggtaatttgtccggtattgaaagtttatggtgagcgatgtctggttttcgggtttaggggacaatttgattgaccacaatagttcaagggggataatttgtatttttttcctttttttaatataatacataacttacaattatgacataagtctcaattatttcaccccatttgcactactacggaaatcctaattggtgccggctgggaaacccccttagataccagttttcccaaccagcatagatgacttatgtcatcggtgccaaaccggcatctatatgtgtattagatgccggtttctcgatgcaccagctcgaatcgagctgatgcatcgagcgcatccacctcgtgttgccccaaaatatcaatccacaacaccacagaacaatgaactcccgaatctatcacatatcaacaagcattgaagaacaagactgaagcggaaggacagaaggccgactccaccgctgctcaccatcaccgtctgccagatccgctgcgggagaagccgacgccgctaccaccgctggatccgcccaaggcagactctcttcccgctgcctgccctccctccaaatctggcggagggagggcaccaccggctcctacactcccaccatcgtccgaggatccgtcgctgctgccgtcgccgcgccgccaccaccttctttcctgcgccaggttgccaccatatcccttttctccgcctcctggtggagggagggcgccgccgctgcctcctaagctctggcggaggggagggcgccacaactaggccaccgacgcctccatcggatctggcccacgtgaactgccacctcctttattgctggagagtgagaagaaagggggatgggacgggaaggagagggagtgagagggagagagatagacgggtcagaggaggaaatgggggggtgagatgaggagacagaattagttatgcatgtattcgatccaagttattcgctttcatttaattgggatctttacatttgagcatatatttgagtatatgagacttgtggtgttgattaatactcatcatttattcatatccttttatacttgtcgtgacggctttgtcatgatggaccgcgcgaggccatttgaagctacaagtaaccgcatcaatcatttgaagaatatatggtgaaatggtttcgacattggcgtcccttaagacaatgaaaggaagacggaaataaggcattcctattgttataattctattgctatttacatttgagtataagaatgtcgtactgttaagagggatgcaacgtcgaggtgtttgtgtatgtctcggtactcaaagtgacctatgatagtactaccttgagagaaacccaagctctaacctatcctttgagtggttttagactttgttttttgttgagttgagtagtcctctaagtgagctttccatagagtccaaaatcataaaaacatactcccgagcgaaaagttatagtcgtttttctctgcgcttttccgaaattctgaaaatggctgcgaaactgatattggcttctgtaaattttcggacatatttgaaaatgcttttcagaaattctgaaaattacagtcttggcctacaacggctagtttttgagaggctcggatatataaactcctccaaccctcctttgagtggatgctgttcttggcaacattagacacatccaaagccaaatagccatccccatttctctacctttgtggtgcctctttatgagaaggatttgagaagggattagagttggattgagaagttgagagctagtgagcttcactacatactttgagtactcgagttcatagcaagcaaagcttcgattgtgattgttactcctgggtactaaggtctcctagacgactaggcgttgccggtgagcacccaaggttgtggtgtgccatggaaagttgtgaaggcttcgatttcgcctccgcaagggaagaaatcaagagtaaaaccgaggagtgcatttatacaacctcgtgagggaagggttgaaatagacccggccttgtgacccctcaatggagacgtagaatccgtggatccgaacttcgggaaacaaatcaacgtgtctcctctcttggtttgctcgttcttgccttctcttatattgttcttgagcttgttttttactgatctacttacatgcttaattaatatagttggtgaccttatatcttgcttagataccttatttgtcaccttttgatttatatacattttgtttattcgagctacaagtttatacctagtgttttattccgttatccgccgaacttttcagttgagaccggaacttccaatcccataccagatgttccgatttgaactgaaagttctcatctctctaatatgctatgaagttgtgataattttctaggaaaacctattcagctcccccccttctaggcgacctcaagatcctttcaactacaaacatttctgtggtagttggtgaggtgaaatggcatggccacgacatatattttggttgttaacaaggtaaccattgcttttccaggaccggttagcgagacggtcgcataattttgagcggttgtcaatgcactagccacattgttttcaccttggattttctcctaattcaaacatctgggtattgtatctttttttatccaatattctataaaattgagctctacctactggttcaactgattatttcatttgagtgaaaatatgggtagcaattcatagtagagcaaacaagcttcgtcgtattcacacttaaaaggattatatgtggagccagcccaaactctccaactttggcgccgagaccaacgagtgatcgagatgccttggtgctgaatttattcaatatgcctcaatcatttaaggttggggaattccactagcacctcacttctgtatcaggtcatctgtgacaggcctaaccgagccgttacagatcacgtacctataacagacgatattttagccgttagggatcgacactcatttgtaacagctcaccaataggagccgttatagatgttagtcgccttatctgtaacggctcttattaaggagctgttatagatacgcccctcatctgtagtactcccattatgagccatcatagatgtcaacctcacatctataacggctccatttaaggagccattgtagatgtatctctcatctgcaacggctcctaatgtggaaccgttacagatgattttaactcgaatcaaccgcaagaaaaaaaatcccatccctcattttccccaccagccacatatctcacttatcatttcctctcctccttcctccacatcgctggtgcggtggagatgacaggcgtggcagtggtggatggcggtgggcgtcgggtgcaggtggaggtttttttatgcatgtgtgtgtggggggggggggcaatgcatggtcagcggagggcggtgggttgggcctccacgatgacggatcagcgaagacagcatccgaccaccgccaccactgacaatgcggactatgcctagacggatctagccaaacaccccatgacctcaactcggttggattctgaggaagggattttgaggagggaggaggaggtagaggtgaggagagagaaacggcgatggagataacgagtagggtggtgcgtgttctgctggtgtcagtggcggagtgcgcggcactgctagtgacaacaacggtgaaaaaggacaattagctcggtactcgtctcagcccctctccctttccctttgcttcatgcgccacctcatacccagatctggcagatgattctcatctttgatttctctatgttcgaattaggatgagggtgttctacagcatggcggggcaagtggatgtgatctagacgcggcggggtacacaacaaatgtggcatcaccaacgccatctccaagtacaagaacacaacaccgacgtcgagcagcaagaggccaggagcagggatgaagacctgtatgtttgtttgatgaatctccacatcaataacagctcatgggcttggattttctttttttaagctgaattttcacatctgcgacggctccaaattcttagccattacagatgagtcttcacatctataactgttgggttgtaatggctcgtctaaccattaaagatatgggtattcagccattacagatgtagggtaatgtgctagtgtttccttgactcactaccacataaatactcattggtgccggatccgaaggcctcatagtgccggcttcggacccgaggggcagaggtgctggatctggaaccgacacctatagttttcaacgaataaaaaaaagaaaaataatccgaaccgcccaccaccggccggccaccaccccgcccggcctacgcgtcaaccattttcactgtcgccgccatcaccagatctgaatgagacgggggggagggcggataaagaggatgagggaggggggcggtatgcctcctcctcctccgccactgccaccaggtccggcctctgcgctggccatttccatcgtcgatgccatcaccagaactagagggagatggccggcagagtgagcgagccgatgagcctcctcctcctttgccgcagccacccacctttgcaccggccttctctaccgccgccgccatcactagatctagaggggccaggaaagaaaggggtcggcgagtgaggaaaacggcagcgccacaccgcaccgtgctcctccttgccatccaaggtcgctgggggagagagggggccgacgagcctcctccacaccaccgccgtcgccgccgctaccttgcctggcctccacgcccagatggtccaccaccgcaggatctttgcaccggccagcttccgcgccgctactcggagagaaagaaagagagagagaggtagagagagagaaggggaggatggaggaggacggcacgaggagaagggaaacgttgcatatgcaagagagatgcgatgtgcatataagtatgagtggggcgacttgttggttcttttaaaaaaccggtacctatagtattgataccggttttttctaatgaaccgacacctataaaccttaaaggtgtgggttatttttttttcttcgtgcggaggtggaaaaaaacccaaaggtgctggttttaagtgaattggcacctataaggttcctatgagagtttctgtagtagtgactctttcttgatatcgcggctcatgtccgagaattcatgcatgattccttcatgaagcggcaatgatagatcatcattatcgatgttcatgacttattgatggtatagctcagcgtatcttatgatagtcaaattattaattattcaaaccatttaatgatagctaaagaaagttcactatatcttatgagttgttcgtatcaaataattaagcagataataacaacaggctagaccatcattcttgtctttaatgcgcactgataaagtaccatgcaataatatttacgacgtactttctctagttaaatttaggaaaaattggttatatagtatcggaagttcacgttttttgttttatagcaccgaaagataccggttcactttaatagcacccaaagttcaccctgttcctatttttagcacttccgtcaattctcgatcgtttttcgtccgtctccagccacacacacgatatgacgtttctacccctcacaaatacaagtagaatgcatgtcaatgagaggtagaaacgtcatatcgtgtgcgtaactgggtcaataacgatcaagacggtcggaaaaattgacggaagtgctaaaaatgagaacagggtaaactttaggtgctattaaagtaaaccggtatctttcggtgctataaaacaaaaaacgtgaactttcgatgctatataaccaattttgccttaaatttactccctttgccccaaataataaatctagtataaaagatgttccacattctattacttaacatgtttatggatgctactacaatatcgtgggcgctctatagtcgtaaccgtgacaactaccaaaaaggtacaccgtatctctccagcacgtgccattcaaaaacagcaccgcacgaaactttcgtgtgcgcccatttcctgctcggccaacccacgctgcccatgcaagagccgaagagtgacttaattagcttctcttcccacccatgtgcagccatacaattacacacataattaaggccaccgagaagaaaatattagaggtttgcgtgaccattcaccatcaataaaaagtaatataaaattgaaggttcatcgagcaactttgcaggtaaccatcccacatttccacatgaatatatgtaaaaaaaacacaaacatgcttttaagccgaaaaacatcttgacacttcgatcatttcagttcataaactatatatatatctatcttccgccgatacttccatgtatttattttttaatcctacataaaaggagaatggcagaaaggaccaatatacatatagttatatctgtattatgtatatgttactactaaataggttatattacatccataatcatattgccaaaatttgtgtccggcttgccattaattagttccaaaatttgtataaacaactttaaacatcgttaaatcagaaaataaatagtactgaagttacttttattaggaatacctaagttacttctatcttagaccatgcatgtaaaaacaaagttgcttgtatctaaaaccaaattaagtttcttctatctgtaccgaagttacttatatctggaaacaaagttcttctatataaaatcaaaattatttatatctgaaaacatagttatttctatctaaacaccaaagttacttttatgctaaacaaaagtttcatctatttaaaactaaagttacttctatgtaaaaccaaattaagttacttttatattaaaacaaagttaattctatttagaaacaaagttacatctatttttgaaaccaaaattacttctatttagaactgaagttacttctatctaaaaccaaagttacttttatctaaaataagtgttctttttctttgaaaataaaacatatcaggttttaggtatagacacatgtgattatagagttacatctatctaaaccaaagttacttttatctaaaagttacttctatttaaaactaaaactacttttatctgaaaagaaaagtatctggtcggatatatttatgtaattcgtaaaatatcaaaatgattaagaagacctaaacatatcattttaaatgatatcaacctaaacaaatcccacatatcatattataccctagggcggtttgacaaccatgcccacaccgccgaacgcatcaaattttcgccccaaaaatgggtggtgcactgatgtattccctttgctcactaaatggactcaccaagtgaaatttatgtgtgtaaacacacttaacaaactaaggtactaacaaaaaaaaactcaaatgagaatgtcaatgccttcgccttcgtatatctatccattttcagatattagaaattagaaatcagaaatcaagcataaaaactgcacgtgcattatcaaacttcaacatatcagctgcatatgtcaccaaggccaaatttttaaaaaagagagagagagagagagagagaggcaaaaatcctctaatcagcagtgaagccagtaagacgaaagagaaattgacagagaaatccaacagctagccggaggagctcctctaggtagtcggctcctgtgtcctcaagctcaccacccaacttgttatattgatccgtagtttgctcccaacaatttcatacaaattaacccgtcgcgatagcatctgcagtttgctcccagaatattgcatacaaacatacgtatcacaaaagctgtgttgcatacattcagaatactgaatatgtacaggcgctcgcccccgtcttccacgggcttcttccagcgcctgccgcaaccaacgatgacgccatttcctccactgttttcctcgccgccgttgacaggcacaccggcctgcgcccgctcccccgtcgcttgttcggaatagtatatatgggccagaaagtcagacggagaggggcaggcccagctgtcagtcagacaagcgcaggcccagctgatccgctgtgtgttggactccagtaggacctagggctacgcggctagctgtagccttgtagctatctatctcatcggggggtgcgtgcaacgccgccaccgacacagacaccgcgtgttccggacgccgcccttggagaggagatgcagcccgcagatccgccgattccgccgccgcggccgccgccgccgatgccctccaggaagaggggaagggggcccacgaagggcgacgacccggccccggatgaagcagcacctccacgcaagccgtcgccgcctctgggctcggggagcagaagggctcgcaaccatgttcctccaccgctcggagttggaggagacggccgcgaggagggcgtcgacttcgtcagccacctccctgacgccgttcttggcatcatcatctcgctcctcccgagcaaggacggcggtaagaccagaaccctctccaaacggtggcgccctgtctacgcaccacgccgctcaacctcgacgccagcgatctcgcccccggcgccaacggggcggcgctggccgtcctcctcacccagtactcctcgctcatgcggggcccgtacgccgcttctgcatccccgcgcagcagatccacgagcgccccgccatggtcgaaggctggctgacatcgccaaggttcaacaacctcgaggagctcgagttcacagaagacctctgctatatgagacaactccttccgctgccgccatccattttccgcttctccaacaccctccgcgtcgctgccttcagccaatgccgcgtccctgattgcaccgacctgatgctccagttcccccatctcaagctgctctcattacggcaggtgaaaatctccgaaacttccctccatagcatcatcgccggctgccctgccctcgaaggtttgctgctcagaaatagctacggattccgatgcctccggatcaactcccctaccactagaggcgtcgccttccattctccctactgttggagtcatggcgatggagaggtgtgttaccacttggaagatgttatcgtcgaatttgctccatgtcttgaaaagttgctccatatagaacaatcggtgggattgggagtccgcgtatccgttgttgtggcacccaaattggagacattggacgtccttgacgatgttaaagacggctattccgtactcgattttggcacggtagttttcaaggtatgtgacttcctattatccctataccccctcgcaatctatagggattaattacaagttgcatttgcattaatttctatgtgcatatattgttaatgagatgtggtgttaagagtttacccatgtacgtccagttcggagtccgggttttaatctattctctaaaaaaatatgtcgtcttggagttctctttagatgatattagtttgattcagataacattatttgaacatatcctcattctttcttgaagttactgttctagagactatggcgtacacacttcattattgtctgagttactggatagcaagctctcgcaacactatgatttgtttggttgtgtgcatcctcagtagatgtagcagccagatgtaatttcattgcttgattatatatccattatctactacttccgtcccaaaatacatgtagacgtcacctagtactataaatctgcacagaacctatctagatttgaagtataagtggtgtctaatcgcagaattaggtacctatagttttagactgcgggatagaaaatatggtcgacaaatatatattattcacaaatggcctaatgttatgttccgtgcttaatatagggattcgaggtcgttaacttcacaacgccggtgtcgagtgtcaaggttttatctctcgtcatgaaaaatctcagcttggacagggttatcatgttaatgatttgctttccatgcttggagaaattgtacatcaaaggaaaaattcttttattttcaagtattgtgttacaatacttcttttgtcagtttaaataattagaaggtatttaatttgaagaacttaaattattccccatttcttatttcaggggttcaagtgtggggaaactaattattgacgccgcaagtatctgaaaactatcaaaagccataacatatctctaaagactgttgtgctggatgattatcgtggcacgaaccggcaaagttcagttcgccacattcttcatacggaacgcgagaaatcttgagaacatgatatttacgggtggacctaacaaatacaacgcatattttattgcacaacagcctaagctgctagagtttgagaaaagggcttcaaaaactgctcactttcattttagaccgaagcgatgttataatgattgggtgcatatcaaggatgtccatgatttgtctcttgccgatccttttgaatgtacctgttgagactgatgggtggaattattgtaccttttgaaggttcgagctaggcaagagtactttgtggaggtgctcgtttcgaatttaagagtactgatggatgttgtcactgagctgaagagctatattgatcatgttgaagatttatcttaatatatgtacctttggatgttgttgaagaaaaggattgatctggtgtattgggctgttgtttctcagataccattgtatgtgtttttttttccaatttctgctgtaataatactggttaataaaattgttgttgatgccatttagctgtcatattttttgattattttttgttctatcctcaatctttttttatacattatattgggcatccttttttttatatggaagtctgaagtgtgactataacctagcgaaattagggttgttattgttgctgtaattaagggagaagctaaaacaggtcactatcaaataatagactttcttcaaggagcagctaaaaaatgccattcaaaagtggagtgctttggggtttattaccatactagtacagtgcccgtgcgttgtgtaaaatcaaaggtgcttttgattattattctgtgatgaacaattgggcattggagattattggttttgttatttggaatttattcccgaagtggttttgaagatgattggattcacaggtgatcgcaggattcattatttcatgtgaccggtcagaccgggctctggtagccggtcagaccggcgtgtaatgcgcggtcagaccgacgcagcccgcgatctgaccggccgacactgtatcggttttggtttcgggttgtttgtttggatatctgagtttatttcatgattatggcttctagatggatactatacgtatgtaatactgttgtttgctactaatgagtcaagttggagatagtttggtctcggaatatggtttctttgtttatttcatgtgtaggtgactcgatgtctcgggagagtatttgcggtgatggaccgggagtcggcttggggataagacgacgtccatggtggtcagagatcatgcgggatactaaggctagagttgatgcacgtggttgatatagatttcatatggcatacgatggaggtattgtgtgcatatgggatgcggagtccaatttggaaggagtccaaatttggtatgattggttatgtaaagtttctttcttgtactagtgggtttcctaaggtgtttaggactcctagtatgagtttggttcgtggctttaggctgcctacctcatgtataaatagagggggagcgtgaggcttccctatatcgctttggagagcaattgagttgagttttgagttagggttccgagtttagtcgaaatttttgtaaggagtgctgttggtgcactttgtaaacacagagagaatcaataaagtcgtcatccactttaagagttcttcgatttgtgtttactgggttttggcggtctaaccggcaatctatcggtggtcagaccggcggcacagggcggtcagaccgacggcatacgggcggtcagaccggcggcggcgacaggcgcggcaggcaacttcggtggtcagaccggagattcaacatcggttagaccggcggcatccactcggtcagaccggtagattaatctcggtcagaccgacttccgtcgatttcgagggtaacttttatttccgctaaaagttttcggtttttggtataccaaccattcaccccccacctctggttggcttagttgttgtgattcgatcctacaagtggtatcagagccttgttttcttgtatggatttttatcgatctagagtttttgccatggctactcccgctaggttttcaactaaggctcatgttttcgatggaacggatttttcttatttggtgtagtaggatgcaatcttatattatggctgaagattatgatatttggagaaaagtttctcatccttatgtgattcctgaagctattaatactgctgctgaaaaactgcttttgaacaaaattgcaaagctcgcaatattcttttgagtggtatttctcgttcggattatgatcgtgttgctcatcttcaaactgctcatgagatttggactgctttgagtaattttcatcaaggaacaaataatattaaagaacttcatcgtgatcttttcaaaaaggagtatattaaatttgagatgaaacctggagaagctttggatgactatcttcctcggtttaataaaaattttgagtgatcttagatctgttgattcttcttatgatgctaattatccacaatctgagatttctcgccactttttgaatggtcttgacatgtctatttgggagatgaaagttacatctattcaggagtccattaacatgtctactttgaccttggttatacaaaattgaaaacgcatgagatgaacgttctttctcgtaaagttgattctaagtcaagtgctttggtttcttcttcttcttctttgcatgttgatgcttctccatctaagtcttcttttcttgctatttttaatgccacatccgatgaacaagtcgaatagatcgaggaggaggatttggctttggttgctaacagaattgctcgagctatgaataattccaggaataggaaaagaggtggtccaaaaagttgctttgaatgtggttcaattgatcatcttcgttcacattgtcctaagcttgggagaggcaaaagagaagacaaagatggtgagaagaccaacaacaacaagcccaacaacaacaagtcgaagggttcatcccaagggaggaagctggacaatctcaggaaggcttttcaacaagtttgcgccgccttcgagccactaagtgatgtagatggtgaaagttgagatgatgataagggaaagaacgtctccgatgtttgcttcatggcgcgtggtgaatctgacacagagtatgaagataatgaggtgagtgcttttgaggaagctattaatattttgagtgcaaaaaataagaagtgtgagaagatgtatagaaaacaggaatttatcattgaatctcttaaatctgaatctgataggttaaaacctcttattcctaatgatgatgattgctcaaattatgaggttttaatgagtgagatttcaaaaattagacatgttaatgctgtacatgatttgaaaaatagatcttctcttgtttgtagttttgctttgcacacacgcactttggatgagttgtttttaactaaaaagttgttgcaaaaatatcaaattgcttttcatgctaacttgatgtttaatatgatttctgctaaaaagtcaaaacaatctcatgatgttttggattgctcaacatgtaatttgaataagttgaaattgaaagatgctttaggtcgtgttgagttcatggaagatgttgtgaaaaacaatgaagtgctttcttgccctaaatgtcgtaaaagcaaaggtgtcatggtagattgtgaaaattgtgctaatttggaaaaagaggtttcttatttgaaaattctttgctaagattttctgatggtaaaaagaacctcaacatgatcttggatcaatcaaaggttagcacacataaccgtggtttaggttttaatccttatgctcataattctagacatcatcctgttgtgttaggtgttggtgctagaagtggtgagattttggttaaacctgatactaacaaaactgtgtttaaatctgctggtttcatgtctaccttgaatgcatcttcttcaaaatccaatgttgtgcatgcaaaatctcctgttattgcttgtgttgctaaatcttctaatgctaccaatgtgtctaatcatcgtgaaaaatatacttgttctttttgtggcaaagatggacatattattggtttttgtttcaggttagctcataaacagaaaaatgagagagagattgcttttgcaaaatcaaagtggcaaaaatcgggttttccctcgaggaaaccggtcagaccgcagtgggtcccacggtcagaccgatgactagtcagaccggctactgagcgtcggtcagaccgggcaccggtcagaccggtggtacagaggcggtcagactggccactgtaccttggtcagaccggcctcggaggaatttttctgaaaattctaaaattgattttgcacgtggatatatgcctattggatctgctggtcgtgtgtctcagtactggattcctaaatttttattatcatctaaccccagtactgaggcttcgacttctgcttgtgtgtaggctttgatagcaaggaaggacaacgtgtggatcatggattccggttgttcgcgacacatgaccggtgacatctccaacctctccaagtaccagaat

SEQ ID NO: 17223 - DNA, 865 bp, Oryza sativa
  unsure (1)..(865): unsure at all n locations
agcgaggtagacatgctagctcggnaccgaacaannggntaatgatttttatcaaaatcattaagttaaggtagatacacatgttgtcatatgatcaaatggtctcgccaaaaatcaataatcagacaacaaaatgtgcgaactcgatattttacacgactctctttaccaattctgccccgaattacacttaaaacgactcaacagcttaacgttggcttgccacgccttacttgactgtaaaactctcactcttaccgaacttggccgtaacctgccaaccaaagcgagaacaaaacataacatcaaacgaatcgaccgattgttaggtaatcgtcacctccacaaagagcgactcgctgtataccgttggcatgctagctttatctgttcgggcaatacgatgcccattgtacttgttgactggtctgatatccgtgagcaaaaacggcttatggtattgcgagcttcagtcgcactacacggtcgttctgttactctttatgagaaagcgttcccgctttcagagcaatgttcaaagaaagctcatgaccaatttctagccgaccttgcgagcattctaccgagtaacaccacaccgctcattgtcagtgatgctggctttaaagtgccatggtataaatccgttgagaagctgggttggtactggttaagtcgagtaagaggaaaagtacaatatgcagacctaggagcggaaaactggaaacctatcagcaacttacatgatatgtcatctagtcactcaaagactttaggctataagaggctgactaaaagcaatccaatctcatgccaaattctattgtataaatctcgctctaaaggccgaaaaaatcagcgctcg

SEQ ID NO: 17224 - DNA, 603 bp, Oryza sativa
ccgcgttgatagtcgagctcggtacccctcatgaaggcaactaccctacccatgatttggagttagccgcggtggttcatgctctaaaaatctggcggcactatctcattgggaatcgctgtgaaatatatactgatcataagagtttgaaatacatcttcacccagtcggatctgaatcttcgccagaggagatggtagaactcatcaaggattatgatgtgggaattcactatcatcctggtaaggcaaacgtggatgatttggagttagcccgggtggttcatgctctaaaaatctggcggcactatctcattgggaatcgctgtgaaatatatactgatcataagagtttgaaatacatcttcacccagtcggatctgaatcttcggcagaggagatggttagaactcatcaaggattatgatgtgggaattcactatcatcctggtaaggccaacgtggtcgccgacgctctaagtcgaaaaagccattgcaacactcttaacggccgtggcattccacccgaacttaatcaacagatggaagcctgaatctaagcatagtgggtcgcggattcttggctgcgttggaagccaagccc

SEQ ID NO: 17225 - DNA, 6593 bp, Oryza sativa
cccaaaaaagggccctttttggcccaattggccccttggcccaggagttcgacctctagaggatccccttttataaaacctttttaactttgtttatttcttcttaattattatttgtgctctgaaaattccactaaaatttatttacgcattttaggcttttaggaagtatacaaaaatcctccaagccttatttgacttttaactttgcacattttaattgtgggaggctttcacatggattttaattattctaggcattatttcgaggatgtattttagagtcattttgggacgcgacaaacctaccccccttaaacggaatctcgaccccgagattcggaagaactgacgaagagatcgggatgggctgccttcagctcgtcttcacgctcccaagtagcttcttcctcggcgtggttgctccattggaccttgcaaaaacggattacccggttcctggtccttcgctccatggtgtccaggattttcactggcctctccacgtaggtcaagtcttcgcgaacttcaatttactctgagtcggccttctcggatggcactcgaagacatttcttgagttgcgacacatggaacacatcatgcacgttgcccaaggaggcgggcagctccaactggtaagcgacttctccgcgccgtgcaatgatacggaaaggacccacaaaccgaggtgcgagcttcccctttgtctgaaacctgtgtacacctcgcaaggacgtgacccgaagatacacaaagtcatccactgcgaattctaggtcacggcgtcggttgtctgcataactcttctgccgagactgggccacctttagattatcccgaatggttctgactttagcttcagcttctctcaggatatcggtcccgaacacttggctttccccaacttggtcccacaatagtggtgtccgacatttgcgcccatacaatgcttcataaggtgccattagtatgctggcttggtagctgttattgtaggagaactcggcataggggagactcttatcccaggtcttcccgaaatctaggacacatgcgcgaagcatatcttctaggatctgatttagacgctcggtctgtccatctgtctgcgggtgatacgtggtgctgaaatttaatcgggtacccagctcttcttggagcttcttccaaaagtgagaggtgaattggcttcccctatcagatacgattttcttgggaacgccatggagactcacgatcctagcgaagtagagctcggctagtttgttccctccataggtggtcttcacaggaataaatcgagctaccttggttaatcgatccacaactacccatatagaatcgtatccaccttgggtttttgaaagtccggtgatgaaatccatcccaatttcatcccatttccattctggtacttggagaggttggagaagtccggccggtcgttggtgctctgccttgacacgctggcacacatcacaaagggccacgaactctgcaatttcccgcttcatactaacccaccagtatttctccttcaagtctaagtacatcttcgtactgccagggtggatggaataaggactttcgtgagcttcctgaagtatcagctctttatgttctctgttatctggaacgcatacccgatttccgttccatagggttccgtgttcatcctctgtgaaaccagcggctttaccctgtttcatattcttgaggagtccacgcatgtccgggtcgttcttctgagcctcgcggatttgatcgagtaaggtgggcttggcttccaacgcagccaagaatccgcgacccactatgcttagattcagggcttccatctgttgattaagttcgggtggaatgccacggacgttaagagtgttgcaatggctttttcgacttagagcgtcggcgaccacgttggccttaccaggatgatagtgaattcccacatcataatccttgatgagttctaaccatctcctctgccgaagattcagatccgactgggtgaagatgtatttcaaactcttatgatcagtatatatttcacagcgattcccaatgagatagtgccgccagatttttagagcatgaaccaccgcggctaactccaaatcatgggtagggtagttgccttcatgaggccgtagctggcgtgaggcataggccaccacatgaccgtcctgcatgagcacgcaccccaatccttggcgcgaagcgtcacaatacaccgtgaagtccttgcgagtatccggcatgattaacactggcgaggaaaccagcttttctttgagagtttggaacgccttctcgcattgcgggctccacacaaatttctcttctttcttcaacaactgtgtcatgggtcgagcgattttggagaagttctcgatgaacctccggtagtatcctgccaaacctaagaaactgcgaatttgagtgactgtcttgggttgcttccaatcagtgacggcggtcactgtttcggggtccacagcaactcctttagcggatatcacgtgccctaagaacttgacttcggacaaccagaactcacacttgctaagtttggcatacaattgatgttcccgcaactttcccaacaccagacggagatggtgctgatggtcttcctctgattgtgagtataccagaatgtcatcaatgaaaaccacaacaaacttatccaagtattccatgaacactttgttcattaagttcatgaagaaggcaggagcattggttaaaccgaacgacatcaccgtgaattcatacagtccgtatcgcgtggtgaatgcggtcttcggaatatcttcttcacggatgcgcaactggtgatatccagaacgaagatcaatcttggagaataccgtggcacctttaagctgatcgaacagatcatcgatccggggaagagggtacttgtttttgatggtgacttcattgagagctctgtagtcaacgcacatcctcttcgtcttgtctttcttctccacaaaaatcacaggagcaccccagggggaagtactcggacgtatataccccttttctttcaactcttccaactgtttcttaacttcggccagttcatttgctgccatacggtagggtcgcttgtacagaggagtggttcctggagcaagatctatccggaactcaatctctcgcttgggcggcataccgggtagttcttccggaaacacgtctccgaactctctgacaatggggatttctgacagtcctatctgatgaagttctgaactactgacagaggttgggggtgcaaagaaaacaaccggttgttccggccctcggtacagagtgacagtgcgtcttgcacaatccactactccttggaattgagccaaccaattcatcccaaggatcacatccaagttcttggtgtctagaagaatcagatccgagggaaaaggaatcccctgaatttctatagggacggcaggactataatactttgctgtcataacccctccaggggtggtgatgagtagagggttcctaagcctttctacccccaactgatttctccccatgaatggcacagatataaacgagtgggaagctccagagtcgaacaaaatggtagcagggatggaatggatgaggaacgtaccaacgatgacgtctggagttgtcagcacgtcctcggccgtcacgtggttcacacgaccccaaatgacatccttaccaccgttgttggagcggggaggcgcttggccttgctggcgcctcggcttcgggcatttatccgcaaagtgcccgggctcgaagcagttgaagcacagacgctgcggaccttgaacgtccctgcggccttgtccagactgcgcggctggcgtaggaggacggggcgcacgggtcccttgctggctctgctgttgctgcggctgtgggacgcgcaccacgaattgaggtcgaggcgcggagcgaggttgctgctgctgcgaggaagatccccctggatagggattggtgtagcggatcctttggttagcaccctgttggttgcgaaaattcgccaagcgacgcttgtgcgactccagttccttgtgcttggcttccaagcggatgctcttgtccaccagacgttggaaatccggatagtccccggagactagacggacggacagctcaggatccattcctgccaagaacttctcctgcttttcctcatcttcccgtacatcctccggggcgtaccgggccaggttgttgaactcatgcaaatactccatcacggagcggttgccttgcttcaactctcgaaattcccttttcttaagggccatgactccggcgggcacatgggtcctccggaaggcggcggtgaagcgggcccaagtaataggctgcccctctggctgtgtagcctggaaatggtcccaccatagagatgcgggcccctgcagttggtgggcggcgaagacgactttctcctcatcgctgcactgcacggtgtctagcttttttgtcgcgaccgagaaaattgccttttcccgaacgctagtgtattaatccccgtcccaggaaaagccggggtacaccacacaaacatgatataaaagacacatctttattatatcgataatatttacattattacaaaggcgcttcaggcctggcaatcaaaaatgaacagcagcggactagcgggcctatggctccatcttcacaggcgctcaactggggtataagccaggactccacctaagacatcttctccaaagcttctcttactgaagaggggaaagattgagcaagaatgagtacaaccacagtactcagcaagccacaccggcggatgcatgattaatgcaagggggtacaaggggataataatattggggttaagttttgcagtaaacagcatttaaaagtcacttagttgcccaaagccattttataaggacgatcctagagctacacaatgttattaaacaaggccgtgaaccctcacgaacctgccttaacccaaggcctacgatgattcagaccgaactggcaacccgaccctgggtcccagctcgtcccaagccaacccaggccaaccattccacattttagttgttgagcaaattttaagaattaaaacactgacttgggtacattgctcagcttgcccataaccgagggcgcggctattcgaatagattatactctgatcagaggtgtacatctttacccacaagacacatctccctcacgtgtaaccacgtgccacataccaccacggtatacggacggaagacgtgacatagttcccaacccatcctagccataaacaagagtaccgacccaaccccacttacggccggaacccccgggacagccagccaggattgagccccctagcagcaggacaccagccctgtgccatgacatctcgactaccgggccgcagctcgtgtagccttcatttgccctggagaatgtccatcgacccccgatttcatccatctccaatccgtgtacttttgtttataaccagactgagccacaaactaagccttacccactagacatgtgaaagtacggtagtgctttgcaacagaggcccgaagactggtccttatatacccgaggtgctactatcaaaacccaaccatgcaccccgagcccagcctaaaaccattttggggattttgaatagagggggcggtgtgaatccaattctacaatactccaacaattccaaagtgtccaggtgatatgaatatcccaaagtctagagttgtaaaaccgcctaatgttacctaattaaaaagcgaagcatctacctaacatcatactagtggtaccatgagtagagtgtccactagttggggttttgtttaatctagggtgaataaggaaataataacaataacaataataaggtcataacaaaggtaaataggcatggctaaataaaacagtgataacgcgggaatttaaataaagcgataatgcaataatttaaatcaacataattttataaactgggattcaatatgttcaaagatgatgtgacttgccttgctcgctttcccaaatgtcggcttcaacctccacgaagagtggatcttccgaagctgcagcgtctacacgaccaacagaaaagaaaaggcttttactctaataaactccatataacaagcagaaacaaagcacaaaaatgggttcttgacttcttaaggaaaaattagagacttgaacggtccaattccgagttcaaatggccaagttatggccatttgaaggttatatgctctttaaatgaatatttgcgaatttcttcatttaaatattaatttaaaatggatttattgcgtcagccgaggggaggggcgcgcggaccgggtccacgggagtggggcccacgcggcagcctcacggtccatggtggaccgggtgcacccggctcacaccggccggcgccgtgggtcccacgcgtcagccgcacccgagggcgcgggcggctgacggccggcccccacatggcagccgcggggcgcgcccgaaggcggccacgccggcacagccgacgggaggcggcgcacccgcgccccgatggtcgccgccggtgt

SEQ ID NO: 17226 - DNA, 4093 bp, Oryza sativa
  unsure (1)..(4093): unsure at all n locations
cgacgaggacgacggtgctccggcggtcggcgggcgatacggaggagtggactagatgggcaaggacacggcgatgccgaagcaagcgatgccgaagcgggaggaggtccggggcgacggcggcggtgaaccggagctcggcggcgacggcggagagagaggacgacggcgcgggctcgaatccgacggagagagagtgcggcgagggtcggaaacggaggagggaggcacagggagcgtttaaatagcggtgggagtgagagagggcggccggaggagaaggaaaccggcgcggaagatccggccgccattgatggcgccggcgaggtttgcgggaggaaatctgaacgattccgagggagagagagagggaaaaacggggggaaagggagagggaatcacggggagtgatttccccctctttatggcgcgcggggacggcaggatgcggcggaatccgcggcggcggcggcgctagggcacgggcgagcggcgggcgcggcgcgaggtcggggatgacgggtgggccccacccgtcaacgagggtggcgggcgggcccgcccgtcagcggcgcgcgcgcggggaggagccgatgggccgcgggggagaggagagagagggagggagttgggccgagccggcccaagaagggaagggggggaaagaagacttttagggtttttctttttacaaaacctttttaactttgtttatttcttcttaattattatttgcgctttgaaaattccactaaaatttgagggctccttttagaccaaggagaatttaacaaaaattctccgggccacatttgaatttttcttgtacgtattttagtgtttgccaatttcttttcgaattttaattaattctattattccttttagcgaatgatttttaattcgggatgaatttatcaggacgtgacatttttccccacggcatgcaaccaatccaacgcatccacagggttattggagctagagaaggttggtggacggatgcggaggaactcggcgagtttagagtgttgtgggggtggtggtggagcattatgatgtggcggattttggatgtggtggaggaaaacagccatcatgttggcctgctgggcgaggatttgggtgagaatggcgttggtgtctggtggtggtggtggaggaggtggaggaggtgaaggtggnctnccatggttgttgtggttgctgccttcaggttggttgccatcactggtggcagcatttctcctggtcgtcaccatctgaaaaccccacacagaaccagcaaacagagagagctgacaattaaagctaaccatccacgactaccataactcttgaatttattactgctattaaattggttcattaaagttcaagttgcttaagcaaataaaataaagacaggctccgacacagttatgccacacaccggcataaccatgccccacaagaccccaacaagaagacaaacgagaaagaacacacgcgcaagcctactaactgctcgtctaccgctgcgacgggccaggacggaaggtgagcaacagcgcatcctccgtgctaccgacgccggaggcttccccctcctgaggaaccacgggcgcgggctcggcacgaggggtctccacgaagcaagtccacgccagggactgacgaacaagctcgggcctggaggtgctcttgcgggcggtgatcttctggctgcggcagacacggcagcgcttggggcgacagacctctccctgggcgatcttgagctgatgcagctgcgcctccactacgtctaggtccttcttcagctgcagattctcctgacgcagctccaagatcttcatgttgttctcgaccatcccagggcgcaccatctgatggaagtcgatacgagccgcgtcgtacgcctacaccatgcgcgccaggtgcatgatggtagcgtcatcctccgagctagcatcccggaaggtggcgtagtcgcgggctcctccgcgacgagggtggtagcggtagggcgagtgctgcagctcgtccgggtagcgctggtgaagagtgctgatggcgaggagagcggcgctctggcaagcggcggagaaagaatctccacctgcggtgactgccaacgaagtcctctcgggtgagccagtgaggatcactgcagtaacctcccaagcagcgtggggctctgcatcgtcaccctcctgctccgggagcggcctgccctggtagtccactccatgcggataccccaggacaacgcacatgccccgcagctccaagacgaaaccagtcaggtccagaccacgacggctgacgctgccggccatctacaaacaaaaacaaaaagaaaagccacatttaaaagtcagattttggcgataaatgaagcagcaggacagagagagactagagagttttcacaaatagcaaaggatttttatttttgataatattgctaaggcttgggatctacggctcgtcctagggtcaagggggctatgataccaacttgtcacgaccggaattaacccaacgggcgttcctttcgtgcgtgtattattccttgtcccaggaggcaaggtacaccaagagttgatacaattcagagtttaacaagcggaagcgtaaatagataatttattacatgggcgacgaaggcccagcacacacaaagacaaacgagaaacagcggaagactagggcgacgaccacaggcgcttgacggcaggcacgatctagacaccaaagccttcatcatccaggggctcctcttctgggttgggaaaaattgagcaagactgagtacaaccaccgtactcaaaaaagacacacccacaagtgcataataaatgcaagggagtacaagggagttataatataaagggttagggttgcagtaaacagcatttaaagatgcttagttgctcaaagctattttgtaaacacgattctagaactatgcaatattatttatcaaggccgtgaacccacatgaacctgccttaacccaaggcctacgatgattcagaccgaaccggcaacccgaccctgggtcccagctcgtcccaagccaacccaggccaaccattccacattttagttgttaagcaggttttaagaattaaaacactaacttgggtacattgctcggcttgcccataaccgagggcgcggctattcgaatagattatactctgatcagaggtgtacatctttacccacaagacacatcttcctcacgtgcaaccacgtgccacataccaccacggtatacagacggaagacgtgacatagtttccaacccatcctagccatagacaagagtaccgacccaatcccacctacgcccggaacccccgggacaggcaggcaggactgagcccctagcagcaggacaccggccctgtgccatgacatctcgactaccgggccgcagctcgtgtagccttcatttgccctggagatgtccatcgacccccgacttcgtccatctccatccgtgtacttttgtttataaccagactgagccacaaactaagccttacccactagacatgtggaagtacggtagtgctttgcaacagaggcccgaagaccggtccttatatggccgaggtgctactatcaaaaccatgcaccccgagcccagcctaaaaccattttggggattttgaatagagggggcggtgtgaatccaattctacaatactccaacaattccaaagtgtccaggtgatatgaatatcccaaagtctagagttgtaaaaccgcctaatgttacctaattaaaaagcgaagcatctacctaacatcatactagtggtaccatgagtagagtgtccactagttggggttttgtttaatctagggtgaataaggaaataataacaataacaataataaggtcataacaaaggtaaataggcatggctaaataaaacagtgataacgcgggaatttaaataaagcgataatgcaataatttaaatcaacataattttataaactgggattcaatatgttcaaagatgatgtgacttgccttgctcgctttcccaaacgtcggcttcaacctccacgaagagcggatcttccgaag

SEQ ID NO: 17227 - DNA, 18176 bp, Oryza sativa
cacaaaaatgggttcttgacttcttaaggaaaaattagagacttgaacggtccaattccgagttcaaatggccaagttatggccatttgaaggttatatgctctttaaatgaatatttgcgaatttcttcatttaaatattaatttaaaatggatttattgcgtcagccgaggggaggggcgcgcggaccgggtccacgggagtggggcccacgcggcagcctcacggtccatggtggaccgggtgcacccggctcacaccggccggcgccgtgggtcccacgcgtcagccgcacccgagggcgcgggcggctgacggccgggccccacatggcagccgcggggcgcgcccgaaggcggccacgccggcacagccgacgggaggcggcgcacccgcgccccgatggtcgccgccggtgaccaccggcgcggtagagcggcgcccgagagaggggagggaagggggaaacgaatcggcggtccacagctcaccccgggtcgacggcgacgacgggaacggcgaccggagcggagaaagccggcggcgcggctcgggtagacggggacggcggcgttccggctgtcggcgggcgaaacggaggggtggacgaggtcggcgaggttgcggtgaaaccgaaggaggcggcgccgaagcggaagaaggtccggggcgacgacggcggcagaccggagctcggcggtgacggcggagagagagagcgacggcgcgagctcgattccggcggagagagggagcggcgagtggcggaaacggtggagggaggcacggggagtgtttatatagggttgggagtgagagagggcggccggatgagggggaaacgggcgcggaagatccggccgccattgatgcgccgacgaggtttagggggaaagattccgaacgaatccgagggagagagggagggaaaaatggggggaaagagggagggaatcacggggaatatttcccccctcttgattgcacgtggggcggacgggagcggcgggatttgcggcggcggcggcgctagggcacgggcgaggcggcgggagcggcgggaggaaggggatgatgggtgggccccacccgtcagcgagggtggcgggcgggcccgcccgtcagcggcgcgcgcgcggggaggaggccgaatgggccgcggggagaggagagagagggaaggagatgggccgagccggcccaagagggggagggggggaaaaagactttttagagcttttctttttataaaaccattttaactttgtttatttcttaataattattatttgtgctctgaaaattccactaaaatttatttacgcattttaggcttttaggaaatatacaaaaatcctccaagccttatttgacttttaactttgcacattttaattgtgggaggctttcacaaggattttaattattctaggcattatttcgaggatgtattttagagtcgttttgggacgcgacacgcgccctcggttatgggcaagccgagcaatgtacccaagttagtgttttaattcttaaaacctgcttaacaactaaaatgtggaatggttggcctgggttggcttgggacgagctgggacccagggtcgggttgccggttcggtctgaatcatcgtaggccttgggttaaggcaggttcgtgtgggttcacggcgttgataaataatattgcatagttctagaatcgtgtttacaaaataactttgagcaactaagcatctttaaatgctgtttactgcaaccctaaccctttatattataacccccttgtactcccttgcatttattatgcacttgtgggtgtgtcttgttgagtacggtggttgtactcagtcttgctcaatttttcccaacccagaagaggagcccctggatgatgaaggctttggtgtctagctcgtgcctgccgtcaagcgcctgtggtcgtcgccctagtcttccgctgtttctcgtttgtctttgtgtgtgctgggccaccgtcgcccatgtaataaattatctatttacgcttccgcttgttaaactctgaattgtatcaactcttggtgtaccttgcctcctgggacaaggaataatacacgcacgaaaggaacgcccgttgggttaattccggtcgtgacacggggtgcgggtgcttgcagagttggctggaaccgaggcagcgatcatggtcttcgtctggttcaagatgttgacaacatgatcggcttggttgagtgcgtcttccttgaggagggtgtcgaggagagtgattgctacaaccgcgttctgctgggggggtgcgaaagaccgctgtcccatcgatgtcttgttgcccaatgagctctctcactcgccgcccagattgcaaggcgcgttgtcgtcgatcttcagcctcctttgcaatctgttcacgatcttgttactcatgctgtagtcgttctcgctcctgtcactgtcgctcttcctccagtcggcgacgttcagcttcttgtcgtgcgcgatcttggtccgcttctcgggattggcgcttttcctccgtttcgttgtcagccatgaatacgccgaagaagaggagcgtgtagttatcctcatagctgtcgtcgaagttgtcgaggtcgccgtggtcgtagtggtagccgaagtcgtcatagtcgaggatctcggttggtcgagaactaacgccaggagagctaaggtagccatccaactcttccgtcgagactgtcccaagaggttggagtataacgccaacctccctggatctagatcggatcggggccgaagccggagctcgcctagatcttcgagtgggagatgtcttgactgtgaagacagcggccaaatcattaggaagtttcatcaggattgagggataggacccgtcgtcttgatctggtcgcggaaatgtagattggatctcgtccgagtggtttgaagccgactcgggagagatgatcttggagtaggcctcggccgagttcggaataccgaacggcacagggacctggtctctccccgactggtttgaatccgagtcaaggagagagatcttgcgcgaagtcgttggtgatgaagttgaggctgccgaaccggaacgcctgcccgggagggaaggcgaagtcgtcgatgccagaaacggaacccatcgcacttagtcggcaaaaacttgacgctacccctacctggcgcgccaactgtcgaagcaagatttcgacaataataaaagggggtggctatcaagctaggaaagtggatgggtttggagacaagggattttatacaggttcaggccttcttattcaagaagtaataccctactcctgtccggggataattcctccgagtgtgttattgattgtataaactggaaaaaagaatcgtgccccgagaggcacatggaccttccttatataggggaaggagtccgctttacaaagtaccgtccatatcctaacggaatatggtatcatagataaaatacaatcataaccgactaggatcccgggtattttcttgacatacaagtttagaatctaacccgagtcctcatagagatattctatctatatttggtaccatatatccgactaaattataactgtcatgtagatatggggtatccataatctccacagctaggcatccacggcgtcgggccagtgaaggagctggtaagtggagatgcacaggcggcggtaggggcccgggtgggcggagagtgtcgcgtcccaaaacgactctaaaatacatcctcgaaattatgcctagaataattaaaatccgtgtgaaagcctccaacaattaaaatgtgcaaagttaaaagtcaaataaggcttggaggatttttgtatatttcctaaaagcctaaaatgcgtaaataaattttagtggaattttcagagcacaaataataattaagaagaaataaacaaagttaaaaaggttttataaaaagaaaaaccctaaaaagtccttttcccccctccccctcttgggccggctcggcccatttctctccctctctctcctctcccccgcagcccattcggcctcctccccgcgcgcgtgccgctgacgggcgggcccgcccgcctccctcgctgacgggtggggcccacccgtcatccccttcctcccgccgctcccgccgccccgcccgcgccctagcgccgccgccgccgtgaatcccgccgcccccgtccgccccgcgtgcaatcaagaggggggaaatattccccgggattccctccctctttccccccatttttccctctctctctccctcggattcgtttggaaactttccccctaaccttgccggcgccatcaatggcggccgggactcccgcgcctgtttgcccctcctccgggcaccccctccctatcttaaccctatataaaccctccgcgtgcctcccttcaacggtttcgccactcatcgctctttctccccgccggaatcgagctcgcgccatcgctctctctctccgccggggccgccgagctccggtccgccgccgttgtcgccccgtaccacctctcccctcggggtcgcctccttcggcttcgccggatcctcgccgacctcgtccacccctccgtttcgcacgccgaccgccggagcaccgtcgaccccgtccacccgagccgcgccgccggctttctccgctccggtcgtcgttcccgtcgtcgccgtcgacctggggtgagccgtggaccgccgattcgtttcccccttccctcccctttctcggccgccgctccgccgtacatatggccgccgccggcgaccataggggcgcgggcgcgccgcctcccgccgctgcgccggcgtggccgccttcgggcgcgccccgcggctgccgtgtggggcccggctgtcagccgcccacgcccttaggtgcggctgacgcgtgggacccacggcgccggccggtgagagcccgggtgcgcccggtccaccgtgggccgtgaggctgcagcgtgggccccaccccccgtggacccggtccgcgcgcccctcccctcggctgacgcaataaatctattttaaattaaaatttaaatgaagaaattcgcaaatattcatttaaagagcatataaacttcaaatggccataacttggccatttgaactcggaattggaccgttcaagtctctaatttttccttaagaagtcaagaacccatttttgtgctttgtttctacttgttatatggagtttattagagtaaaagccttttcttttccgttggtcgtgtagacgctgcagcttcggaagatccgctcttcgtggaagttgaagccggcgtttgggaaagcgagcaaggcaagtcacatcatccttgagcatattgaatcccagtttataaaattattttaatttaaattaatgcattaccgctttatttaaattcccgcgttagcactgttttatttagccatgcctatttacctttgttaagacattattattgctattgttattattaccttgttcacccttggataaacaaaaccccaactagtgggtactctattcatggttccactagtatgaatttaggtagatgcttcgctgattaattaggcaacattaggtggttttataactttagactttgggaattctcatatcatttggacactatggaatggttggcttatgttggaattggacacacacctccccctctattcaaaacccccaaaatggttttaggctgggctcgaggtgcgtggttgggttttgttagtcgtacctcgggtactataaggattaagctcgggcctctgttgcaaagcactaccgtacttccacatgtctagtgggtaaggcttagtttgtggctcagtctggttataaacaaaagtacacggatggagatggacgaagtcgggggtcgatggacatctccagggcaaatgaaggctacacgagctgcggcccggtagtcgagatgtcatggcacagggctggtgtcctgctgctagggggctcaatcctgcctgcctgtcccgggggttccggccgtaggtggggttgggtcggtactcttgtttatggctaggatgggttgggaactatgtcacgtcttccgtccgtataccgtggtggtatgtggcacgtggttacacgtgaggaagatgtgtcttgtgggtaaagatgtacacctctgatcagagtataatctattcgaatagccgcgccctcggttatgggcaagccgagcaatgtacccaagttagtgttttaattcttaaaacctgcttaacaactaaaatgtggaatggttggcctgggttgtcttgggacgagctgggacccagggtcgggttgccagttcggtctgaatcatcgtaggccttgggttaaggcaggttcgtgtgggttcacggccttgataaataatattgcatagttctagaatcgtgtttacaaaatagctttgagcaactaagtatctttaaatgctgtttactgcaaccctaaccctttatattataactcccttgtactcccttacatttattatgcacttgtgggtgtgtcttgttgagtacggtggttgtactcagtcttgctcaattttttcccaaacccagaagaggagtatctggaagatgaaggttttggtgtctagctcgtgcctgccgtcaagcgcctgtggtcgtcgccctagtcttccgctgtttctcgtttgtctttgtgtgtgttgggccttcgctgcccatgtaataaattaactatttacgcttccgcttgttgaactctgaattgtatcaacttttggtgtaccttgcctcctgggacaaggaataatgcacgcacgtaaggaacgcccgttgggttatttccggtcgtgacaaagaggatgcgggagacggcgcgggtgagggcgtccttcctcgcgcggagaggacggtagttgaggttgagcggcgtggagcaccagaggtggtgccaccgggaggcgaggacctgcgtgctgccagcttccttggtggggaggcgggcgatgatctcgccgaggatggcgtctgggaggttgctgatgatgtcgacgccttcttcttcctccgcgtccccaatctcgggtgcctttgacctccgcttcttcggactgtgacccgcgttcccgacgtggtccatggctggcgcaggcgggactctatgagcgatgcgagaggacggcggcggccggcgtgcggcggcgtccgatgcggagttagtgcacgggagaggcaaaatgcggcgcgggggattaggggtttcggggaggggaatcggtggccgatgtcttctttcttttttctgtgtgtaacccaagtaaggccattattgggccagcgaatcgacccagcaaccagcatgattcttctttttcttcttcttcttttttttttgttttgacttttcacccgttgctggcaagtgtgtactggaactggaagagaaaattcacagaaaacttcatgactcattcacaatcaagtgtttaagtggcactaaaataatggataaaaattgaagtgtttttgccttacaagagaaattaggttaaataactaaaatcggcgtgcttgtgggcatgcctaacttatagcccgtgtacattatttggatctttcgagcatagtaattttcaagtatttactttaattatttcataacttgtacaataaaattttacatctagaagtagcattttaattaataattttaatcttactttgccagtagtggactattcgtgtatattttttttcttactttgcaaaattggtgaagatgatattaagtacactttttctttctaaatactgtgactttcataaaggcagaaaattttgcatttacacctctaaaaatatataattatgtcttatttttcttcctaccctggactggacatgacctttttataataggtttaaaattttatgcttggtaaaggttcctcaaatcaaagtatacatttttcttcctaccctggaatggacatgacctttaataggtttaaaattttatgcttgttaaaggttcctcaaatcaaagtacatttgactgggcatgacctttaatatacaggtttcaatttttatgcttgttaaaggttcctcaaatcaaaatacgatgtcaaagtgggacatcgtacaatacttgccttgacgtcaatttcattttcaattctcgagcggaaaactatatatgatattaaaacaggaaaatcgtggttaataaaacatattttccgtttctatacactactagaaaatcaatttttcatgacgtttacctattttttctctggcggctataagcgaaaactgccagcgaaaatttaatgaggatgaggtactaataacgctggcggccggattatgaggaccacttgcaaaaatagatgtctttttacaagcgggcctttaagtgaccgccaccgactgcaaaaagtttttcgctatattaaaacaccaagtgtgcgcagactcttattatccactcactccatcttatcctcttctcacatgcgctcgcgcctccctgctctcggctgccacagcaagaagacgacggtgacggcggacaaggcggcaacggcggacaaggcagcgacggcgacggcgaaagcgacgcgcacgaggtgcgcgcggggtggattagtccgtgggatgggcacgtccgggcctccccttgccctccagcgtcacgctgccaacctcctctccgactccaacttgtcccctgacctcctctacctcaccatcgccactccagctcgctccaccctccctcccccctcccattctgcctcccctgccgcaccgcgatgggaggcctagatctgggcggaggggagacgaccggcgggtggcggcgttcgtccacctctctcccctctccaccggcgagatcgatccgccgccaccgctatcggcgcggatccggcctcgtctttgttctcatcctcggcggtttgtccatggcgagtacgacaaagggcaaggaggatggtggcggtgaccgcgaggaggaggaggccgccgcgagccggtcgtcggtggggcccaagaccatgtgcggcatgcatcgggagcgcagatctggtgccggcgacacccttgatttgcaatgtgaatttgatatgtgaatttgtatttgtgacatgttcttgatttgatttgcaatgtggaatgggaatgcagggttgttgcatctggcaattttcaattttcagagaacagatgcattcacatgtttttatttttttttaataaaagatgagcttcactggcagtcgtcttaacaaatacgccagcaaaaatgcaccattgcgagcggcccgcataacacaaccgccggcaaaaatctgttttcactggcggtacgtgtaatagagccgcgagccgccagtgaaaatatattttttgctagcggttaagttccacttgtgaaaactttttttttctctggccttcgatttcaggtggctagcctaaccgtcagcaaagattgattttggccgccaggaaaaaccattttttaagtagtggtatgcatttgatttcagcatttattattttctatttcttacaaatatagatattagtaaactgtacttgcctcatattttaacctgcagtaatcgtatttttatggaaagatttataagcattctagataaaatggtatgcaaaccaaaattagaaattttattctcttctgtatattattgtttatttagttttctaccttttgtttctcttcctatcctgccaatcttatctcttctttcaccgcagtgaaaacgttagcagtacagtagtagagaggagtaaagacaggatacccaagagataatgatatatataggtcagctcgcacgagcgagcggcaggccgccagcagttgcgctctctctctctcttcctttcagctgtggcgagctagtgcacgctgcacgccgtcttggggaggttctatctactactgttgcgctctctctcttcctttctgcgtctcctcgcggtgatgaggccagtaatggcgcgacgggccaagaccacaccacaccgtatcaccgtctcgttcgccgacgacggcgactgcgaaccgatgagcacctcgggcaaggcgagcttgtccggtgagagggtggagataaacaaagtgaaattaagctcctacaatcctatctcgtcgatcactcggttcttatacgcttctccggtcctcgatacgtatcttcattattgcatatacttcagaatatagctataaagagcataagcaaatatgcaagtgcattagatagagccaacacgtactgtgtgattcagttccctgaatttactaaacatggaacacaagggatgaaaaaatggccaagaacatgatgctaattaattacacaaatttcactgaaataattgtacatgaaagaaaattgtggctacctgaatctctatgatgccaagttttagcatggagatgccaagccagcccatgatctccagctttgatgcaacaccactgaaatggcttaggcacggacaagatatagcaatcatttgcgacaaggggcatccagggtttgcactttcgttagccaccgaatatccactatttcgctgaccgaaattatttgaaatttaatatattttgactgaatttgaccagattcacaaatatttgaaaaaattcgaaaaattcgatggaggtttgtgcttgccagttggtccaaaatttcaaaccatgggggtatcctcgacaatgacttcctccaacgttgaccgccttccgtagccaaccagcacaccgatgctctaagccttggggagctgattcggacacaatggaagccatatatgtgttccagcagcaaggtctctaggagagggcaggcgatgatgatggcatgtagggcgacctcggagagggtgatgtacttggtcgccatcatgaatgcatgattttctacgcaagaatgtaacaggtcatggggatggcaattaagatccttaaacttccatgcatcctagtagctaagtaaagcttgaaagactaggttaacaaattgtagctttcggttccaagaaagagaactccaaaaaatcgacccaagttcttgtgaacttgcacactttgtttctctttctctgttttgctctatcctccttgttggaatacatcacagtgagtgagaaattgagtgtgtgatcaatgcctaaccaacaattggtataagagcaatgtcgatcataataggggacgctcgttgaggggggggggcacggggaatgagttcctctacacacaactgacaactggcaactacacctcctggttgatttcggtgcgggcgatgatagatgaccaaggaatttggaggcgttcgatacaacagtcgggatggctattcgatgcgaagaagaagacatctgctcaatcacctccctgattctttggtcctccattatagcctgtacttgaatcacccacctggtgtaatttccgccattagttgcgggtagagttactcactcttcatgttgcgtccatcatatcatcacgattgacatggctttgataccaatttttggctatgcacaagaaagcacacccaattcctcactcagtattacgtattccaacaaggagaacacatcaaaacagagaaaagcacacaaagtgcgcaaattaacaagaacgtggggaaattttttgcgttttttttcttttcttggaatcaaaagctaaacttgctatgactcacacttacaacctttagttactgctatttatagaactcatggaagtttaaggattgtgccatctcacggccttgtctagcatggttatgaggtgagttcgagtagagcttgttctcaggctagttcaaagcgggaagatggttgtgaaccacatgggggctgagcactgaggttatcgatggcagtaatcgacggccatattggaagaaatgggtcaaatgactactcggaggtgataattttggcccagcaatgttgggtgggtgggcctatgcaacaaaatatgttatggtgtggaatcttaaaactagagtgataattgagatagtttaagttatttttccgtggagaaaatacgagcgtgccatccatcaatgtgccgagtactaacactctttttccatattctagtcttgtctgggctgctaatgggtccattccaacatgcccttttgtgtttctttttctctcggcaccatttttttctacactactaaaataactctaaaaccgacacttatatgtactagttaatctaaagccagcacttatgaccctttcccaccccccgaaagtatataaaagtaaaaaaccggcacctttgaccccttataagtgtcggtttattaacatctttaataaaacaacacttataacatggttattggtgtcagtttttttaaagaaaccgacacctttggggagccgagttgatgaacctcaccgattttttctgggcgacttgagtctccactcattcactctctagcagccttatgcccccttccttacccccaacactcaactacacaccagctcacattcttatcctctctagctctccctccccccctctatctatctatctatctatctaacaacagcgaccggtggcggtggctccatgagacgacagcggtggtggcggcacgcctgtacccggaaacacgacggctccacgacgacgacgacaatgactccactaggacggatctctaggaccggcgacgcctcgacctccgcttctatcctctcccaggcagcggctgtggctatggcggtggtgacaacttggcttaaccgggatagatctctggtgctggagatgcctcggcctccgcttttggctcccgtacaatctcctccaccgcactgaagggagccaccacaaccccttcaccccggtggcttggccggtgctgcagggattcgccgtgctggtgacgaagccgaggaccctgactgctcactcttttccaactggtaccccttttgcttttttgcattgggatttctcaattttttgggaagggaaaatgtgcgggatttcatgttgtagggcctttgagtttgtgttggatccaaacatgaattgttgtgtgcaatgtagctaccttattgttgtggattcagatgtgataaatgtattttatttgttcttccatgagatgtaatgaatattcttgatctttctttcatggcttcttgacactggtagagaaagcgtttgtagtcccggttcgtaatccccctttagtcctggttttcaaaccggcactaccaatccgggactaaagatcgctatctttagtcccgggtgaaatacatgcactacttgtttcaatacatatatatgcacataatatatatatatatatattatatttatatatgtttcaatacatatacacgcataatatatatgtatttatacatatatatgttatgcaaatgcatatgtatatatatatatatatatatgaaagcacttaacattttatgtgcatatatatatatatatgaccaaaatatatatttacattaaagaaaatgtgtacatgcatatagaaaaatagacatgtattaattacaatccattatgatgtcctagctagctacgattttgacgtagtagtagtcgttatctcagaagcgctaaggacctatgaattgtatttccgttgtagtagaattcacccttgggatcaaggatttgttcgttgatgaatcccatgagttgttcttgaaccgccgcgataaattccttgtgtgtgatcaggttatccctcatgcgaataaactataatgaatgtatgaaattaattagtaactaaacaacaaatcaatacgtacgcaatgaaaatttgaatttatttgtacgtacatcgagctctcttgtggtgatgatttggtttgcaaggcagtggcaatactcacacacgtagtagccgcacaagttagttccctgcttttgctttgcgcactacaaataaatgacaaacggcgagagatctaattaatataaatgtagagcatgtgtactcacaggaaaattgaacttccgcctaagtctttctctccatttgccgcggaccaaatgacggaaccgataccaagccctacatggagtttaaagctatgattcgtagtagcaattaattataacaaaattcttaattaacataggaacttatgacagtacctgtctataagttcgaaaaccttgtcaaacgtagactcttttttatccattgagtcatatacgttgacggtgcaggcctccaggtcgaagagtaaaaggacccagtggaatctgcaatgtgcgtgggatacattacatatgaaacacttagaatgttcgtacgggaatgaaatttggtataggaagacagtaaaattaaactaactctgtgttatatggcaatagtatgaacgtcttgtaatgctgcgcctttaggagatggacgagattgtcctctgtggcttgcagatactggtcgagcattgcgacgtttactttccgagggtcgatgaatccaatatcgaaaaccccccgccgtcggaccctttgaatctccattctacaacgataaaaggaagtatatattatatatagtctgcttatatacaaggacctaattaactaaaggaaacgtaataagaaatctaactgaacgatacttacaaaatccagcaactcataatagaggcatcgagggcgtccagctggtatagttcgtagatacccttgaaattgatccagagaatgtcatctccttgcaagaagtccgtgtccctgatcctcgctccgatcatctctctaccggtggcactcatctccatgtacagttgatggaacttgtacatttgtgtgggtaaggactgcagctgctcaagcttgacaagcggtttaccgagttcgtacatgtatttcacttccgccttttcgattggtgcgcctcgtagcaattgatccgtagttagcccggtgtcagtaataaatttttctattccaaaatcttcaccagtcaccaacggctcgatctcctggtttggttgctctccaagctgagggactagtttggactttccagaagatgctttcttgagtgttcgctcatagtccgatagctttatggcctccttggcacgtgcagacatacccctgaagaagttcctgacactcgggtctataggaatcttcttttctggacttcgaggcttcaattgtctcctaacttccgatgccacataagcgtcaagctcctcttgcgtgcaatcgtaccccgggtccttgttcttggcggcgtcaactttcgccttcttcgttgcccttgtgggggcaggcgatggagcttggggggcccttgacttggaaggtgccagacgaggagcttgaggaggagtcggtgcaggagcctgaggaggagtcggtgcaggagcctgaggaggagacggtgctggagcatgaggaggagacggtgcaggagcctgaggaggagatggcggagctggaggagatggtgcatgagatgccgcttgtcgcccagggaggatgatataccgcttgcgccatagtataatggcgtggcttgtgtctcgtagatgcgtctcaccgtctcctccagggtaatccaactcgaggtcctcgtacgcaccttcgaccaactcaacttcgaccttggagtatcctgctggaatcggcctgcagtggtaagtacctgaagggtccattgggatggccatgcccgacgccaccttcacgtggtgagaggttatttattagtaatcaacatatctaagcagcaacttgcggaatggacaaatctaaaatctgtaaactacgagtttacctttattgataagttgttgaagggaatatgcagctcacatggtgtccgctgagtgatgtcatcaacggggcaagtggtttcgtcctgggtttgcatggcgtccatgctctgtgatcctacctgccccgttgaggcgcagctgctacgacttcctgaagggctcaccattgcaggaggaatggttggctggggatcatgggaccgatgtgtggccatgcgttcatcaaccttccttgccacctcctcttgcatgctgagctcgtagctcgataccctgtactcaagatctgcaatcttcgtctcggtatctctcttgctcctcatccgactcctgtacgtgtggatgtcctccttgaatccaatcttccaaggaatcacccctttccctcgtgttcgtcctggatgctctagagtctgcagggcgagtgacagctcgtccttctctctgtcgggtcggaacgtgccttgagaagaggcttccactgcatccgttagtcgacgcgcagcctcgcgtatctgatcgctgaagaccagggagccatcaactgggttaagcgtttcaccgtgagcgtagtaccagaacttcaatcgatccggccatttagcggtggccggttcgatacccctctcaagcaagcttgcctccatctcctcccacttcggcatcgcgacgctatagccgcctgaccccaagtggtgatggtacttcttcttggcagcattttctttgtttctttccatcatcgtctgcccttgttgacctgtcttatatgcaacgaactcgtcctagtgatcccttagctttgggaatgtgtcaaagttcggtgtctgccccttcaggatatatttctagtacagatctcccttgaagctttgaaactgttctgccattttgtctaaaagccaccttttcactttgtcctctgtacccgcaggaagggtgaatgtctcgagcattgtggaccacaccatttttttcttcgaatctgggacaaagctctcatgatctccgcgtgcccttgttcttcgccagtacaccgtactgacaggcacgttatcccgcacaacccaaccgctgtgacgtacatagttcttggcggctttggccggggcactaggacgtccaacttcttccactttcgttatgatgtgccgaccctcaagcttcttcgctccacctcgttggccgcgtgccctttttttgtccaacggagggtttgactaccactagcctcctcctcctggttcccctccacatccctttccacgtgcccctgctggttcacctccgcatccctctccacgttcccttcctcgttcaagtactggtttggatcctcgttcccctcttcttcattccagtactggctgcttccctccgcgattgtatcgtacaatatctgttcctcatcgcggtcagccatctgttgatacaagaaacatctgctaagtcacgagacatttatgttttaacaatctaagtcatgtatgctaagtgtaaatgtcgtacattagaaccctacacaaccttacgtgctaagtctaattacaaatcgtgatataagctaagtctaggtgacgtatattatacaaccctagctagtaaataattatatactaagtctaattacaaataaaataatcttatattaaaactcaaataatattacatgctaagactaaaatagtcatgtatatgctaagtgtttcgtgtgtatatgctaagtcacgagacatttatgttttaacaatctaagtcatgtatgctaagtgtaaatgtcgtacattagaaccctacacaaccttacgtgctaagtctaattacaaatcgtgatataagctaagtctaggtgacgtatattatacaaccctagctagtaaataattatatactaagtctaattacaaataaaataatcttatattaaaacttaaataatattacatactaagactaaaatagtcatgtatatgctaagtgtttcgtgcgtatatgctaagtctaattaagactacaatagtcaattgctacttgtcgcaccaatgccgtagtcaataattacataccaagtctaattacaaataaagtaatattatattaaaactcaaataatattacatgctaagactaaaatagtcatgtatgctaagtgtttcgtgtgtatatgctaagtctaattaagactacagtagtcaattgctaggagtcgcaccaattccgtagtcaataatgtcatactaagtctaatttgcaataaaatatt

SEQ ID NO: 17228 - DNA, 743 bp, Oryza sativa
cccctgttggttgcgaaatttcgccaagcgacgctttgtgcgactccagtactttgtgcttggtttccaagcggatgctcttgtcccccagacgttggaaatccggatagtccccggagactagcgggacggacagctcaggatccattcctgccaagaacttctcctgcttttcctcatcttcccgtacatcctccggggcgtaccgggccaggttgttgaactcatgcaaatactccatcacggagcggttgccttgcttcaactctcggaactcccttttcttaagggccatgactccggcgggcacatgggtcctccggaaggcggcggtgaagcgggcccaagtaataggttgcccctctagttgcgtagcctggaaatggtcccaccatagagatgcgggcccctgcagttggtgggcggcgaagatgactttctcctcatcgctgcactgcacggtgtctaactttttccccacggcatgcaaccaatccaacgcatccacggggttgttggagctaaagaaggtaggtggacggatgcgtaggaactcggcgagtttagagtgttgtgggggtggtggtctactgtgggagtcccggcgatggagaggtgggttatcacttagaaaatgttatcatcgaatttgctccatgtcttgaaaagttgctccatattgaacgctcgatgggacttggggttcgtgtatccgtgattatggcacccaaactggagacatt

SEQ ID NO: 17229 - DNA, 1605 bp, Oryza sativa
  unsure (1)..(1605): unsure at all n locations
ggaagctcaagagtcgacaaatgggtagcangnatgaaatgaatgaggacggtaccacgatgancgtctgaagttgtcagcacgtcttcgnccgtcacgtggttcacacgacncngaatgacatccttaccacgttgttgagcgggaaggcgcttgcccttgctggcgcctcgactttgggcatttgtccgcaaagtgcccgggctcgaagcagttgaagcacaaacgctgcggaccttgaacgtccctgcggccttgaccagactgcgcggctggcgtaggaggacggggcgcatgggtcccttgctggctctgctgttgctgcggctgtgggacgcgcaccacgaattgaggtcggggcgcggagcgaggttgctgctactgttgttgctgctgcgaggaggatccccctggatagggattggtgtagcggatcctttggttagctccctgttgattgcgaaaattcgccaagcgacgcttgtgcgactccagttccttgtgcttggcttccaagcggatgctcttgtccaccagacgttggaaatccggatagtccccggagactagacggacggacagctcaggatccattcctgccaagaacttctcctgcttttcctcatcttcccgtacatcctccggggcgtaccgggccaggttgttgaactcatgcaaatactccatcacggagcggttgccttgcttcaactctcggaactcccttttcttaagggccatgactccggcgggcacatgggtcctccggaaggcggcggtgaagcgggcccaagtaataggttgccccactggctgcgtagcctggaaatggtcccaccatagagatgcgggcccctgcagttggtgggcggcgaagatgactttctcctcatcgctgcactgcacggtgtctaactttttccccacggcatgcaaccaatccaacgcatccacggggttgttggagctagagaaggtaggtggacggatgcgtaggaactcggcgagtttagagtgttgtgggggtggtggtggagcattatgttgtggcggattttggatgtggtggaggaaagcagccatcatgttggcctgctgggcgaggatttgggtgagaatggcgttggtgtctggtggtggtggtggaggcggtggaggaggtggaggtgggctgccatggttgttgtggttgctgccttcaggttggttgccatcactggtggcagcatttctcctggtcgtcaccatctgaaaaccccacacagaaccaccaaacagagagagctgacaattaaagctaaccatccacgactaccataactcttgaatttattactgctattaaattggttcattaaagttcaagttgcttaagcaaataaaataaagacaggctccgacacagttatgccacacaccggcataaccatgccccacaagaccccaacaagaagacaaacgagaaagaacacacgcgcaagcctactaactgctcgtctaccgctgcgacgggccaggacggaaggtgagcaacagcgcatcctccgtgctactgacgccggaggcttccccctcctgaggaaccacgggcgcgggctcggcacg

SEQ ID NO: 17230 - DNA, 3127 bp, Oryza sativa
caccccagggacttacgaacaagctcggggctggaaggtactctttccggccggtgatctttttggctccggcaaacacgcaagcgctttgggcgacaaaccctctccctgggcgatcttgagctgatgcagttgcgcctccactacgtctaggtcgttcttcagctcaagattctcctgacgcagctccaagatcttcatgttgttctcgaccatcccagggcgcaccatctgatggaagtcgatacgagccgcgtcgtacgcctacaccatgcgcgccaggtgcatgatggtagcgtcatcctccgagctagcatcccggaaggtggcgtagtcgcgggctcctccgcggcgagggtggtagcggtagggcgagtgctgcaactcgtccaggtagcgctggtgaagagtgccgatggcgaggagagcggcgttctggcaagcggcggagaaagaatctccacccgcggtgactgccaacgaagtcctctcgggtgagccagtgaggatcactgcagtaacctcccaagcagcgtggggctctgcatcatcaccctcctgctccgggagcggcctgccctggtagtccactccatgcggataccccagggcaacgcacatgccccgcagctccaagacgaagctagtcaggtccagaccacgacggctgacgctgccggccatctacaaacaaaagcaaaaagaaaagcaacattttaaaggtcagattttgacgataaatgaagcagcaggacggagagagactagaggattttcacaaataagaaatgatttttattttgaaaatattgctaaggcttgggatctacagctcatcctagggtcaagggggctctgataccaacttgtcacgaccggaaataacccaacgggcgttccttacgtgcgtgcattattccttgtcccaggaggcaaggtacaccaaaagttgatacaattcagagttcaacaagcggaagcgtaaatagttaatttattacatgggcagcgaaggcccagcacatacaaagacaaacgagaaacagcggaagactagggcgacgaccacaggcgcttgacggcaggcacgagctagacaccaaaaccttcatcttccagagactcctcttctgggtttgggaaaaaattgagcaagactgagtacaaccaccgtactcaacaagacacacccgcaagtgcataataaatgtaagggagtacaagggagttataatataaagggttagggttgcagtaaacagcatttaaagatacttagttgctcaaagctattttgtaaacacgattctagaactatacaatattatttatcaaggccgtgaacccacacgaacctgccttaacccaaggcctacgatgattcagaccgaactggcaacccgaccctgggtcccagctcgtcccaagacaacccaggccaaccatttcacattttagttgttaagcaggttttaagaattaaaacactaacttgggtacattgctcggcttgcccataaccgagggcgcggctattcgaatagattatactctgatcagaggtgtacatctttacccacaagacacatcttcctcacgtgtaaccacgtgccacataccaccacggtatacggacggaagacgtgacatagttcccaacccatcctagccataaacaagagtaccgacccaaccccacctacgggcggaacccccgggacaggcaggcaggattgagccccctagcagcaggacaccagccctgtgccatgacatctcgactaccgggccgcagctcgtgtagcctttatttgccctggagaatgtccatcgacccccgacttcatccatctccaatccgtgtacttttgtttataaccagactgagccacaaactaagccttacccactagacatgtggaagtacggtagtgctttgcaacagaggcccgagcttaatccttatagtacccgaggtacgactagcaaaacccaaccacgcacctcgagcccagcctaaaaccattttgggggttttgaatagagggggaggtgtgtgtccaattccaacaaaagccaaccattccaaagtatccaagtgatatgaatattcccaaagtctaaagttataaaaccacctaatgttgcctaattaatcagcgaagcatctacctaaattcatactagtggaaccacgaatagagtacccactagttggggttttatttattctagggtgaacaaggtaataataacaatagcaataataacgtcttaacaaaggtaaataggcatggctaaataaaacagtgataacgcgggaatttaaataaagcggtaatgcattaatttaaatcaaaataattttataaactgggattcaatatgctcaaggatgatgtgacttgcccaaacgccggcttcaacttccacgaagagcggatcttccgaagctgcagcgtctacacgaccaacggaaaagaaaaggcttttactctactaaactccatataacaagcagaaacaaagcacaaaaatgggttcttgacttcttaaggaaaaattagagacttgaacggtccaattacgagttcaaatggccaagttatggccatttgaagtttatatgctctttaaatggatatttacgaatttcttcatttaaattttaatttaaaattggatttattgcgtcagtcgaggggagggggcgcgcggaccggggcccacgcggcagcctcacggtccacggtggaccgggcgcacgcggctgacgccggccggcgccgtgggtcccacgtgtcagccgcaccgagggctcgggcggctgacggccgggccccacctagcagccgcggggcgcgcccgaaggcggcctcgccggcacggccgacgggaggcggcgcgcccgcgccccgatggtcgccggcggcgacctccggcgcgacggagcggcggccgagagaggggagggaagggggaagtgaaacaacggtcctcggctcaccccgggtcgacggcgacgacggaaacggcgacccaagtccagagaggcggcggcgcggctcgggtcgacgaggacgacggtgctccggcggtcggcgggcgatacggaggagtggacgag

SEQ ID NO: 17231 - DNA, 12625 bp, Oryza sativa
  unsure (1)..(12625): unsure at all n locations
taggttgaactacccatatagaaatcatagatacgccactcagcaccacgtcagcgaaaacacctacaatattgtcttggagttgggactatatttggactggttttaaaatatcagatatatgttatattcagcattacaagtaatgaatgtaattcaaactcaatgttttgaacgtgttccttgaaaagaaccgcacgagttagctcgtctatggctgtgtttagatccaaagtttggatccaaacttcagtctttttccatcacatcaacctgtcatacacacacaacttttcagtcacatcatcttcaatttcaacccaaatctaaactttgcgctgatctaaacacagcctatgttgtgggctagcaaacaactatagctacctgcagcctagccgtgcccgtaaccggtcggccactggtccatttttatctgtctatcacgtgggctggcctgttttagataaatttgtgctgcaaatagtgttcaaacagttcacactagatttgtttttttcctcaatttgtacattaaatcttgagttgattttccgtgtgttactacatgtctgttacacatgtaggatatttctttgcattttcttgtacttttcggatacagttttaaggctgagttttttctttcactttcccaactcacatattttattttccgagcacacaatttttaaactactaaacaatgcattttttttcaaaaatttctatgcgaaagttatttttaaaaaatatattgatatctattttaaagtttttgctaatactttaattaatcgtgtgctaataaacaaccttgttttccgtctttcggaatgcagcctaagcgtaacacgatagcatagcactggtcggtagtaaacaatgtttacaaaaccacgtggttattacgtgcggtaaatcttcttagtttttaaaaccacggtatacctcgcgataaccgtacggttttcacggtaaccacgcggttaccgcgataaccgccaaacggtgggggtgacgataaccccacgcaaaacggtttgctaaggcctacgaccgatattctgacatgctgctgcctaccgtgccgcccccggagggcgccggggccgcggtcccgcgctcgctcgcggacgctcgcacgcgggcaacgtgcggccatcccgcggatcggaactcggatgcgtgtggttgattggcggatgtgctgtgctgtgctgtgctgtgcggctgtgccacaccgctgcacgccacgagtgagctgcatgtatgataaaatataaacacactagtacggtacgtgtggatgagagagaaccaaaacgtgcgtggaaacggagctgctccctccgtttcaggatataagtcattttagtacttcccacgttcatagtaatgttaatgaatttaaataaatctagacatatatatctatttagattcattaacataactatgaatatgagaaatgctagaatgacttacattgtgaaacggaggaagaagctctgttgggtggccaccgctaacaccgacgaggcaccaatattggcatccatgatcattgttgaccaaaatccaactcggcgatttgttggttgcttgccgtactctgctcgccatctcaatctcctcttcataaactagtacagtacacaagaaattaaaggggcaccaaaccggccggccggagcttagctgttctcatgtacagggagaatctaagccgacggctcgcacttctattccccttcttctgaacgcggcgtcttcgggcagtagctgattcggttttgcaatattgcaaactatgcaagatcgccggcaaatgtgttaaaaatattaattaaaaacactataagcatggagtgttcattcatatctcgtagtagtattctctcgacgattgctttgattggttgcttcccgtactctgctcgccatctctctctctccctcaagtataaaagaaaaggggcaccaaaccggccggccggagccgttcgcttgtacagtgtcaacgcctcgaatttcacaaaaccagacttctaggcatagtgtgtataattctctatgtaaggaccaatcaaagtacacaaagaaaaagttgacaaataaatccatgtcctacatctctatctctatctctatctctatctctgtctctactacttaaaaaataagaggtgttttcatcgtccgtcaaaaaaaccgggcgaaaaaaatctgtccgatccaaaacaaaacggacgaaaaaaccggacaaaaaaccgggcgaaaaaaagaaaagagaaaccaaatcgcgaaaaaaaggaaaagaaaaatgaatccgattccgcggtaaaaaaaagggcgaaaagaaataaaaagggaatatgtctgattcctaaaaaacgggcgcaaaaaaaaccaggtgaaaaaaagaccggaaaaaagcgataaaaacaaaagatcagaaaaaaaaaagtccgactcctctagtggaaaaaagagagagaaaaaacaaaaaacgaagagaaaaaaaaacttccattgcaaaaataaaggctctaaaaaaatccgactcctcggtggagaaaaataaaggcgagaaaaaacaaaaaaagagaaaaaaaaacttctactataaaaaagaaaaaaaacgtccttcgctcgctccgtcgttccgctcgcttgtcgccggagagaaatgggatcaagagagagggatttgggagctagggttttgccctctccccggtcggcgcttcatccggcgcggggacgattggagccgtccattagatcggacgactcagattcgcccagcgtcaggccgttgccgccgttgattacgctgcgcccaatgggccgtggaagtgcatcggaccgtccccgcatatgtcggccgcgctcagctgctcagcttgcgggccatcgaattgactcaactcgccggagatgggccagcccaagtttaggccggcttgggaagacctaggccgaaagcaaatttgatcaaacaatgtggctcacatttttcaaattaaagtccgttggataaactcttaagtaggctcgaaaaataaatctaaaactaaatcctaaatcctatgttaattgatcaaattagactcggttctacctatttattaatatatcaaattagacttgatttttacagatttgaggttttcaaggtgtcacactatcaaacggtgtttttgccgttgcaacgcacaggcactattgctagtaactataaagaggtatgcagaggcataaaccacagtctaatagtgaaaaggtaaaggctaaaacaagataacgaggtggcttcaatttcacgggaatcatgacggtagcgaggaagcctatgccacctagatgtcctactctgagaaaaagaaaaatattgcaaggttgagtatcactcaccatgcttagcaaagtcataccaatgatgcatcgtgcaaagggaacaaatgaaggtttgtgttagacatttacatttcaaaacagtaaaatggctcattattattcaagccaagattaatcaatacttaacaatgttacaccatgttgctcaacccaaagcaccatctaaactattaccatttccaacaagtcaagttatttaatactgatatcaatcgtggtgaaattcgatcagccatccataaccgtagatatggttgtttgaatatatttactttgatcaaaggggtaacaccgcggcaacatgataagagagattgtgacataatccttcgcataacccaccctaaaccattcacgtcatgctgtgatgcatccggcctaggtggcccaggtggccaaggcccaacaaattaaggttgcctggaccccaacatttagcacacccactcggggaaagaccgacctcaacagttcttagacatacccactcagggaaagacccaatccccctaaaagatccaataggggaagggtggcttcctcctcccaagctaacaagggcccagctctgatcccaattaatccatccggcctaggtggggttgcctagatcccaacagttcttaggcacacccactcggggaaaggcccaatctccctaaaagactagttcaataggggaagggtggctctctcttttaaggtggtttctacctcccaagctaagcaaggtgggattattcagaggctcacacggtcaccgcctgactacaactgcaccacttggccacttattgtgtctttgccagcgggtaatagtggaggatgtcctcatcatgctgagattgcacctcccgcacatgtcgcacccaacctaccaggaaggctatacccccttgcgacacggtagatctgacatctgctcagctagataccaagctgacatgacttcataacacctacccttgttaattgttcctaggagagagacaagctacactacaagcctagtcgttgcgtatgctagcttgtggtaagtacagaatgtctcacaatatgttccagtagcactcattgaggaaaaagtagtgactgagcatctctgggacctaggaaaggtagaggagtgttagggaggagtagcgcaatctggaacgatagcaaaatacgacatgaggaaggttgcccaacggccttacctcgcacggggtggtgatgctctagggtgaacgggcttcgagaagactccgatcgcactcctcgttgtcacaaagctagtggtggcgagggcacagctcgatagcagctagagcagcgtcgagcaacgggtggaggtggctaacaacagaagtgctatgatggtcgttgtggggaggcgatggagtgcacggagggctcaggcgaatgcggaaaaaggagaagatgagcatgggaaggggtcatataggctaggaagggaagaatgtggctaacaaggcaacattgtcaatgagagagggatcacgatgatgagaccgaagtgcatgtatccatgttagttctgcacatgagttggggagggtaagaggaggagtgggtaacaactgatccgacattttgaatgaagggagaaggtgcaaaattggacagaaggggtggtttcgaccggtggtggtttcctaggttggggtttatagttattattcaaggcttttagggtttttaagcaatttcttgaaattaaccaggaaagtagcacgcgcagatacatgggcacctaaaatatcataaattctattaccactaaaatttttataattaagtttcattaacttttacttggaatattatttgataattttattatatcaaactatgaactataatgggtgtgaaatctataagggttgagcatgtagtttatataatttatagtgtagatttcaatattagctttgagtgattaggagattataggagaggaagtgactcgagcaatgtccgcccgaaaaaagccatgacaaatggaagcggcggcttcttcggaggtaaggtgtccttgtgttcacaattgcacagatggcgtgaaattgtaaggtgggcggccatacggaacccatgtggtatatatgtgatctctgagttaggtttttttttcttttcttttttagggggggtggggggggataggataaggattgaagctgtcgtctatttggtaagaaatgaggagcatatttttgaaatcttcataaatcttatttaaatttcacaatttttttaccgtgaaaatttaaaatagactaaggaatattatattttatatatccaactgtgtactataatggctatgaaattgaagggttaaagtctagctataaactatgattatatatggtagaggtcccatatgttatagaacttttttatactgaaataggagaacaccgatgtgatcgctcatatatattgttgatgcaatacttgattctttgttttttatgcatctgtacggtcagatataatcctttgtaagttcagcgaaatctatgtttctcctaattatttgttcggcaccgcttatttagttttgatgcacatgttagttacacatccttagtggctacacgtccatcaacaaattatttgcattaattacattcacagcaatagtatttttagagctgatcaatttagcaaagtaaacattcacagatacccctccctccgtaaaaaaaaaaaaaaaaaaccaatcctaactacgaacctgacacgtagctaagattgatctttttttttttttacggagtagtaacatggatagcccttcctagcagtgaacctctacttcgcaaattgcaacgctatctccctctaacaggcgtgcaacatctatctcaatattcaagatttcaccgtgcaacatctatctcaatattcaagatttcaccgagtgcggtggggttaattgtccggtttattttaatcaatataatctaatccaacagtttacaatgttggacccatagatttaaataaaaatcaaggatagaatttttttttcttttttcctcggaattttttggattttctctaactagaaaaatacccgtgcgttgtaatgcgagaaggttattttaatattattattattatacggtttagttaagatgaaattcactgtgggaattcgcttggagatatatttttctagaaaatcatgagctgcaattaggagtctgaccttcttaagttagtatgcgagtttttttaagagatatcttatacgactccttctgtattttcaaaaatgaacgaacttaaaacccgactcaaatacggatatgtattttcaaaataatatgaacttaaagaaaacaactcatacacaaatagcgtaccaaagtaccggcaaaaacatcttcaatttttataatagtagagatttattagagtgtcacgtgatggcttagaaacgtttgtaggaatctgacggagctggtggctcctcaccgggggaccgcgcaggcccccctttgccagttcggccgggggcttagggtgaaatctcaagctctcgctctctctctgtatgtggaaatatcgtccgccagccagaaacacgagacaccggcgatctatacaggttcgggccgctgagaagcgtaataccctactcctgtgttttggtggatctgtgtatgaatgggctacaagtgtgagctgacttctcccccgttctaagctcataatctgggaaagaatcaacaaaccccccactctatgggcaaggtcctccttttatacttcaaggggataccacacgcacccttctctttccaaactggactgttctttttctcttgaatgggcggagatcagcacggttgctgtccgaatgacgctccgatgggacagcccacacctacctccacttccgccgggagtgagcgcgtcgtgggaacatggctgtgcgctgacgatatgatcagtgtcagaccggtcacaaatcggtcattcttgtccaccgcgtgtaatcttggcaacgtgcatgtttgcccttcttcactcaacatctcgcctgtaatggttaggatgaagcctggcatatatcgtccggggctaacgtgtcatctctaatagataacgcgcttaactccggcttgagacgagtgcctagaggctttcgtcttgacgggacggggcaaggcgtgcgtcagaccgccagtcgccacctaacccgtgatctgaccggtctgtgactggtcacagaccggataaaggaacgcgccatactgcgctgcatgcagcgtgacacgcttgaccagactgcaataaatgctgttaggtgagcacagctgtgctcacttatcccatatacgtggcgcagacttcctaaagggggcgggggtgcccccggccctccgggccagggcaagcgcaacccgacccccccctcgggggaaatcaggaggagggcggacacctcaccctcgggcccgacgtccccgaaggtgccaggccacgtgggcggttgcgtctgcctcaagcctctggtcatgatactcccggtcccatatcaccgacagtagcccccggcgttatgccagagcaatttcccttcccaagggaagcggtcaggtgtgacgccaccctgtgataggtgggaccggtttccgtagttgggcaaaatacccaacggtctcaattcacgcacattggtattggtaactttggttgtccataatgggcggtctattcaagactgccacaccacttgagcagcgcgcgaatctgggtgagcagatttgtctcgcccggagatacggtaacgccgcttcggttggcgagcgtaattaacgcgcgcacgatacaatccgtttcgattgccacaactgcacatccacttcaagcgccgtaagcgggcgaatgggattagtggaagcgtgggcacgggaaacgagggagcgagatagcgagatacgagggagcgaggtagtgggcgcgagaaacgaggagccaggcccagcgatggcaagggtataaaagcatcgagaaaaggatttgctcccttcctttcgccattgttcctcttgccttcgctgcctgagctctaactctttctctgccacgccctactttcgccacacgcgctcgttcccaatcatctcttcctccaccgccatggcatggggctctgctctgctcgacggcagtgtactgccgccttcccgcatcgtgaatgagaggcacgccggactgccgcgccgcttcatgccggagtccgccaccggtcgggagattgtgatgctgggcgaggggcgcccggcatcagactacccggggcggtccatcttcttcctccccttcgcaatggctgggctggtcccgccattttctcatttcttcatggatgtcctggagttctacgatctccagatggcgcacctcacccctaatgcggcgatgacattggccatcttcgcacacctgtgcgagatgttcattggggtgcgcccctctcttcagctgttccggtggttcttcaccgtgcagtcggtgtcaccgccatcggtggttggcggctgctacttccagccacgggggccggtgttgaaccgctacatcccctgcgtcctccgcaagaagtgggacgactggaagagcgactggttctacacccccctcgccgacgaagcgcgcctccgacttccgagccagcccccggcgcaggtctccagctggcgggcgccggtagatctgggggaggagtacgacaccgtcctcgaccgcctggcgggcctgcgatcccaggggctcaccggggccatggtgtacggcgattacctccgtcgccggattgcgccgctccaacggcgcgcccggagcgcttgggagtacactgggcctgaagattacatgcggacccatcagggaaccagatgggattgggctcctgaggacttcaagatcgtagtccaaagggtgcttaatcttagctccgcggaggcgtctcgccttcctcaggagatcctccccctctgcatcgatcccgaccgcgtctccattctatccattatgctgggggttggggcctcagaggagagagcccctaagagccacgatggcgcgggcgagagccgccgggggaaacgatctgccccaggagggggtcgtgcttctgggccccgcgtcgggggctcggggaccagccgtcctgccgacgccccggggaagaggaagctgggaggaacacctcccccatctcctccccgagggggcggggcggtgcgtaccagcggtcggcgcccggagggggccgcgccgacgtcacagcccgagggggagcgcaagaagaagcgcctccgcaagatgggggagacggaaccagcccggggaaacttaatttcccctccaaggtggtcattcaaccgaccccctcgcaggttcgtctcactcttattgcaaccatctttctccaaaaagaagttttttcttgctcattttgttcgccttctggttttttcttctgcttcagcgatgtcccgtcgcattcctcccgccaccccaagtccggccagtccgaggccgaagatccagcggccgcagaggagcggaggcgggagtctgaccggcgtgaagccgcagcccgccttcgggaagctgaagaggccgcccgggaggccgcccgggttcgccaagcggaggaagctgctcgggaggaggccgcccgggcccgccaagccgcagaagctgcccgggaggaggccgcccgggctcgccaggctgaggcgacagcgtcacttgggcccactccctcgggcggccctcgggcgacatcctccgaggcggctcgcgacgaggccgcgggcgcatcgcctgggcctacctcaccgggcgacgcccaggaccgaacgggcccgggggacatccccgagctcagcgtatcctccggggggccaaaccgcgtcgccttttctccaaggcggcttttttcctcatcttccgtcgccccggtgagcgccgagcccattatgcaggccttggccgccgcaaacaccgcggtgctggatgggttcaacacccaggtggaggccctgcgtgcagaacgagcggagctcgaggccgcatgggcgcgcgtcgaggaggggcggcgctcggtggacgccatggtgaaggtgggccgtaaggcccatcgccgccacatctcggagctcgaagcccgcaaggcggcgctggcggagatcgcccgagaggtgaaggaggagcgagaggccgccctcgtcgccaccaccgcgatggtcgaggcgcaagacgccctccgtcttcagcacgcaagctgggaggcggagctgaagagcaagctcgacgccgcccaaggggttctcgactccgccgctgcccgagagcggcgggcaacggaagccgaagcggcgtcccggcggcgcgaggaggcccttgaggcccgtgccatggcgctggaagaacatgccggcgccgtggagaggggcttgatggaccgcgaggccaccactgctctccgggaggcgacgctggcggcgcacgaggccgcctgcgccgaggaggagtccgcgctccgccttcgcgaggatgcactcgccgagcgggagcgggctctcgaggaggccgaggccacgacgcgacggctggcggacagcctctccctccgcgaggcggcgcaagaggagcaggcgcgccgcaaccttgaaagcgtccgcgccgagagagccgcgctggagcagcgggctgctaacctcgaggcacgggagaaagagctggccgcgggggcgcgcatcggtggggcggctgcgggcgaaagcgacttagccgctcgcctcgcggctgccgaacacaccgtcgctgacatgcagcgcgcgctggactcctccaccggggaggccgaggcccttcgcttggcgggcgagattgggcccggcatgctttgggacgcggtctcccgcatgaagcgcgccggtcggcaagcaggcctctggggaggccagacgacggtgccccccaccaatctggaaggcctcgcaccgcacctcaacaggatggcttgggttctcgagcgactccccgaggagctcgagaagaccattaaggcatcctcgagggacctcgcccggggggcggtcgaactcgtgctggcgagttaccaggcccgggatcccaacttctccccatggatggcgctggaggagttccctcccgggaccgaggacgaggcgcgcgcgcgggtcggggatgctgctgaccacatcgtcaacggcttcgagggctcggcccctcggctcgcgttcgcccccagctccgacgaggaaggcgacaccagcagcgaggacggcggtggcgacgaggccggcgacccgggcgcatatgaatgagcccccaggcccccgccactataatcttttttcttgttctttcttctaaggccttcatgcctcttttttgtacaattttaacttaatctgcaatgagaaatgatgaaaaatttttgtgttagttttattttgctatatatatgagctgaggatgatctgtgccatggtccttttgcgacttagcttggaataagggctcgcgcccaagtcccggtcctcgaatggctcgggtcggggctagtgcctggggagatccgcatgtcgagactggccaggccgggaacgtggtgaccgaggggtatgggtgacccgattgtgggtttttgccgattcccccccggagttcaccacgccccggggcacggctcggttctgggccccgtttggcgattttagccgaccgaaccgagcccccgagggcaaggttgagtacgagtgacattatttcaagtcaagattcttcaaaaggaaaaaaacggcacagacacaacctttaggaaattgaaactgcttttattgaaatgctgaaaggaatatatgtgcatgtgtggtagcccccggctaaccctgcacacccgagggggggtgcggggttagcccgagccgaaacctgacacccgaccccccccccttcaggggtagaagcgacgaaggtgttcgatgttccacgggtttggcagctccgtgccgtcgcccgtggccagccgtaccgagcccggccgggggacaccgatcactcgatacggaccctcccacattggtgagagtttgctcaatccgggtgcgagactcgaatgtcattcatnggggcgcag

SEQ ID NO: 17232 - DNA, 2360 bp, Oryza sativa
tatttcaagtcaagattcttcaaaaggaaaaaaacggcacagacacaacctttaggaaattgaaactgcttttattgaaatgctgaaaggaatatatgtgcatgtgtggtagcccccggctaaccctgcacacccgagggggggtgcggggttagcccgagccgaaacctgacacccgaccccccccccttcaggggtagaagcgacgaaggtgttcgatgttccacgggtttggcagctccgtgccgtcgcccgtggccagccgtaccgagcccggccgggggacaccgatcactcgatacggaccctcccacattggtgagagtttgctcaatccagcacgcgtttggacgcggcgtaggacgaggtcgtcgacgcagagtgatcgggcccggacgtggcgctgatggtagcgccgcaggctctgctggtagcgcgcagctcggagggccgcgcgccgccttcgctcttccaagtagtcgaggtcatctctacgaagctgatcttgatcagcctcgcagtacatggtggcccgaggagacctcagggtgagctcagatgggagaaccgcttctgcgccgtagacgaggaagaaaggcgtttccccggtcgctcggcttggtgtggttcggttcgcccagagcaccgctggcaactcctcgatccatgaatcgccgtgcttcttgagaatattgaaggtcttggttttaaggcctttgaggatttctgcattggcgcgctccacttggccattgcttctggggtgggcaggtgaggcgaagcagagcttgatgcccatgtcttcacagtagtcgccgaagagttcactagtgaattgggtgccattatccgtaataatacggttaggtactccaaaacgggccgtgatacccttaatgaatttaagagcagagtgcttatcgatcttgacaaccggataagcctcgggccacttagtgaacttgtcgatcgcaacatacagatactcaaacccgcctggggcccgtttgaacggtcccaggatatcaagcccccagacagcaaatggccacgacagcggtatgatctgcagggcctgggccggctgatggatttgcttggcgtggaactgacacgctctgcatcgccggaccagatcgactgcgtcattgagagctgtcggccaataaaatccttgacgaaaggccttgccaaccagggtgcgcgaggcggaatgggctccgcactcgccctcatggatgtcaacaagaagctcaacgccttgttcctgaggaatgcacttcaggaggattccgttagccgcgcgccgatagagggtcccttctaccagcacatagcgtttggaaatgcgttgtacgcgttcactcccttcgcggtcctcaggtagagtcttatctgtgaggtatgtttggatctcggagatccaagcaatcaatctaagggagcttggagcgctcccttcgggtcccgaggcctggactccgacgggcctcgggtgccggtcaggcgcatccgtctcccctaaggggtcgggtcgcgccgacggctgggtaagcctttcttcaaaggcgcctggtggggtctgggctcgcgaggacgcgagccttgagagttcatcggcaatcatattatcccgtctgggcacatgccgaagctctatcccgtcaaaatggcgctccatacgccgcacttggcgtacgtaggcgtccatctgtgggtcagagcaccggtactccttacagacctggttaacgactagctgggagtcgcctaataccaagaggcggcggatccccagtccagccgccactctgagtccggcaaggagtccctcgtactctgccatattgttagtcgctcggaagtcgagacggaccaaatatctgaggacgtctccgttcggagaggtcaacgtgacccctgcaccggcgccctgaagagacagagaaccgtcaaactgcatcacccagtgggcggtttgaggcagctgtgaggggttcgtgctggcctcgggtattgagacggtctctggagccggggtccactctgccacaaaatcggcgagggcctggctcttgatagcgtggcgtggttcaaagtgcagatcgaactcggaaagctcgattgctgtcgcgaccgggaaaattgcctttttccgaacgcttgtgtattaatccccgtcccaggaaaagccggggtacaccatacaaacatgatataaaagacacatctttattatatcgataatatttacattattacaaaggcacttaaggcctgacaaacaaagataaacagcagcggactagcgggcctacggctccatcttcacaggcgctcaactggagtataagccagga

SEQ ID NO: 17233 - DNA, 18379 bp, Oryza sativa
  unsure (1)..(18379): unsure at all n locations
gagggagctgggccgagaggggaggaggcccaagagtaggagggagagaaggagagaaagagagggaggagagggagactttgaactgggcttggcccaaaggaggaagaggagggatttttagcttttctttttaataaactttgatcaaggttgttgttgcttaataattatttccggtgctctgaaaattcaagtaaaatttgagggctctttttagaccaaggagaatttaacaaaaattctccgggccacattggaatttttcttgtacgtattttagtgtttgccaatttcttttcgcattttaattaattctattatgccttttagcgaatgatttttatttcgggatgaatttatcaggacgtgacaaatccaccccccttacaagaatctcgtccccgagattcgaggaggctagcaagaagataggttgggcggtcttctcttcttgtctgacttcttccgctccgtcttctataacaaacttgcctaacaaaacttcttcactctggactgcttggctcgatctcctgttgcagatggaatcttctcttcacctgacttgtccctggttgaacctttagctgacttcgactgggttgcggcacttgaagatagggcttcagttccagaactttgcatagttcatatctttggagtcaacctcatacaagttacccacttcatgtcatgcgtcgagatcagctcgtcattactaagataccatgcttgtcatcatttagcattcaaagtattcccttacacattcagccctgacgtattctttttagatttctcttatcaatcacctttcgacctacttctttgcccgataataaacacctttgctggtatcttctatcaataaccttttgaactttgtcaaccaagtactcttcactccaagagttgtggatgcttttggtgacgatgcggtcctttggtctgctgcctttcagtgaaaccttcaagtgttttgccaaaagctgtactgactgtctttgtctttgatccgaaaaagacacatctgaaattcttaatcccaacaaatgtctctttggttaatcgcttgattttcttttccatcctcaggttggttattagttcgaggttagaatatagttcctctggcacgagaccctaggtctcctttgtcagtaaacaattatacacatgatcacatatccgcatcttccaaaagaatcctcttagaacttgtttttattaccaatttctcccatattacatgaatacaaggcactgtcttaaacaaaaagggaaggtgcttaacatcggtacattgtttcctctatgggttagaattaacatgaggcctcacaggtacggcgtttgctccagtgaccacaaggcgagtgacctgtcttcttcttgcataatggccggagtgatggcgcaggttacgcttcggctgtggacaatctctggagaaatgacctggttctttgcagttgtaacaaatcaacgtcttctttgctgagctgtccatctggggatgatcattgtgacttggagttggaattggtggttggaaacccttgctaacattggcatcagcggtaccatcgttgctatcaccattggagtctttctcagtgtcaaaattgctaaggttgtcattctgggttccaacattgatactatcgttgacatcttggcgaatgctaccgacattgcacgctttattcgagtggtcactaatggggcaagaaccatggttgttggtggtatcatcattattagtattgctagtgttgttgtctgcattgcattcatcttcttggggcaggaactcttgatgcacaacaggagatccggtgatctgaagtggctcagtgcgctgtctttggttaccacctggaaatactgggatgttgacaatccttctcttgcagttcgtcatccgattatgctcactttcgagttgcatggctttgtccacaagtttctcaaaatcttcataatcctctagaagtagttgcactgcaagctcatcttttaacccctggagaaacttctcttgtttgtcttcatccgtttccacatcttctggtgcatagtgagccaaacgatagaactcatgcaggtactctgtgacggtcaaatctccttgcttcaggtagcgaaactctcgttttcttagtgtgatcattcctgcgggaacatgtgatctcttgaatacagatgaaaactcgttccaggtgatggtatgtccttctggccgtgatgcttcgtagctatcccaccactctgaagccggtccaaccaactgatgagttgcgaagccaacccgctcctggtcggtgcactgaatcaaccctagcttcttctcgactgtgcgcaaccaatcactggcttccataggatcgacggccatggcaaaggttggaggccccgttttgagaaattctgataacttgcactgttgctggactgtaggtacttgaacgttggttgcccctgctgggttgttccgattctgtaagagttgaaaggctgttgccaacatgttggtttggttaaccacaacttggattagctctggtgaggtttcgttgatgcttttctcattcccattggcttgggttcttgagtcatcggatccatcattcccatagcctttgttaccagtgttatccatctgtcacaaggtaggggttgagagaggaagcatacaaggaaagaatagaccagagctagggacaggaccttaaaggaactaactctttttgttgatgtgttgtgtgttttgcttattctgcaagttgattaagcaaacaacctagcatggttacatcaccacccaccgatgcaaaccacgcgctacacacacaagcaaggaaacacacgacaaacgaaacactagagggtggcttaggttctgcgacgggttctccaagatcttcactcctgcttcacagctggcttcactgcttccttcgcttcgctagcggatcctgcagtcttccggagcttcggcaaacaactgacgacatcttcttcttcgcaaagctgaccatctagtacttagttgaaatccgaagaaagaaaagagtaaaccttttgcaaatagcattaggagaaggagaaaaagaggaactttcgcaaataattttatttataaaatatgtccttaggttttatccatttggcttatcctacagtcgagatggctctgataccagcttgtcgcgaccgggaaaattgcctttttccgaacgcttgtgtattaatccccgtcccaggaaaagccggggtacaccatacaaacatgatataaaagacacatctttattatatcgataatatttacattattacaaaggcacttaaggcctgacaaacaaagataaacagcagcggactagcgggcctacggctccatcttcacaggcgctcaactggagtataagccaggactccacctaagacatctcctccaaagcttctcttactgaagggggaaaagattgagcaagaatgagtacaaccacagtactcagcaagccacaccggagaatgcatgattaatgcaagggagtacaaggagataataatataggggttcagttttgcagtaaacagcatttaaaagtcacttagttgcccaaagctattttataaagacgatcctagagctacacagtgttattaaacaaggccgtgaaccctcacgaacctgccttaacccaaggcctacgatgaattggaccgaactggcaacccgacctgggtcccaactcgtcccaagccaacccaggccaaccattccatattttagttgttgagcaaattttaagaattataacactgacctgggtacattgctaggcttgcccatatccgagggctcggctattcgaatagatttactctgatcagaggtgtacatctttacccacaagacacatctttactccgcattccatggccttggaacccgtcgtaaagatgtgacatagtttccaacccatcctagccttagacaagagtaccgacccaatcctacctacggccgggatacccgggacaggcaggcagaactgagcccctagcattgggcaccaaccctccgccgtatgacatctcgactaccgagccgcagctcgtgtagccttcatttgccctggagaatgtccatcgacgcccgacttcatccatctccaatccgtgtacttttgtttatgactagactgagccacaaactaagccttacccattagacatgtggaagtacggtagtgctttgcaacagaggcccgagctttagtccttatagtggccggggtgctacttcccataactggcatgcacccaaaccccaccgaaaacaggttttaggggttttgaaagaggaagagaggtgtatgtccaattccaccacaaaccaataattccatagtgtccaaatgatatgagaattcccaaagtctaaagttataaaaccacctaatgttgcctaattattcagcgaagcatctacctaaatttatactagtggaaccatgaacagagtacccactagttggggttttatttattctagggtgaacaaggtaataataataacaataacaataataaggtcataacaaaggtaattgggcatggctagataaaacagtgataacgcgggaatttaaataaagcggtaatgcaataatttaaatcaacataattttacaaactgggattcaatatgttcaaggatgatgtgacttgccttgctcagagagaacggacttccgatccttcggcgacgaccacgaaccacgcttcgggaacctccggaacgacgaaagctacgcgaagcacacaagcaaagctacaagcctataaagaagcaataacaatacataaaaacaaagcacagggttctttaggttatagcaaacattaggagacttgaacgggtcgattcagagttcgtatgaccaagatatgatcatccgaagtttaatgctgttatatggagatttgcggattattgtaattaggttttgcaactataaaacatgtgtaagcgctagcctggaaaagacaggaaggctgcgccgttgacatgcggaccccacatgtcaacctaaaggaccgcggtagaccgagtgcacagagacggtccacgggtcgacggaagcggatcccgtgtgtcaaccgaggcgagtggccgacaaacggactccactggacaccacacggactgcacacgtggaaaccacgcggctaccaagcgggcacacaaacacggacactacacggtcaccacccgcacacgtgaacgactaccgacaccggtacacgggtaccggggtcgacgaccgcacaacgggtacggggcgacgccgaaaggacgagggcggggaagcgagaggacggatccttaccaccacgcgacgaggcgtgggaacgacaacgacgaacgggcgcggcggagacagacgggcacaacggagacgaacggcgaggggacggcttcggcggcgatccttggacgaaggcgagacgcggccggcacggggcttgacgacgcggagccgagggcggagacgaggacggggctgcagcggctcgcttgacgaacgcggacgacggacgagaacggctcgacggagggacgaacgccacgacgaccgggaacgacgagaggacgacgacgacggcgacgaccgggaccggcgaggaggcgacgaggacagccggcagcggctgcacggagacgaggacgacgtgggacacgccgctgcgatgacgatgacggaggcggcgccgcgagacgacgagccgggcgaccgacgggacgtcgatgacgagaacgatcggagacgacgatgatggcaggcagcagcggctgagaggaggaggggacagcgtggaacacgccgctacgacgttggtgatggtggtggtgcagcggggcgacgagccgacgaggaggaaggagaggccggcgcggagacgacggcgttccggcgaagttcgggcgaggaggaggtggtgccggggatgagagcggcgtcgtggagccgaggaaggtggtggcgacgtcggccggcgctccggggacgtggcagaggcggccggaggcggagaagtggtggcgacgccactggacgccggcgaggacgcgtctccggtgctttccccgcgaaacggagggctgaccgagggagagggagcagctgcgaggccgaggacgacgtcgcggctgcgatgccgaagatggtggtggaggtggccgaccggtacacggcgaggagggacgggcggccgaacaactccggcgaggcggatgtagaggttcgcggcgacgttccggcgaaaccgagggcaggccggggtggagggcgatgcggcgtcgccgagggaggagacggcgacgtcggccgacgctctggcgcggcgaccgggcagccggaggagatgtcgacgaggaggaaggtgaggccggcgcgggcgacggtgttccggcgatgttcgggcgaggaggaggtgataccggggatgagggcggcgtcgcggagccgagggaggtggtggcgacgtcgaccggcgctcaggcagggagatagaggcggctggaggcggccggcgcgaaggaaagaggaggacgacggcgggaacgcgcctccggcggtcaccgcgcgaaacggagggtaggccgagggagagggggcagctgcgatgctggaggaggcgacggcgcggccggacgatgctccggtgaggagggagaggcggctggaggccggccggcaacgtgggagagagagggcgacggtggggaggtggctagagaccacgggagagcttgggaggagaccaaaacggtagaacgcaaagagggggttctattttataggagaggagagggaaccggccacgggggaggtcggaacggcggcgagaaccacggccggcggcaatggttggtggccggagaaaacgcgagcgttcccggcgattgggggcggcattcaagggggaaaacgggggaaatcgaagaggaatcaatggggattaattgcccctaatcaatttggtaagagccggcttgaatagagcggatttagaggaggaatggcgctagggctcgctcgggagagggagagaggacggccgggcgggaggaaggggacgacgcccgcctgacgcgcgggccccacgcggtcgggcggcggcgtcagcgcgcgcacgcgcgcggcacgtgcgggaggggagcggctcgggggctggggcggcttgggccggcggccggcccaggaagagaggagggagaggcggcttgggccgggcaggccgggaggggagggggggggaagaggcagcccgggagagagagggaggagggagctgggccgagaggggaggaggcccaagaggaggagggagagaaggagagaaagagagggaggagagggagactttgaactgggcttggcccaaaggaggaagaggagggatttttagcttttctttttaataaactttgatcaaggttgttgttgcttaataattatttccggtgctctgaaaattcaagtaaaatttgagggctctttttagaccaaggagaatttaacaaaaattctccgggccacattggaatttttcttgtacgtattttagtgtttgccaatttcttttcgcattttaattaattctattatgccttttagcgaatgatttttatttcgggatgaatttatcaggacgtgacaattgcccattttaccactcgtcctgtaccctctcgattatgcaagatttgaccgagggggtaagacgtaaccacagcgacccgatgcgcctggaaataatggcgcagtttcctcgaggccatcagaatagcgtaaagcatcttctgggcctgtgggtatcgggtcttggcgtcccggagggcctcactaacaaagtagacaggccgctgcacctttcggcgaggccgatcttcttcgctaggggccgcacccccggggcgttcttcgtccgagtggcccctcggggcgcacccgtcttctgtgccgatgacctcggggtcggaagacgacaggagcggccttcccacagtggcctcgggaccgtcctgggggttgggggctcctggtgtcatcggacaagcgggcaaagggccaactccggtcgtcaggggccttaggccaccgttcggctcgggggcctcttctccctgctctctcccgggtcgaatcggtacagggttagcctcggggtcagagagtgataggtgcggcctccccgcagtggcctcggggccttcctgagggtcgggggcacccgacaccgtctgacaagcgggcggagggccgactccggtcgtcgggggccttaggccaccgttcgactcgggggcctctcctccctgcctgctcccgggccaagtcggcacagagtgggggtgcgcagaatgaggattgtcctcatcgcgctccacaaccaacgctgcactaactacttggggggtcgccgctaagtaaagtagcagggactcatttggctccggggcgactagaaccggaggagagctaagatacgccttcaactgggcgagggcattttcagcttcctccgtccaagtgaacggccccgagcgcttgaggagcttaaacaggggtagcgccttctctcccagccttgatatgaaacgacttagggcggccatgcaaccggtgacgcattgcacgtccctaagtttgctgggggggcgcatccgctcgatagctcgaatcttctcgggattggcctcaatgcctcgggcagagaccaagaacccgagaagcttacccgcaggtacaccaaacacacacttatcggggttcagttttatgcgggcggagcggagattctcaaaagtttccgctagatctgaaagtaaggtctcttggttgcgcgtttttacaaccaagtcatcgacatacgcctcaacattacgtcctatttgactacccaaagaaattcgagtagtacgctgaaaagtaggacctgcattctttaacccgaagggcattgatgtataacaataggttcctacgggggtaatgaacgcagttttttcctcatcctccctagccatgcgaatctgatggtaaccagagtatgcatctagaaaacacaaaaggtcgcaccccgcagtggagtcgacgatctgatctatgcgaggcagggggtaaggatccttaggacatgccttgttaaggtcggtgtagtcgatgcacatccgaagcttgccgttcgccttgggaacgaccaccgggttcgccagccactccgggtggatgacctcacgaatgaacccggcctccaaaagtctagccacctcctcgcggatgaaagcttgacgttccggggcttgccgccgcactttctgccggaccggccttgcgcccggccgcacagcgagacggtgctcaatcacctccctggggaccccgggcatgtccgctggtctccatgcgaagacgtcagcgtttgcccgcaggaaggagacgagcgcgtcttcctatttgccatccagaaaaccaccgatccgtgtggtcttggatgggccgtcgcccaaggcaacctccttgaccgggacctcgtcgcaagtggccatccgctgcctcggggcggtgggggcagaagggccaagcctctcgtcaccaccctcgggcttggacgcagcagcgaggcggtccgcgcgctgctcaatgcaagcaagcgcgactttaaggtcgccacggacagagatggggccaccggggcccggcatcttcatctggaggtaggcgtagtggaccgccgccatgaacttcaccaacgcgggtctccccaggaccgcgttgtagggcagactgaggtccgccacatcgaagctcacccgctccgtgcggaagttggcgggtccaccgaaggtgaccggtaggtcaatgtgacctaatggccacgtgtgccccggcgtcacaccgatgatcggttgagacggctggagcaccatccccggggccttgatagcatcaaaggccgcgggggaaaggatgttgagagccgctcctccatctatgaggacacgtcccaacttcacgttgcagatggtgggggaaaccaccatcgcaacctgccctccccgggcaatgcacggtgggtggtcagtctggtcgaaagtgagagcgacctccgaccaccgcgcccgacgcatcgcctcatgggtaggggccatggccagaagctctcgcttcatggccttgaagctccggcgagagacgtgagcacacgcccctccatcgacggtggcaatggtggccccaggttcttggaaacctaggtcatcatcaccatcatcaatgtcaacagcgggggccttctgcttggcctcacttcgccgtttgccggatgggaccgccggggacttgccctcgcggcgttcctgcctcctgtcctcctcccacttcctcgttcgctcagccaaatttttgactgcgcgacagtccgcgagatggtggagggaggtgttgtggacggagcaccacctgccggcggggcgctccctgctgggtgtaccagccccgttctttttgtcgctcgcaggcctcccctttcgagtggcccgcggagcgccctcgacggcgaggacatgaccctcgtcgccggaacggtccggcctcttcttcctcctcctgtcacgccgccctgtctgagcggcggatccgggggcggccgaagctgccactccggaaccggaggagttccaggtccacgcttcctccttacgagccactcggtccgcgagctgaaaaagctccgcggtagtctggggctctttggaagcgatcttttcgagcatgcggttgtgccgcacgccccccctgaacgcgtagatcaccgcgtgtgcagggatgcatggtatagtgttgcggacttggcaaaaccgctgaatgtacgagcgaagcgactcatcatcgcctcgctgtactgcatgcaagtccgcttcttcgcctgggcgcggatatgtgccttggaagttcatggtgaactgttggcacaaatcttcccaggagtggaccgacgcgggtggcagattcattagccaaccccgcgcctgtccttttagggccatgggaaagaagttcgccatgactctgtcgtcacccccagcggcctcaatcccggtcgtatagacctggagaaactcggtggggttgacactcccatcatacttctcggtgatggtgggccggaaccttgggggccaacggacattccgaagactcgccacaaaggctctacagccaacaccaccggccgggggcacggagggctgatcttcacgtccatgtcggagtgacactctggacgaggaggctccctccgttgcacggggagtacgccggctattacaccgacgcccgatgttgaggcgggcatccggctccccatgctgatcctcccgagtcgacggtgtagacgagggagtggcagccgaatgacgtgcagccgccgccgctcgccgcgccctccgccttgatgacacggagccggtggtagcggcgccggaggtcttggtggtggtggcggaccgtccaccagcacccaggcgctgctgtgccgtcatgaccaagttggccacgtcttccagccatcgttgggctggagactccgggtcatggacgacaggcgggtgtcgtaggagcgcgccagcagcttgaagcgcaccctgaggcgtgctgccgtcgccgtagacgaggaggcgacgctccccgtctcgccgttctcctgcatcacctgcggccggtgacgctgcggacttgtcgaccctctcaagcgcctccccctgcttagggctttggcgcggaggaggtggaggagtacgagctcgacggcgtggattcggctccccgtcgtcgccgctcacactcggcgagaggtcgtgcgtttttccttgctcggccattaggttgaacaagaaaaacttggggcacacggaagagtctgagagctctgaaagcacacgctgagccccctacctggcgcgccagatgacggagctggtggctcctcaccgggggaccgcgcaggcccccctttgccagttcggccgggggcttagggtgaaatctcaagctctcgctctctctctgtatgtggaaaaatcgtatgccagccagaaaacacgagacaccgacgatctatacaggttcgggccgctgagaagcgtaataccctactcctgtgttttggtggatctgtgtatgaatgggctacaagtgtgagctgacttctcccccgttctaagctcataatctgggaaagaatcaacaaaccccccactctatgggcaaggtcctccttttatacttcaaggggataccacacgcacccttctctttccaaactggactgttctttttctcttgaatgggcggagatcagcacggttgctgtccgaatgacgctccgatgggacagcccacacctacctccacttccgccgggagtgagcgcgtcgtgggaacatggctgtgcgctgacgatatgatcagtgtcagaccggtcacaaatcggtcattcttgtccaccgcgtgtaatcttggcaacgtgcatgtttgcccttcttcactcaacatctcgcctgtaatggttaggatgaagcctggcatatatcgtccggggctaacgtgtcatctctaatagataacgcgcttaactccggcttgagacgagtgcctagaggctttcgtcttgacgggacggggcaaggcgtgcgtcagaccgccagtcgccacctaacccgtgatctgaccggtctgtgactggtcacagaccggataaaggaacgcgccatactgcgctgcatgcagcgtgacacgcttgaccagactgcaataaatgctgttaggtgagcacagctgtgctcacttatcccatatacgtggcgcagacttcctaaagggggtcggggtgccccggccctcggggccagggcaagcgcaacccgaccccccctcgggggaaatcaggaggagggcggacacctcaccctcgggcccgacgtccccgaaggtgccaggccacgtgggcggttgcgtctgcctcaagcctctggtcatgatactcccggtcccatatcaccgacagaatcccacgtgacggcttgagaatatttatatgaagtttaatgtaattttagtacattaagaatttaagataggtcaggggaaaactcaggacgttacacaggacgaatccaagctgatggcccaccttctattcccttcttctcaacacgacatacggcgtcttcgagcagcaggtgattctgatcgacttgcaatgcaagagcgccggcaaaagttgaaaaacaataagcatgtgtgttcatatctcgttttctgtcgtgtaactagatgtatcgtcaagaagaatctatatatataagcattctttaaattgcaacatatagattagtattattgtcaacagcttcagatcagttttaaaattgtacgtgtgattgccctacttgccgatggtacatgtgcatttatgggccggctaatcatgtggattattctggtttgtttactagtgtagtatattactattattctctgacaatagtagttctataaggttgatataatatattccaccaactcagtaatcatatgaaactacagtgattgatattgatgtttcatatgattacaatatcaaactatagcggttccctaatcttaattgtagtaaacttagccgctaaatccaacggcgtaagcatgtatatgataaatgtatactaaacataattaatatagaagtgcagttgtatcatactgtattatttaacaaaagtaatattttagtttcacctcgcgaagtgaaaacaaaaataatttttatctatgaaaaaaaattattttatataaagcaaaaaaataatatttttaccattaaaaactgtatatatcgcatattttgttatagtagtacgaaattttttataagataaatcttgttatgcaagataaaaattatttttgttaaataatatctcataaaataaactcataaatataatagtcgcatataataaatttatacactccataaatatagttcataaatttatattttcttgatagcaaagggtaaaatgaactttatgatacgaatttaacggtcaactaacggttaactgacggaaggggtatagaagggatccaagctgaaatttaggggtatggaaggaaatgagcaaatctcagaggtatagaaaggattaggcgaactttcaggggtacacggggaattttctcaatataaatacaatacccttgggaatactcatgagtaaagtgctacatcggtttgcgaatttatccgtgatcataagaaataccaacaagcgacgagcgacgaaggtggctctcctcggtctctgccggcatgtgccccctcctcggcctccgccggtgcatgcatgactgcccttgccgaacttgctaccgagccagtcgaggtgaagcatgcggcgggtgaaggtgaagcccgcaatgagatgtgaaaggcggaagggcggcgacagatggtggtgatgagatcacaacgattggatctagcccccagagcgagctcgacagtggtgaagccaccgggggtgccggggtgggcatgtcacccccatcctcatgcgctgcaaaccccccacccccgggtgataagccatctaatccatacaattaactcattaattagctgcaagttgagcctatacataactgtccaatagattttagctttacgtgattatctgagttaattaatgtaactaagcaatgtagttgcaagtctccaaaactaaaaaggatgaatagaaatgatgtcttgtcattaatgtattcagtaaagttggtgctatttagttccctaattttaaaaaaatgattcttttatgatatattaatgtacattcggacatacaccctccatcctaaaatgagttcaattttttacatgaatctagaagaatgtgttgaaatatatccaaagtcatatcaacaatcattttatttatatattagtgcaaaataaccacaaaattcaatacaattatacgaggggcgactccgcatattagagcgaagaggtgaggccaatctgcccctctataggaactaagccaccaagatccacaccattgtctaccgaggcacttgtgagttcttacatctcatggccagcacccctatcactaaatcctggcttcgccactggagctcgacctctgccccgctaagatctgcctccattttgcacctcggatctgtgcctcgttggatccgcgttgcctccttttggccggcttggagcttcggaggaagtggtgcggggatgtcgtttgtggtgggggcaacaagccaaggacgtggaccgtgccacctccgattcgttgctccttcagtcggtcatcggcggtttggttgaggggatttgtcgctactcggttgcaacctttgctgagagagagagagagagtaggggaggggatggcttgagggagagagataacaagtggtcccatggattttttattctattttctttgctgattggattgccacattgacgtctcgtgtgcaatctcaatcaaaaccacccaaaacaatgcttagggggttatttgtctggtattaatagttaagggcaaaagatatatattttttaaacgagggataattcatactcattgaatagttcaggggtaatttggattttttttctttaaaaatatttggtctaataatatattatagaaacaattcataaaatcattgaactctagtagattctctctcgttaccacttactagctttgtcctttgtttagccccatcgttctctccctttcgttgcaaagggtgtatttagtgttgattcgtaggtaagttgttgattttatcagctgatgccggttagttagggaagggataaaatcccaccggttttcttttcctaacaagagacaactaagtgataaaatatgttttgtttgatcggtacaaatggattcgaatttaattagagataaagcccctgagccccaccagtgtcggtttataaggaaaaggagagaggcatattgttggcaactttttgtgacaagtcaacaagcacgattgcagcacctaaacaccttgcggtgatactagagtcgccaaccaccctaacccagtaagcgctaagtcaagatgggttttgatagattaaactggctagcggagccgatttagatgaaactatggataactacccatcttgtgagcaaacagaaggttttaaggacaaacctacaaagaggtgtcgcactctcgcagcagcggcggacgatttacggcgcaaatcgaaaggtggacaaactaaactagaactagaaagcaatattgaaaaaagcgattcgattgattgattgtaggataccttacaattgaacaggccttgtcccttatataggggttggtcttgccctctataggccctcctccacgtccaactcggggtagaaaccaaaggaaacctgaaacataccttcccgagcaaggaaaactcgagacccaacaaaacagactcagactcggactctgttggtcagaccggccacatgccggcggtctaatcggagttctggccgcagcagtctgaccggcctatacacgacggtcaggctggccttctagaggaaaacaccggtagattccaaactttggcaatttttcctatttcaatcctaggtgtcaattttaggtgtaaacacatatgtcacggccgaactatctctaaccctaaaaccctatttcaatcatccaatctattcagcactggaaggggttcataaggtatctcgcaagaagaagaaacagagaagaaaaagaaaaaaagaagaagaaaatcgaaggattagatcattggattaaatggcttcacatcaaggtcagtgaatcgatttattctccacataagaaaggtgattatgcctaggctaagaactcaaattaattaagtggattaaactccacaaggtattccttgatccagcatactccaacaaggtaaataaataaggagctaaaagtaaaacctcgatttatatagttgaatattgacggattaattaagaaatgctcatgggtatgtcgatccacacagtaatcttatcggcagataacaactcaggagctttcggccttatcttttcgcttatgctttacttatcagccaaaatttgaattttcaatcttaaatctgaagttgattttgatttttttttatcgaagtttatttttcagcatttgcttttagaatgctaaaaacacgtatataaaagttttattcataaatcatttttcgtttgcaaatatgccgttacgcttatgcttaaaatcagccaagtgatggcttcctttgtttctactagttaagatttacaaatgtcggtccaaagaaattgcgctcgcaattcgcgtgtctctccatttgtaaaatcaacaacagagagatcgagcagcagatcgatatatatattcaggtaacatgcatacggcaagctaggtcaacttgcagctgcaggacgtcattccttaaagctggcgagttctgttcatgtgattgcatcaaagattgttggggaacatatataatgttgtttaattatgcaaatcgcctcgcaacaaaaactgtttgtttatgcaaagcatactaaagggatgctcactagattaataactggccagggcggcacatagctagttatattatcatcctaatccgatgattcgatctgcgtttatttggttctttaaggtagtgtttggtttggggaccaagtgggatgggttagacctatcccctttttttggatgggatggttccagttgtgtgtttggtttgtggtataggatggttatagttttttgtttggtagaagggattgaggtgggatgggatggacagtgtttcacggaccgttagaatgggggacggatgagcaggtcggcgcgagcgaagcataggcagcgccgcatcggagccgaacgggaggcggcgggagctgacgacgatcggcggaggccggtaatggaggcggtcgcgcacgaggtggaggcgggtgcggagatcacntgagtatcggtcntggggtaggtgtnagtgnaangctatcaaatnntnnntnnnnncgcctctggtgggggaggcgtgagcgtgagcagtgcatagccctatcgctcgcgcatagcggttacagtacngttagtttgagttggaaagcataccgcttcagatacacatagcatatgcgtacggctga

SEQ ID NO: 17234 - DNA, 16928 bp, Oryza sativa
  unsure (1)..(16928): unsure at all n locations
acgagctgttggtccccttcatcgcatttcaaaaacagacagctgtatctgacgacgatcgccggcgaccggtcaagaagacagttgaggataaggcggcggccggtcgcggacgcagaggaggacggagcggcgccggggaagggagcaggcggaggaggacggagcggtgccgggggagggagcaggaggaggagggacgggcggccgtggcggcgccgcggcggagccgagcgggagcagacgccgttttctccgtcgaagtgggatggattggtccggccgattttggcggaccgtttcgtcccggatctgggaggaatattcctctccagggaccatcccatcccactcacctctcaaccaaacacccctaaaagtgggttcatcccatcccatcccatcccatcctctcaaccaaacactacctaagatcttgttatctactggctcagatatcctcacatgcatcggctgtaccaaaagctaagcctctgctgcatgcatggtgtgatcttgatttttaattagttcttcctccatttcatattatttcatattataagtcgttttacttttcctagttatgactaactttcttgaaaatatgttagtatttccaacacaaaacaaacatattatgaaaatatattcaatgttagatttaatagtactaattttatattttagatgttgaacttttctataaacttgatcaaacaagtttgattagaaaaaaaagataaacatcttattatatgaaacagagggaggagtaattagatctatcttaatttccttctttcacaacccatcggagctttggaaggcaagcgaaagctttagctggctctattgttggcgattgaaatggcaggttaattatgctccatctgccatatcatgtggtgctggctagtgccctttcattttgctacagtgacacagtacgaattcagtagcttttccatggttcatcatcggaaaacgacgagggaacagctatgtttatagcatcatatttaataatatcattttgtaatataaattacctacatttttacatacttactgtactgcaaattatacatgagagagatcaatcaaatagggaaaaaaatttagcaatcccgaaacaacaattacggctatgagtttgtagtatctttttggatgtgtatatgagagtagttgatgtggttgacgatgtaccaccagttgaagagctaattgctactagtatccttttcgcacactactctatggctgtgtttagattggtccaaagttcggaatttggttgaaattggagacgatatgactgaaaagttgtgtatgtattaaagatttgatgtgatggaaagttggaaatttggaaaaaaaaaactttggaaataaacacaccctataacttgaacacgaatttaaattattattttctcacgccatacttggcggacagttcgatcttctgtgattggccagaagtattacttttatttttttataacaaaacgatttaaagattaaaaagttcccctcgtgcaccatgacccggcatctcgactgttggccggcacatgaaatatgaatgcatcatgtgcgactgtgcagtgcagctgccttttgccttgtggcgtccccattgcgtgggtcacctaatcagaatgaacacgtctttttgactctcttttttaccttctagaaaaaaaaaggccagaaaattcgttgatcttttcctcatcaaaatgccaccagccgatttaatactcataactatatactaatgaaataatgagtatttggcgtaaacatagggtttcttgaaacattttaccccaaaacctgagattctctaagataaatcataaaacctgggattttagtttacatgtttctcaaaacttggtttcgtaaaatttactaaaatatatgacgaagttgatttatttaccatgatgtttgaacaacgttactaatagtaaatatgttctacgtttactgaggcagtagtagtttccaaaatatgccgtaagaactagtgaatcggataaaccagtactcctcgggtagccccatttgactgtgattgttatcttacgtgaggtccgtgtagattattgtttgaagcacccgtaagaaggttccaaaaactgctgcaggtggcgcctcatgtgattaggacgttcgacaacgctatggtccatgatgtagctgagcgttgcacaaatgtgtagagtcactgtggttttttctctcatgttcgtgttatatattttgtctgttctaaaatctaaaatatatctattaatttataatccaattagatatatcctatattatgaatctagacaagggcattaaaaatttagacaacctcctgtttagattcgtactaccaagaatcctctatgggtccttgtgtacgtagattcatagtgttatgatatatccaattcggttctatgttgctatattttggaatggagtgagtatttatgtatattgtatcagttcaaaataactttattttttaccatcttatttgctccaaaacaacgactttatacatgaagcaatcattgcattagagtttatgaaaatgtgagggacaaatgaattgagactagataaaataagacacaattgcaatgagatttaataaaatggagtgtattctagttttttttttttttgcttttgtattagtatgtgtgagatgagtaaaaaataaagttagttttggatggaggtagtaattgcttctagccaaggttaacatggtatgtataagttcagcacaatcatccagaaagaatctatgggtctgtttggggagcttaagattgtagttcattttcaggattccacaactatagttttttttagaacttgaacgaaaagctacattgtttctaggaatttctgattgtgaaaaatgctctcctaaatagaccctatataccacaactagttaggaatatttgacgtctacactgctataaatagagacatcgatataaaatattctttgattggatgaaacaacttatataaaaaagtttgccaataacatatcccttccaaaaaaaatcaacttctaataataaacctatattagcatttgtttaaattcatcatcagaagttggtttttgagtatgcacttaacccaactctatttagggtgtgtttagttcacgccaaaattagaagtttggttgaaattggaacgatgtgacggaaaagttggaagtttgtgtgtgtaggaaagttttgatgtgatggaaaagttgaaagtttgaagaaaaagtttggaactaagtaagggcttaaggcttttcttgaaacatactctaatagcgattttataatatttcatacaactatttccaaactacaaaaaaccatcaaaaatgtctccaatcatagaagaggccagtaaagaatcacatagtaaacctcaaccagatttttcacctaaggggaattacacacgcacgtgcagccacttcgctcctactccctctgtcccacaatataagagattttgaatttttgtttgtaacgtttgatcactcgtcttattcaatttttttttacaaatataaaaaacgaaaagttgtgcttaaagtactgtagataataaagtaagtcacaaataaaataaataataatttcaaaatgtgtttgaataagacgagtggttaaacgttgcttgcaataactcaaaatcccttatattatgggacggagggagtatatacttatggatgacctatgggtttttttttcacaatcttacctatccctccaaaataaatagaaattcagtccacctcattttaaaccctgctttcaaattttgtaggctaaaacattgatccttttccccgtaaaaaaaatatattgaccccttaaccataaggctatactacgggccaatttgatagagttccaactcctatttaactataggagttgggtctaagttgaattttggagcatcctaagctcagggcctgttgtgtacagctctagctccatcactcctggagctggagctcagccaaatagttttagctccacctaaaatgggagcagagctgggtggagctttctcacaaaatgaactagagtgccacaactccacttcagacccaactcttgaagctaaatttagaatttggagctctactaaacaggccttcagctccatctctctagttcatttttgtgagagcgcatcatccgactccactcttattttagatggagctgaaactatttggttagtccgagctggagcaaaacataagccacagaagatccctcctacctctccaaaccaaaccaaaaataattctcgcccgctagcaagtgggccccacatctaatcatacatgatccatccgttcccctactcctattaaagaggagggggtaaagccctggctttcctcccccaacaactcggccaaattcaaagcaaagccgccattactgctcctcttccattccactggggacgtacgagctccgcgcatcccttccattccattactgaccttggctgctgcggctgcagtgcagagggggtttggtggtgcggttgatttgagcaataaattctctaggggggagggaggtatcggtcatggctgccgctgctgcaaggaggggctcatcgctgctctctcgctgcctgctgtccaggcccgccgccgccgcctcgcctgctgtcccctctgcgctccgcagggcaggtatattgattgattcatcatcccctggaccccttgttaattccaccgtacttttttttggttgtacagaatcttggttggtactagaagtaggtattcgtggccaagttcatgtgttctaggaaaaaaataaaaaaagttcatgtgttatttgtgtttcttggtgggtaaaattattttttccccaatgttgttggggggtgtcttggaattatttttcccacctttggttgatgccacaccgttgtagggcggcttctgtttgtctctttttgggtggtggtggggttttggatcttggagggattggccggacctgactgatctgaattccagggttggtgtgttgttgtcactagtgccactgtttaattattggttcatgacagggcttaattattgggtgcttaaaaacattatctcttgctgtatgggtgactgctctgatggcaagattcaatttggtactagaactcaaccatgtttgtatgaaaaaaaaatggtattgttgtagtagcttgtaatgattcttgaatttgctttttcacccagaaattcagcctctagagttgatcttttagatcaggttgtgtcctcatcttttgggaaaatatccttcattcaacgttgctgtcctccactactttctgtgtagtatacctatttgtcagctaatctggttgtagtgagaaatccctgccttatcttgacccggaaaatatggggtttctaggatttttggcgtcagatatgagtcatgagcatgagcggcagattggacctttcctcttttcttcggtgggctgtgatattttctttccttgacatgataggataccagtttttcttcagtccttatcagtgccatagaaaatcttaggtttttggttccaaaccgttcttgtttgctaatgtcaccatatatacagcgaaaccgatgtgaattgcctcgactatgaaatgacaagcagataccataaaaattcaaaacactattctttatctgaaattactgattagtactagtttactagttgccgggcagcacagtaacactcctggacattattgagtggtcattcagtcaaaaagaaagggacaagttgtaatcggctttcttatctgcgctacactgaggcacaattttaaactcttatttttcccatcatccttcaggccggtcaagatataaactagtttgtacctataagaaacatgaaataaatttagttccctagaattacagacagacggggtaaacacatgtaggacagtattggcgatgtattatacttttcagtcctgtgtgcttgtttttcaggttattttcctggggacaaatttatcacttacgcaaattttttcttgaaacgccagttttgaaaaataatgtttaagtatgtttaaatgctcctttcttccaccatgtgtggaggcatttgatctagggaccatatattatttttgtaccatttttgaggggcatttactgtcccattcagacttcattgaatacatgatcttaggaaatggatttactccgtaccactgctactactgtagtactcgtactattcctgactatgcattttctgcttgcagatgggacacaaggattgttgccgggaatccttcagaggttcagcactgcagcagtagcagaggagcccatatcacccccagtccaagtgaactacactcagctcctcattgatggaaaattcgttgattcagcatctggtacacttcttcagctcagcccttcctatgaaactatttcaactcaactagtagtaatgagattggattcataaggctagtttggtgggcttcagctgttctataggcattgaacaccacaaggcccatgaactgagaaaaatagattggttttaaatttctttttgtgacagtaagttgagctcataattcaaattgtgcattgcaatttcattaggcaaaactttcccaactctggaccctcgtaccggggagctgattgcccatgtggctgaaggcgatgcggaggatattaaccgtgcggttcatgcggcccgcaaggctttcgatgaagggccatggccaaagatgactgcctatgtaaacacttactgacacttctgttgctagctgctactgttgtattgttctgaagtcatgctcatagaagtacacaatttattttcttctacaggagagatcccggattctgttgcggtttgctgacttgattgagaagcacaacgatgaaattgctgcattggagacatgggacaacggcaagccgtatgcgcaagctgccaacattgaagtgccaatggtggcacggctgatgcggtactatgctggtgagtaagcttccttctgacatcaacagcaatgatcaacaaggtgcctatgcaggtggctaatattgttccactcgtgctgaaatgtttgcaggttgggctgacaagatccatgggcttgtcgtgccggctgacggcccacaccatgtacaggtgctgcacgagcccattggtgtcgcaggtcagatcatcccatggaactttccgcttctgatgtttgcgtggaaagttggccctgctttggcttgtggaaacactgttgtgctcaagacggctgagcaaactcctctgtctgctctatttgcttctaagctgttgcatgaggttggtgcagtgatcattttcgtaatttttgttcaatgagaggaatccatttttaattgctccatgctatttggacatttattatgattactgagaatggcctgttgttggcttgtgtagttttgggattgcaaaatattataattagttctaaagcaaccattttgcaaaatatggttactgagaattgcattttacagaatttcttgtcctgcagtctagtgatcaagaagcaactgcaagttcagatcttcccgaaaggaagggatagaaacaacccattctagtgtcaataatccttttaggtctaatatccaagacctagagtgaaatgattcaaatttcattgcatgatctgtttgtttagttctttgtcaatgcagccatcaattctggcttgcttcagtgcaaagaaagagtgcatttttgactaagtctgaccagctgaagcattctttatattttctagtctacagtgaacaatgttctatatcagctacacattattgaatcagaattgatcatcttaaatgattaaataggctggactcccagacggtgttgttaacgtggtatctggttttggacctactgctggtgctgctcttgctagtcacatggatgtcgataaggtaaacttgtggttttcttgtaattcctgtattttacagataatggccagaaaacagtgcaatatttagatttatagtattaaaatatttaaattcagttgcattctaagattttactttcactttcaatatagattgcattcactggatcgaccgatactggaaaagtcgtccttgagttggctgcaaggagcaaccttaagtcagtgacactggagctaggaggcaagtctcctttcatcatcatggatgatgctgatgttgaccatgctgttgagcttgcgcattttgcactgttctttaaccaggtaccacatgataaattatgtcaaagcaggcacaacaactttgttcattagtttgaaatctctaaatgatttttcttgacttaaaatttcaagggacaatgttgctgtgctgggtctcgtacatttgtgcatgagcgtatctatgatgagttcgtggagaaggccaaggctcgtgctctcaagcgtgtggttggtgatccattcaagaatggtgttgaacagggccctcaggtacatagtactgactagcacattcagccttcatactgcctgtccttcagttatccatcacatggccatgcattgatgtggtataatcatgcaggctttacattaattaccttcaatcgtattgtcaagtatccagtcatcataacacattcaggttttggactgatgataaccttgcaaattttgttttaatacttctagattgatgacgagcaattcaacaagatcttgcgctacatcaagtatggtgttgacagtggagccaaccttgtgactggtggcgacagattaggtgacaaaggttactacatccagccaacaattttctcggatgtacaggtaattaagcttaggataacgtcaaagaatgtcagcacagattgtccttctcctttgttgcctcatcttcttaacacttattgtatggtgattgcttcaggataacatgaggattgctcaagaagagatatttggccctgtgcagtccattctgaagttcaagtgagtaaacactccatttcacatgcatcctgtcccaaactcttagcagtaaccaaattaatcaagaactgaaccgaagactatatatattttttaagataaaggaagcttttattgatctcagacaattacatcaagttgatacaaccatactaagaacatttctggcctctacataactaggatgcacataactgacaaaaccataacgcaatttatgctatgtcgacagtgatctgaacgaggtcatcaagagggcaaatgcaagccagtacgggctggctgctggggtcttcaccaacaacctgaacacggccaacaccctgacccgcgcgctcagggtcgggaccgtgtgggtgaactgcttcgacgtcttcgacgccgcgatcccgttcggcggatacaagcagagcggcatcgggagggagaagggcatcgacagcctgaagaactacctgcaggtcaaggccgtcgtcacgccgatcaagaacgccgcgtggttgtaaacacatagatgtttggacatttcagaactggggaagaaataggtataatcttatggacggatgcgaaaatggcgataaattatggcgataagattatgatgatgatgatgaagaagaagaagaggaggaggaagaacagctgaaataagcttgtcctagcatggggctggcattgtctctaataaaccttgtggttggtgctcatgttactgatggagtatattgtagaagcagatttatgttcattatgaaatatatatcgcttgtttgggataattctaccgtttgtgctgctctcacaattttctcacaagctacttatgaagctacttttcagcgattggacattttttggtgcattcaaaacaagaaaaatcagtaaaacatgattaatctgaatcaagtattagttattataaaattaaaaattgatttatttgattattttaagaacttctctatatatagttttttatgaatcatattgtttagctattctaacagctaatacataatgagaaaatagatgtttccagaagcggtttagagtgctccctggttgttgaagaaagtaacgttgggtcatgaaagcggcggtaaggttgttcaccaaagttaatacagggcctgttcactttgttgccaaaaaaaacttaccaaattttgatattatttggcagtaaactagatgtagctattttttttttacaactttaccaaaatttggtaaggttaaaaatagcatcgaagtgaataggccatgtagcgaagcggcgtatatcgcctgtcgtcattgttcaaggtcacaactaaaaaagcactaaaaggtccgactgtgcttttgtatctcgaccatgagaacacgctgggtcaataaatagtaaaagtcttttgactggtcatggcacgtcatcaatgcacgattgattgctataaattcctctcaattacttcaagttcccgcagagagatcgctgtttacacgagggatgtctcctttctctcatccactttttatttaagggattagataaaaaacaatcggaaacttttaaatataactataatataattatattataatctctatataatttaggtataaagttgcatatattattttagtacttatattggctatgtatattcgattggatatttgggatgtagaggccaagtttattctattttttaaaaattattataatacttatacaatatagtgtagtgtggttatagcatagttatagtgaaattatattacaactatacattaggttagatttaaaaaaaatcactcaaaaaaccatatgacagtttttttaatgatatcttaatacttgtgtattcttggcacggcattcagcgccagctgacgtggcgttgaggtgtctaagttcagcgccatatgatttggcgttgagcagaagggtcagatttgaaataagttttggcagcggttcatttgtaaaaatagtttttgcaaagggtcaaattgtcaaaatttgtgcagatctgcgctggcgacggcgaggatggaaggcagtggggctcaacggcaccgtgggtggtgccgaggtgcggggtccgccgtgcgaaggccccggggctggtgctgctcctttgccggcgtcccgcagagccccggcctccgtcctatcccttcttccacctcgtcggccatggcgtcttccctggcactgggaggagtgggtggggtgcggccgggaggaagctgccgcccaattccccctcgatctcgtcgtttcacagctcgccgacctcgtcgaagctggccgggcttggcggcctcatcgacccccgctgcatcctctcccccgcccgcatctcgcccatcaatctcgacgactttgtgtccccgctcccgccgccgccggtgatgcccgcagcggagacagtggtggtcccggcggagacggcggcagtggtggcgccgttggtggtggtctcgaaggaggcggattcggcgggcgacgaggcgctggatctgaggcttttcctgcaggggagggatgggaggtgcgtggtgatggagctcgacttcggggtgctctgcgacaacatcaccttcttcgtcgccatggcgccgcacccgtcctccccgccgccgcctctgttgtgcgtcggcggccttcttccctcggacagatctgggagaggagagaggaggggatgggagggcaggggtggcgccgccacttccttcctctggcgtcgcccagtcgccgaacccggtcgtcgccgccggtcaccgccgccgtcaccggtgggggtgtcgagagggaggagaggaatgaggaagggatgtggagagaagaggagttgatttgaagagaagaagaggagagggtgtggagagaaggaaaaggtggtaggtgggtgattttaaatgtgaccgaatgttttttttgtgagagctgggttttcaacagcggttctgttttttttggccgccaggaaaaattcgaccgctagcaaagattatctattttcgctggtggcgcacctaagtgaccgaaagcaaaaatagacatattttcgctggcggtcgtattagacgggcggtgccctccaccccctcgttacgtatttgccagtggttatcacatttttcgaccagcaaaaattataagacaacgccatgaaaaatcatttttctattagtgctacttaaaaaatggactttcgcaagcagccagaacccatttttgtaggcagccagaacccgtgtttgtgaaaatcaacacctttccaaacgggtaggttgccgctccagttgccgccgccaatcttgttgtccccggtcaggtttggtggacctgtcactacagtgtgcaccggtgcgtggcgggatccgtccagtccgggcctaccgccaccagtccacggattgagtgagtctgtcgttccagtgggtgacagtggcaaatccgaccagtccaaggccgccgctgttgctcccaagcccacgcgagggagtcgttgctagatccaaccgccgtggacctgaggaagccgctgctgttgaccccatgcccgtgcgagggagcctcatctgattcggccaccgcgagcctcgacgaagctgccgccgccgcttcagttccgcatgaaggagccattgtcgccgccgccaccttgtccacctcttgaagtgctcgccagcgtggccgccttcactggtctgtgaaagtggaggagaggaggtggagtggggtgaggggaggagaggatgagggaggagaggggagatagagaggggagatgataagggttagatttttaagggagagtggagtgggcggctagctctttgggcttgtagcaggcggtccacttaacaagtccacttgcgaaaataggtttattttcacagacgagcctattaagaggcccatctgaaaattgatttttcatacaaatctttttttttcattgcggataatgttatacggtcagtctggagactaaaagggggcttgtccataaaaatcgattatgtaatagtgccgtgacactccctatactatatatcatgtttaaattttggtcgtaaatattaaatatgagagttttttcaatcgcaagatcaggaaggaatttattgttggcctctatgatcctatttggagaagtttctagctgctgcagctattttcagaaactgtaactgttcgaaacataatctagattatgagagaatctatggctatagaattcaaaaaataaattagaagttgggttttgcagcttctctagaccctcacagtctgactagcagctagctgtttctgaatctgagactagcaactaccagctaactgcatctcgtgatctttaagtttttcaaactagtcctatgtatttctcgtgttggttagacagttcacttattgttggtagctagtgatctggaacttatgtaagatggtaccatttttctcacgttggtttagacagtgcacttattgttgcgcatagtgggctggtgcttacgtaagatgagacttaggtggaggttggataagagacttaactttagtctctgacactaatttagagtattaaatatagactaattacataaatgaaagctaatttgtgagataaattttttaaacctaattaatctataattagataatgtttactgtagcatcacataggctaatcatgtattaattatgctcaatagattcgtcccgtgaattagtccaagattatggatgtgttttattaatagtctacgtttaatatttataattagtattcaaacatccgatgtggtagggacttaaaatttttagtcccatttaaataggtcttataaaaaaaaggatattctgaacttatatagcgagcgcgaatgcgaagacggacgcacacaaacgccccaaaccaaataaccaattcgcgagcctcttacggacgaacggtacggtgtagctagtgtcgtcggtagccgatcgatcgatggcagctgcttcgccggagctccgtcacgtggccatgctgccgttcatggcgaagggccacgccatgccgctcctccacctcacgcgcctcctccttgcccgcggcctcgcctccaaggtcaccttcttcaccaccccgcgcgacgcgcccttcatccgcgccagcctcgccggagccggagccgccgccgtcgtcgagctccccttccccaccgacgacggcctcaacgacggcgcggcgccgccgcagagcatggacgacgagctggcgtccccgtcccagctcgccgacgtggtcgccgcgtccgccgcgctccggccggcgttcgcggccgcgttcgcccggctcgagccgaggcccgacgtgctcgtccacgacggcttcctcccgtgggccgagctcgccgccgccgacgccggcggcgtgccgcggctcgtctcctacggcatgagcgccttcgccacgtacgtcgccggcgcggtcacggcacacaagccgcacgcgcgcgtcggctcgccgtccgagccgttcgaggtcgacggcttgcccgggctccggctcacccgagccgacctgaacccgcccatcgacgagccggagccgaccggcccgctttgggacctcgcgtgcgagaccaaggcaagcatggactccagcgagggcattatcgtcaattccttcgtggagctcgagccgctatgcttcgacggttggagccggatgtcccctgtgaagctatggccggtcggtcctctgtgtcttgcatccgaactgggccggaatatggaccgggatgtatcggattggctcgactcgcggctcgccatggaccgaccggtgctgtatgtcgcatttggttcacaggctgacctaagtcggactcaactagaggagatagcgctcgggttagatcagtctggtctagatttcttatgggtggtcaggtccaaatggtttgattcagaggaccatttcgagaataggtttggggacaaggggaaggtataccaaggtttcatcgatcaagtcggggttctaagccataagtctatcaaagggtttttcagccactgcgggtggaattcggtgttggagagcatctctatgggtgtgccaatacttgcattcccaatggcagctgagcagaaactgaatgcaaaatttgtggttgatatgctaagagttgggctcagggtttggccacagaaaagagaagatgacatggaaaatggattggttgcaagggaagaagtgcaggtgatggcaagggagttgatatttggagaggaaggaaaatgggcatctactagagtaagtgaactcgcagtgctttctaagaaggccatggagattggtgggtcatcgtataaaaaactagaggagatggtccatgagatcagtgagctaactcgtgataagagtatgtaactatggttatcggtgtttgctagtatttcggttttactaaatgtcacatttttcacttaatttcaatagactttttttcttgtgtgattgctttatcttctatacgcgtaatcatgccttatatctctcatatatacttttctatatatacaacaaattgtgttgatttatgatccaaatttatttgtacatgaataaaggtcagcttcggatgaaacgaagcgttgtgcacccgggtacggatcgttattcttttagggtttcaccttcatatatacttcttttaagccgtcgttcggcgttgtaacctcatcccggtacagtgaagatattttgctagctggcacccgtgggttttttctcctgctctgggagggttttccacgttaaatctcgtgtcttctatgattgatttattgtttttttattgtttcctaacaagttgaaaactgtgattgcaatgtaattgtaattacaaaataagttttgaaatttacaatttaattataatgcaaatgtagtaaatttacaatataaaaacgtttttatttttttaaaatatgatgttataaatataattactcgactactattttgtgaatttataaatttgtgctcgggcttaattttcacccataaaataaatggatattacatactccatctatcaaaaatgataatctaatactccctccgtatttttaatgtataacgccattgacttttcgaccaacatttgaccattcgttttaatcaaaatttttgtgtaaatatgaaaatatttatgtcatgcttaaaggacatttgatgacgaatcaagtcattataaaataaatgataattacataaattttttgaataagacgaatggtcaaatatgacaaaaaaaagtcaatggcgtcatgcatattggtagtatgtacgtagcctatataaattcatgttcatgtatatataagttgttttttttactccgacttttatggcggatgctacaccgaccgttctcttggctctgtgttcgaatcctgcgctgtgatgtcaccgttatcatacatacatgcatattctcttctttagcaaaggttgcgttcttgcagctttaaaagaaaatgctttaattaatcctttctccatattttaatgtatgacgccattaaatttttaaccaatgtttgaaaactcgtttaattccaattttgtagtgtcatataaacccacaacttttgtggataaacccactgttgatgattcgtcaagtcataaaaagattgattaagataacagtcattttcgacttaattataatatgagcggggcagtagtaacttactattcttgcatactaaatgtttgggtacgagatgcnagntctacctntnaccatg

SEQ ID NO: 17235 - DNA, 5005 bp, Oryza sativa
tattcgactctccaatttgagcctttccaccttgcaaaattctatctaaaattaagctccaccatgtttgtttacttttgatggagtggtttcttgggttttattagagtttttccttgttttgcgtgccagcatgtagttcccgtcgtttcgaaagtccgcggtcgccaggaaaaaagttcggaagatcaaagtgaagaatcaaggcaagtcacacaatcccattgagcatattgagcctattttataaatgttttaccgtttgcaaataagtatgcatgttttgctaattacatgggatccgggtattatctatctgctcgcttgtgccatgtttacttgatatttgtcctttgtcaaccgggggtaataaatcgactagctcatgttacttatgtaacctagctagaactatatgcttagccatgcttaattaccactagctcagttgatgggataattacagtattagacctttttagtatcagaatgagctgcgtgctcgagacacctggcaatgcttcatggtcgtaattatccaactaaaatgtgactgaatagtgggctgtgggtgcatggttttgctagtcgcacccatggcaattaaggaccggttcgcgggaaaccctagaagaatttatcgtgcttaccacaagccagcgtgggcaacggctgggcttgtagtgtagctttcctctagccgacgcatccaggcaagggtgggcgtgatggagcggggcgggccctgcgacggcctctgtcgcttccggattcacctaggcacgagaggggactgcccgttgcccgctgggaacgggggtgaaacctgaggtgtggtgtgcttggttagagggggttatgcgaagggtcctgtcacggcctctttccggtatgtcgtggtggcatgtcggcgcacggaaacgtgtcgtggggctgtgtcttgtgggtacagttgtacacctctgatcagagtaaaactattcgaatagccgtgcccgcggttaggggcggtcgaccagattcaccgtaattagtcctaccttaataaatcgacccaatgcactgtagtttaggtggattggttgggcctgttcaatgtggtgtagcgttgatcagtggagatttaatgttactttaattactcaacagttttacagttttgctcaataaaatgctttacaaccgcctttatgcaaatagccacaaaccgtccttgtgttccccttgcacgtctgcatcgttggtgtggcttgctgagtacggtggttgtactcagccttgctattattcccccttttcagaagtgtagtgcttctgagctgaagacgaagttagaagaccaaggctcagatcccaattgagttttgcctgtggagtggagctgaagccccgctaggatcgccttttccgctgctgctgcttttgtttcggtgtgaggactaagtgcctcttctgtaagtatttacgctttatttacgtttggaactttatattacttgtcgttttgtgtaccctggctggtcctggacagggatttaatatacaaaatagtctggaaatttgggctaaatttctggacgtgacaatgaacctggaggctgttttataggagttaatgtttgtagtgggtatcaactatataggaagaaatgatttgaggggcgtcgcgtgagggcgactggacaagtgtcaaagtataaatgaactgtccgttgatctttccttctcagcttaatcgtttaggttaaattggttaatatatgcatgcaactctgatcaggtggagctgggtttagcatgcttgccaaggtgggcgcttcaatcgccttaatttgttaaaacttgaatgtgtagctagtttgcaacttggatgtggatttaagtgccatttggacatataaccattcatggagtgtgtactgctatatatgttgttttgttcccttttgctagacctattgaattttgtggatcatgtttacatttagctgaaaaaggatggattgagggttattaagctagctagaaatagtttattaagctagctagttaagggttatcaaaccatcacaaaatacaaaatgcatggggaattttggtggtttggtcagtgtagtccacggacggaaccgacctacacaccaaaattttcaatgcattttgttttctataattctttgataattaaggacatttattaggtgtagggtttgaaatctagttacaagggaagaattgatagattggccgcagatttaatgtagttccgaggttatcaaaccatcacagaatacaaaatgcatggggaattttggtggataggccagtgtagtccatggacggaaccgacctagacaccaaaattctccatgcattttgttttctgtcataatttgatgattaaggaggctttgcagattatctaaacttgttgatttatatatcctttttgtctatgaataggtcaattgtatgaattgttgtttatatacatgatttatatacccttgctgctgctgccacaatgattgtgggctgttttattatctagacttgcttgaattgaatggatgaattgctgtttacatgaagttagtagtactgtctccttttttatctacacccctgctactgctgttattgtgggctacttgttaatacacctgttccttgttttatgttgttgctgcccctgtggagtatctttgcccctgcttctgctgcccaatgtgttccttgttaaatggccagtgatgaattgctcaataagaacagattatctacacttgttcatttttttgcccctacacttgttcacttgttccttattaaatggccagtgtagagtggttatatacctctacacttgttctttttttatgcataagaacagattttgtgcacttgctctttttttatgcataagaacagattttctgcacttgctcttttcttctggattgataagaggagtatatctagacatgttgttttagttaatttgcccctgctgttgctacccctgtggcatatatactcctcctgctgctgttttatgtcaatcatgcaaattctgtacccttgctgctgcttttttttaaatttgcatgattgattcagtggttatatacctctacacttgttctttttttatgcataagaacagattttgtgcacttgctctttttttatgcataagaacagattttctgcacttgttcatttttttatctacaataatatatgcatgatttatataccactgctgttgttgcccctgtacttcttgctgtctatgtgaatttccctctgctgttgctgtttatgtgaatttccaccctgctgttgctgtttatgagaatttccaccctgctgttgctgtttatgtgaatctccccctgctgttgctgcccctgtggcatatatacccctactgctgttatatggccctgctactgctcttattgctgctattatatggccatgctgttgctactgctctaatttcctgcacttgctcttttctttatggataagaacagatgaactacacttgttctattttatggataagaacagatgaactacacttgttttattttcttcatgcaaatgattgtaattgatgcatatttctcagcaaaactgaggccatatctttcatagtataccccatattacattggatctaatgctatttagtctaatggtacgaaatttataatctttttcgcgaaagttaaaccatgtcaacgcccggcgcaaacccgccctccccaacacctgcgaggatcaaggaagaagcaaacccagccacagaggcagttgccgaaggtcatcccgcgacaacggcggtccaacaacccgaaattcatggtaatttataggataaattttcaccacatgaccacataaattttagctagcaccccttagcaaatattgccttctgtttgtgctgcagaattgccgcatgaacaacatacgtcgatgtcgggcgggacaagtgcaagtaggtctagtagaaatccgcggtcacaaaatatatggccgaccacagtgcaagttataagagaggttgacgctagtggtaggcccacggcgcccaggattgtcattggaagatggtctaactgctgcgggatagcggcacgtgagaacttcgggatcctccataaagatatcgggaaggtcacagaagccgagaaagagcgagcttggacggcaatggagaaatggttcacatttccagccgaagcaaaggataggctcaagcggaaggcatttcaaaagatgggcaaagcttggaagaattggaagtcgaagctcttcaccgagtttgtcaacccgcccggcaatcatacgccgttcgatgaataccctcaaataaccgaagcggtgtgggaggaattctgctctctcaagaccacccaacagtttagggaatcaagcgaggcacatcgcgtactgcaacaacggaatgagcacccgcatcggctgggcaccgcagggtacatcggcaaggaggcaatatgggcccaagaagatgcagccgctgcagcagcgaatgtccctgccccgttttcagacatccctgaacaaagagctcgcaattgggcgcgggcaaggggtaaggtcaacccggacggctctgtcacatttgagaacaaaagtgatgccgtcgtctatcaggaactggtgagttcactacttaacctaactaatttccgttcgtataaagtacaagttcgtataaacgactatcttcttttctagttgtgcttggttgctgaacaagcttcacaaagcgaggttgagtccgcgccgaagaggcgcgaagatgacatcctcacaaaggcgctcggaaccaaagaacatcctggccgaactcggggaattggtagcgatgtgccctggaagcatggactccctcagtacagctcccaatataggaaacggaaagtctccaaggaagagagggacgctcgtttgaaggccgaactta

SEQ ID NO: 17236 - DNA, 10658 bp, Oryza sativa
acatgaatataccccgagtcacaatacctgctgtgcaaccaactcctcgtgtacaacacgacgcgagtccgtcacagcataggagtagttgtgcatccacagaggtgccggcccctggtctcccgatcgcaccactagctgcagtggaccacatcgaggtaattgttgttatccaatccatatctaataaaagacatttacacattccaatattaaattcaaactttcaccttatgcaaggcgcagcacagtgtgtcctactagcgagagtccacccaactttcgctcctgaagtcgctgagggcatggctttcaagccctcggttacagacaaggtccacggcgcagacctgctagctgggtatgccaaggtgtccatcgatacagtaaaggacacctggtcaggctatccgctgcccgtgcccccaaatgatgaaatcatgactttgggcgatgcgcgcaagacgttcatacaatggcccaaagaagacatagttgtgaagatgactcctcgtccaagtcgaccgacggagcttacacctcccaagtctaagctatcaattgaggctccccgtggaccggcattgtcagtacctcattctcccggtggagctgatatggacttggcagatatagctcaaagcttggctccaataaagaccacaagaaaggccgatagctccccaccacttgtcaagggccagaagcgtgaacgcggcaaggggaaggtcggggagttggcgccggagccaaaaaggggcaaggctgcgacgtcgatgccgatgagcaaatcggggaaggtcgtgagggcgccagcccaatttgagctaggcatgccattggtggaggacaatgtgttagctgtgatgggtattgcttgccgagagctacataagcaatacatggagctaagcaatgccaagcggaaaatgagggagtcatccatagttggacatcacgaccaccagccgttcctatcgtcgcctgcctatataactataggctttgatgacctcttcgaccttttcaggatccggaagttggacactggtcttctaaaatgctactccttgtaagtgcataccttctatacttgtgatatgactggactatatctcctaattaaattagttctaataagtaaatattttaaggttgtgttggatcgagagtcgtcgccatggtaatcaggttgggttccttgatccatccatggtgaatgaggttaatttacgacagagcttcactgaggtggttgactatgtcaaccggtgtttatgggcccatcaagacaaggagtacatcatgtgcgcacacaaccaagagtaagaagacaatacccttcgtgtatattgtttttgaagttaaggttcttagtactaacgctacataaccactgcgcaggcgacattggattctcctagtcatcgtacctaagtggagtagggttacctaccttaactccaataagtccaaagattatgatttcagtgaaatcaccaaggccttaaatatggcttgggacccatatgtggaaaagggtggtaggcacaaggagggcaagaatgaactttatcatgacaccaagtttgcatgcgcacaacagatcggagaccaatgtggtttccacgtgtgccacaacatgtcaacacttctaagagaggtgaaagatttcgaccctgaggttgttgctaatggcgaataagctcatttcaatatctacattgctattcaaaacgtgctaattaacctcttatttattaaacagaaaggtagagctggcttcaagatctcacccatcaacccccccgctatcagaggcgaagtgtgcgcctttattcttgcagaaataattaacaagaaaggacgttttcatgccaaatagactcatgaacttggctagataatttattgtgatgtaaaaaagatgtttttataatttctggcgatgtaaaaaattatgtttttatagagtgcaatgtaatttactttcatatgtgcaatatttatggtactttactaaattgtcatcacatttgatcaactacgatttatgttgtactattcatctgttttctcctttttttttcccttattgacaggttgtgcaggtcgatgacattatggctttaatccatttggtaagtatatatgcggttctatgagcaacgaccgaaattgtggctttcaaggggtgtgaatttgctgtgcaaaattgtggcatttgaactgcatatatgtgttgttggggatctgtgatgttatattgggggggtgatgtatctgtgatggatctgtgactggaatatatctgtgatgtttctgtttttcagagggcatggctagcaaatcctgaggctagccaatatttagcatttatttttttctggaattaactcattagtgacgggtcggaacaaaaatccgtcaaaggtaaccttacctgtgacggactagcaagtaaggcccgtcagaggtgacctacctgtgacgggcctttacttttggggccgtcacaggtagatcacctgtgacagcttctaactacggagaccacaacctctgacggcctttatttaaagggccgtcagagatgagtcacctgtgacgggtcctaactcgccctaggctagcggagaccaacacctctgacggccttctagtaacttgcccgtcagagatgggtgtcacctgtgacggccggccacccgtcaaaggtgactggactcaccagtgaccactgatcactgaccatgcgcgaagccgtcaaagatgagggtttgggcccgtcacaggtgaccttggccagtgtagtgtaaccagtttccataatttgcggcacaagcaacgatcaatttcctacttcctgcaagaagattgaagttgatgtgtttgcacttcacaacattcttttatccagtcatatccaatacatctatccccaccaattaactactccctccgtcccaaaatatttgatgccgttgacttttctagaaatgtttaaccgttcgtcttattcaaaaaaaattaagtaattattaatttttttctatcatatttgatttattgttaaatatacttttacacatttcacaaaagtttttaaataagacgaacgatcaaacatgtataaaaaagtcaacggtgtcaaacatttatatttagggaaggagggagtattttcctatcctcagttagccacgttaccttttattttcatccattggatcgaggtgcttaacacagcagattgcttattttaggacttactttctttactagcaatatacccgtgctaacgctacggagccattatatttttgaaaaaaaaactatgaaaaattggagaaatggacatttggccacgttcaaaaagtggtttcgctgaaataccatcccgaaaacacgctttgttaaaatgccaatatggaacgcgcgctcaccgccactttgccattttggcagttttgtgtattttcaaaaccatttttgttggaacatccggtgatgagacagaaatgccctcaccggcgtcttcgacagagctgaaggacctcaggtacttgtacggccccggcgagagccccttgtcgtcggtgacgacctgccacctagcgtccacgaccgcccagcaccaccgcatccacaccctgtacgccttgacaccggccgacggcaagcagcgccgccttgacaccagccgccctcccgccgctcgtcgtcgcctcctccaggctcctcctcttcctccgcgaagtccacctccatccccatagccatggccttcggcagcggcggcagcagaagcgcacaggtgagggacatggcggacgggccaaggaggactacgttacagccatggaggctgtcgtcgcggcgaccccctcgacgcggcccatgcgagcgtcggcctcgtcgcggagccggcgtcgaccacgtgggcgggcgcgtggctccagcgcctccctcagctgtgccgccagctcgccggcgctccggccgtgcccccaccctcctcctccctgtggctgcacctgcgccccacgttctgctgtcgacctacaaaaagagcgcgtagcaactccttcaccgcccacctcgccccccatgcggccacggaaggtattggacgctgatggccgcagagaatgcagcagtggcagcaatggcgggcatactttctcaggggactgaaggtgctggacgctgacggtgtcgaagctggaggtctggacgtgtcccatgatgtgactcgtccatagatggtggtggttggcaatgaagaaatccagaacaacaagaacgggatgagcaatgacatggtcctgatagagggagaaacgacaacgacgagctctggtggtgaacatgaccggatgagtgcatcaaaacacattcctggacgagaggattcgttttccttgaactcgcggaaagaacaaaagatggagaaaaaacgactaatattgttcatcatcttccctagccaacacaagaaacagaataggagggaagatgggcgatggtgctctagtgaccacggcggtgagtaaggtggccggacgtgtcccacgatgtaactcgtccatagatggtggcggttggcaacaaagagaacaagaacaatgggaacgggccggcaacaatatggtcccgatagagagagaaacgggaaaggcgagctcttgtactaaacacggccatgtgagtacgtcaaaacgtgttcccagacgaggagattccgcttttcttgaatgcgcaagagggagggaacgcaggggagaggagggatgccaaggagaagatgtcacgggagaggaagaggacgtgcggtgagggagagatgtggggtgctgtgagggaggagggaggcaggagaggagggccgtcaggagaagaggggctgcgggtagggggagcgtgtggagatcagggcaccggtagggggagagaggcggaagcggagaggggaggcgaagggggaggggggtgacggacgaaaggggtggcgaaagccttacgtattttttaattagttatagatttgattgacatatgggcctctcatattttgttttaatcttttttagttttcaattttgctcttttattttttttatcaaactgccacttaagcgccacgttagtaccatatgggacgaaacctagtcaaaggagccacgtagatatcacatcagcaaaatctggaaacaatattgctaagggaccttgtttgcagtggttttttagatgcactgtatctggttttatggttgttaagggatacaaaatgaacctattccacatctcacggtcgacacacagtattcaacccctgtacatcccaactggacatatatgcccatagcagcccagcccaaattcccaaatgcacacgaccctgttgtctcgccaattgttgttggctggcccccaaaagttgaggaccaccgatcctagagcatgttttagaagataaataagaagagagaagagcagcggcctatagatttatagcaagttgtagtacggactccaagacgcagtgtgtgtatgacaggtgggaccaggtattaatagtatagtatataactattatatgaataagctattagattggttatagttgaattggaggtagtagttggctatactattaaacttgctcttaaacttgctcttagtgtgctgtcatgctgtgcataactagcgatgctccaacaacacccacgctaattgacactcaccacagtccacaggatgtctcgccgccgtctgcagctgctgcttcctctcgccgccgtcgtgctcgtccacgccgccgccgccggctgccgagcgttccagatcgaggaggccaccgtcgacgacatccagctcggcttcaggaacggcagcctcacctccaggcggctcgtcctcttctacctcgaccgcatcgcgcgcctcaacccgctcctccacgccgtcatcgaggtcaaccccgacgcgctcgcgcaggcggcgcgcgccgacgccgagcgccggccgccgtcgtcccgccgcggtggcccgctccgtacggcgtccccgtcttgctcaaggacaacatcgcgacgcgcgaccggctcaacacgacggccgggtcgctggcgctgctgggctccgtcgccaggcgggacgccggcgtggtgcggcggctccggcgtgccggcgcggtggtgctcggcaaggccaacctcgacgagtgggccaacttccgcaccatccaaggcaccggcggctggagcgcgcgtggtggccagggccgggtaagctcgtcggtcttggtttcttccatcacaaagtcaacgttcaactttggagcaatgagcttgtatattctatgccaatttgttgcagacttattttttcttagtaaatttcttaaacccccacctattatggtccaaattatataaaactacacggattttggtacatggcacataacgctaagtattatggtagtaaagtttcataaaaactaccctgcagtggcgtatagctagctaggtggcactgtggtccatgtaccacctaaaaatttgatcgatattaaaactataatatatgtgctagtcaacataataaaaattatatagtgcaccacccatttaattgacctattacatatagatggaccacctttactttaaatcctagctacgccactgacacactgttagctattttgacatactccgatattaaaattttgaaaagcgaatgtcgcatttatagatggataaaatcctcgtaggtttgagatgcagctgtagaactcaaaagtgtgatatattaaagtcaaaatgatcagtagtgtgattttagaaaactttagaaccataatatctaagattatgtgtcacatgaccaaatcgccttggttttatataatttggactataatatgtagagttttatgaaatttactcttagaaaaataaccattgatgccattggctgattactacattagtgtcaaaatgaccatagctgtaaatttttctttagcttatcaaaacatagcttactctaaaacatgagttatttgacatatccttagggcatcacccatgtatattgcctaagttggtaataaggtgggcccctttaacagtaggtaatagttgtttcaattgtcacaatgtatactagtaggagatggtagtaaggtgggccacattgcaacaaaaaaaatattgtgagaatgagagagatggctggtggaatggagagaagagagattgtaatatttgtttaatcatacaaccgggtagtagtgctactaccgaatattactactacccaccttgatacctatctccacaatgttgaaccaggtaatagggcctcctactacccactttttaccacattgtggatgccgtaagaaacttatcacttattaccttggtattttgcggacaagaaagcaaatttttgtcgctgcaaaacaattcaaaattcgagctcttatgccagtacattactaaatatttggcatgcatatgcagaatccatatgttctatcagcggctcagtgcggttcaagcacaggatcagccattgcagctgcagccaacatggcggcagcaacacttgggactgagactgatggatccatactctgcccatcatcgttgaattcagtggttgggatcaaaccaaccgttggattgacaagccgggctggtgttgttcctatctcccctaggcaagacactatcgggtaatctagacatactccttcgttgccaaatacttgtcgccagatattattcatatttaaaattggatcgtttatcttttttacgaaaattttatcaaatatctaaattaagatactacgttagtaaagtgcgttacatctttcatttaaatattattagtgatcaaaattgcaactgtggtggtcaacggtgacaactatggagatgtatatacataccaatggacgtgttgatttaatttttactgtcacaaactcacaatccagttgtgttcttgtgtatgcacgagatccaaagtactctattttaatttcttataatgtaccaattggacaattgacttggtaaactcaatcctatcaagtcaatgtcaaagctattagacgaaaattttcaaatagcatatctgatgttcacccttaaaaggtactttgactaacttgagaaatgccatcagacatgagcttggtttgaaaattgccatcccaaatatcttgtatagaaaaatgtcatttgacatgttcaaaaatatgaaaaatatattgacatggaatttagatcaagctgtcaatttttttccatcgtgaggtccattaacatcaaactagttagaaaatgtagtaaatgatagttttgcccttctttctttcccaacatagggaaaattcgaaattattttgctctagaataatctagttttatggctttgctataaaccactctagttttgtgtttctttatcaaaagacattccaaccattattttattatatcctcttccactagagagataaaactttacaaaaatgattttaaaattggacaagcttgcaagattaaaatttaaacacatttgatgaatttgaacatattttacaaaatttcaaacttgttgcaaataacggaaataaaaaaaacttgtagcgaataatggtaataaaaaaaattcagagatggacattcagatatttactacaagaaaaattgttttttatatgtactatttgatttagggtctaaaatttgatttatttgcctgatattatgaaactattttctagttgcctgatattattttcctaaataaaattcagaggtggactttcaaatatttactacaagccaaaaaaatgtttttatatatctactatatgatttagagcctagagttaattttatttgcttgatagaggattgctatggttggaaaagtttaagaaaacgaaaaaagggcatgggcaatatatcattttataatctttggatggaaaatgtgatggcaatgaaaagtggattattccttgtttgccacttgcaaattcatcactggcaaattcgcaagatcccttatttgcccatgagaatgagagcgcgcggtataactagttatgtatttaatggcataaaggatcttcgtgatggtattgcctattctgttgtggtggcaatgaacaaattaagtccatatacttcacttgttttgttggcaccaggggtcaaatgtatacccatgatttaacttggataatgacatggctttataagacaaggttttttctctttgtatatcttgctattattaatcttcaaattgtttatggtcatttagatcattttaccagttaacaaataattaatatcactgacctctgtttacaacctaactgcattcatcacgacagagtccttgtatgaagaaaagaatagtttggaagctggatgctctcaattttgaaaattgaaaaattaaaaaaataacaagaatataaatttaatagcattaaatagttataggaaaactgaatctactgctctaaaatatgttaatcagacacaacaaatcgatggaaaatgatcatactgtaaaatcatcaaattcctagtatgaatcttatcattttaaaatgcaggccaatttgtcggacagtagcagatgcagtccaagtactagatgctattgtcagttatgacagccgtgatgcgaaagccacaagggcagcatccaagtatatcccacctggtggatatgtgcagtttttgaaacctgatggattaaaaggcaagagaataggcatcccaaatggatttttcaacttcccaagtgggacagtgcagcagattgtttaccagcaacttctcgacacagtgaggtatgtatttaccagaattttcacgaaattatatacattggtataggatataagaaaaattgagatttcaatttgcgtttcacagaaataaaaattactcatctggtttaaaaattaatgatgtaagaccctacaattatatgaaacggagattctatatgtgaatcttggttgaacatcgacttgtggcggcagcagcaagagatgagaaaacagataattgggaatgagaattgtagattgaatctccttgctttattcatccgaatgcagcctctaaataggcttacaattggtaggcggtgactagggatcggtcgcccgattcaaatctctaaaaatcaggcgttgacgtcagcatgacgtcagcgtcacacatatgtgtaaaaccactttaaactaatttttctcttaaattatttatcccgattgcaccattaaattcgttgcaattaaatctttaaaacaagatcacacatggatatattccgacgaaaaaatagcttattattgatttttttaaaaaatattgcacgatgttccaccaggtatatcggaattgtttcattaagtagatcgaaaatgttttagtcgttaaaatcgggtgttgtttcaccttatataaaaacaatgtttcagcaaatagcgaaagaatgtttcagttcactgcaacattagatccatacatagtgaaacactataagtacgctaggtgaaacatttttttgtggaacaaaaaatgaaacgaatt

SEQ ID NO: 17237 - DNA, 14402 bp, Oryza sativa
  unsure (1)..(14402): unsure at all n locations
cagttctatgcaacactagatctatacatagtgaaacattgtgactgcattagataaaatattttttgtcgaaaaaaaataaaccaaattcccttaatagatggtttccaaaatatgtgggtaatttgttgtaatagagttgtgtgtggacacgtggcgggccagggggagcgcgtgcgtgcatgggggcgggggagcgcccgatttctgctccccgcccgatcgtccgacgggaatcattttcccaattggtaaccaaattgctaagaaatagctaaaaaactgataaggaaaacagctaacaaactttatctaatttgcaagcggatagaactgttggcgtccggcacggccgatcagacacgacgtgctgcgctccctgcggccgcatcctgctgagccggcgtgcctctgcgacgatatgttatcccgaccatgacaattatttggaaacaaattgaaacatctagctttttattgtcatttaaagcaggtgtaattttgtgaaatttaatctaatgtttattggactttttggagcatcggtattctaaattatagcagatatgaaccagtttaggtaatatgccttgcactttacgtgtggcaatatggaaaagccaatgtccttgatatctgacatttacatcctttttttgaaggaaacaaggggcagttgtgattgagaacctggacatagcaaacctgactgttatacaagatgtccttaacaatgggcagcagattgtgttaccagcagagttcaagtcaagccttaacacttatctgtcagacttatcctactcccctgttcgttcacttgcggaaataattgctttcaacgatgcacatcctattgaggtctgctctagttcataaccttttttttctgtgtgtattctttcgcagttccacagttttacatgccttcatattacgagaaaaggttatattgtatatttttcttcaaatctgaagaaaccatccgttatttgttatcagatgatacacagaatctagtacttgttgaagttgatcctttcatcaaaacatacgtaaaaccatttatatattctttccatcagcacaaaaggtactgttagattttgttaggagaaatatttaagacgacatatgattagaaaattttctgttctgaagaggcactataaaatgtttctaaaatgacaaacaaaaaaaaacatagacttcaaacattctaaagtgcgtagctgatactccctccgttttatatttataaatcacttcgatttttttctagtcaaattttactccctccgggctgataatattagtcgttttagacaaggataaagtcaaactttaaaatctttgactacaaataatttttaaaatatttatcttaaaaatataaaaaccatatgtgtagattagtcttaaaaagtacttcaataaaatcatatatttgttgatatttctatatatattataatagaaaatagttgttaaagttaatttttggagaccgtgcccttgtctaaaacgacaagtattatcaacccggagggagtattaagtttgaccaaatttatagacaaatttaattagcaatatttaaaacaccaaattagtttcattacatctagcattgaatatattttgataatatatttgttttgggtttgtcaaagttaaaaaagtttgattaagaaaaaagtcaaaaacgacttaattataatatgagcggggcagtagttacttactattcttgcatactaaactttttgtgcatcacggtatatttatgttgttgcaggttatgaagtcaatattacttttattactatagttgattgcatttcatcttctttttttcaagattatgaatcttggtatgtaaactaaccagcttaaaatttcgaaaatgttaaaacagatcgctaaatcatattgccaaatatgtgtgtataacaggagagactaaaggattttgggcagctcatcttcctggtagctgagaacactactggcatcggcgcactcgagagagccataatccatcaactaaacaagctttcagctgacggactggagaagctaatgaaggatgagcagctggatgcaattatcacgcccaatgactcagtttccaccgttctcgccattggcggcatgccggcaatcaccgtaccagctggatacggtaagaggggagtccccttcggaatttgctttggtggattgaagggctatgagccgaggctaattgagatggcttatgcatttgagcaagctaccaaggtcagaaaagcccctaagttcttgcgtggaacattttagcaagatggcagacacgtctttaactagtaaagccaataattcactgggctgatcgtttatccactgctggggaacccatctttagtcccggtttataccttttttcgtataatccgggactaaatatatccatttttaataccggttggtaattaacaccaaccgttactaaagatgccacggtaacaccaaccagtagtaaagatggtagcatctgccatgtggcatcaggtggtaccatctgtagtaccgtggcatcatggcttggtatcagaaaggtccctaagtaattcttgcatggaacattttagcaagatgatagacatgtttttaactagtaaagcaaaataattcagtgagctgatcgtttatcgcaactactattattgagcttgggaatgcaatttaaaacattggtgagtgggctggggaacattttagcaagatgatagacatgtttttaattaactagtaaatgtaccatcgccgaccgatcgaggagaggcggctactgccttcgtgtcacctcgaagaggacggccgctgccgtcgcatccccggggagaggccggccggcttgacttagagaggtgacgaggtgaggatgcattgccgttgcatagccgaaaagatggaggagataaggttagaaagagacaaaggcagaggtattttggtctgggaaaaaaaattgagcaaaagcatttctatcaacaaaaagaacgaaaatggtattttgatgaacgcatctcagtttaggatggtattatagcgaaccaatttgaagcgatggtatttcagcgaaaccattcttttgtgatggtaatttctcgttcgcgtgggtgggtttggctttgtgttggtgggggtaccgggatagggttagaccgcgcgtgtcggaatatcaggaattcttttagttatctcaaaatcatcaaaatataggatacgtacgggatacgtatcggagcgtatccgataggtattcgtattcatcgccatatcagatacggatacgttaaatgtgagacgtatccaggtaatatatgtagggactaccaatatcatacacaggcgagtgctcattcgatcactactactgaaaaacacttctgtacaggttaggaactaaccatatgtgtcatatatcccagccggcactcagcatgcagcacccatgacctaggtcatcggtgtcaattattcaacactaactataatacatatatatatatgccggttttagtaaaaatcgacacctatatggaattataggtgctggttcttaaagcaattgtcatgtggctgccttatggcactggttctttagaacaaccagcacctatatgtaccatatagttaccaattgttcaccggcaaggacacatggtaagactatagatgtcggtttgtaataaaaaccgacatcaatatgccggtttgtagcaaacggttcaattcaataagcaagagtgaaacggagtgagaaataatgaaaactattcttgtagaaatcaacatccaacaacaccaacaaattaaaagtaaaaccttccctcctttagctagtccaaaaaatacaagaggtgtatactaagctgttcttttcttgatcagctcaagagaaacactacaaggattatgttgatacatgacattatccgtttgtcatagacgccctaagaaacgtcacaggtaactatccgtgagagtccagaaatacatcatagaatccccgtcataaaccttcttcatggaaaaaaactgtcacggatgcgctggatcggtgacgactgtgaccgtcatggaatagctattcgtttggttttcaggcagcatcagtgatgaaacggaccgtcatggacgttgtgccacatcagcacagctatctcagcatggtgaggtggaatctgacatggctgcatctggcacatcagcttggtgacgtggctataactgacacgtcagcttggtgacgtggctcaccattccatgacagcattttttttcgaaattttttttattagggtaccgaaatgtaggatgggctgggccgacataatgggctgggccgagatattttctgcgcggcccattttcgtttcaaattgtcctccaatttctttttatattgggtaattagccaactttattttaaatttggctcagcccatttcctcggcatattgggccggcccagataataccagcagcccaagaactcattctggaccaaataccaccacagattcaaatacatccacagattcaaatctccaaaatagtacatcacatcatagaagcatcagcacggtatgcttacatgtttactgaaatcactgtatcataccaaaagcaagcaccctaaacaggttcaagttcaccatagaatgagtctactgcacataatgtgctccaccagaaaagcatcactacaggagtgtacttcacaagttcaacaaaatgcagccatccaaagcaaccataccacacagcattaaattcttgcctgactcgatggaatcatggccatcaaacgcctaagtagagtatcagtttcggcttgcctctgcttcatctcctcatcattcttggccctttcttcttctgctgcctgcattttcttcaccatctcatccagctgttggcgctgaatgttcactagctccctaagatctgctgatgtctgcttctcctccaccagtgcggcttgtagctcgcggcgacttccagcactggaatcgacaggtaagctgttgatccccacattcacaagaaatttgttcttcttagttttgccagcaagcacttcagaaacagcatcattcactgacttcggttcacagccatcctcaacaggttctgcgatcttcatctccatttcagcctagcagtgcaagcgacaatacatggctaactgatcaatgcataccaatttaatctatcatttgtttgtgaactaattgacaatttacttacaatagctgattgtacagcaggagcgaaggctttcttcttgctgcagtggagctctttaaacaaatcaagcccatttggtggtgcatctttgtacttgtccccctaaacaatgaaagaaaaccaaaaatttgagcttgttacttcttcaatgtattttgaacagtgattacaaatctgtaatatctctaatattaattaacacttcatgcatcaactatctatacaagaggataacaaatcaatatgtattaaacaaacattaactaaattggactcaccaattcgatgatgtgcatgtcatagctgcgagaaccagttgtctggtggaactgcactttagctctgtttgctttgttcttttcacaaatcaactgcagcaacaaagttatgatcttaaggcacctatgagatccacatggtaaacttgaaatgaaaattattgccaagagcttaccatttttttttcatccttccagtgttcaacaagttgaagccactgaagatcactcatgcatgttacaggagatgttttcaacaccagatgaagtggataaggatcaaaatacttctttttgagcttatgtcgctgctggcaaacagctctcttcatcattgccacacatgcctttctcacaggaccagcagttgtgtccatatcaaactttgactgaaaacaggtaatgtcatagtcaattgctagataacgaatctaaaacagatattaggcagcgtatggtagttcaaatttgtgcattcaattaatgcttcagagaagagtaatgccttcaagcaagaccatccaaaaatgaaaataacatactcactaaattcaataacagatgcacaatgtaccctaattctcactcattcagagacacacacattcaaagacacatgaacttcagagaaattgcaagtacttgttagagatggtatgtaatgttatgttcacaaataaacatagtggaaagcctaaagttcagacactcaccccaactttgttgatgtaaaaccttaagagtttcttgttgtccttgtaatccttccattttgggaatatgggaacatggttcctgactgcaatgttgcactcggtggcaaattttgcagcaattttcacagagtttggcctcattttacctggttcaatgaccacaggaagtttgcccttctttgagcgggacatcctttcaagacctcttcctacattaggaccccttatccacctctcctcatatgcttctgcatctgcaaaggatacaattaacaacacttgtgtgggctgttgaatttagaaagggtttagagtgtcgggatttggagaagataccttcagaatcaccctctgcgttttcattgacgttggtgtcatcaagagtatgctcatcaaggtggggggtagtgtccatctggcaatcatcgttccatccaacaccttgaataatgaaaacagagtttgtgatagctatcaagatatggcatttgctgtgaatttaaatactaattactgttatcaaaaacttgttaaagtagcttgcacaaaccttcttcagtatgagcagcattaacctcgcttaaagcctgaattgggatttcagcttgagtgtcagcagcgagaacctcacttgtagcctgaattgggatctcagcttgagtatcagcaacaagaacctcacgtgtagcaagaacatctggtgccacatgctttttagacctcgtcactttaccaggttgcaatggtgcaacaactcttttgccccctatggcgtgatgagtcacagaggttacattctcagtattcttcttggatttcttggtagcaggctgcaataaatgaaataaatgaatatgtaaagtaatctagaactagtgaattattgacaaaggttgtaaaacattattgaatggagagatctagtaccttatgtttcaagcaatcatgtccagacttcatgttctgtaggtcttcagtctcaggtactaggctatcattactaacatagccctcactgagatcatcatcttcagcattggcatcaaagtcagggtcatcattgtccttattcttttctctatctcgctgggcaactgaatttccaaacacaatactggataatgctggtacccctagccgtcgcatcatagcattgttctgaagacacgttctcatccttttcagttcatagtcattaagtggggtttctgcattaacaagaacaattatagcctaatatttgcataaaccaaaaatctaacgagggctatattccctagccactgtcgctagcaaatcctagcacatgagggcaactcagatagctagtacagaggaaggcagagaaagtattcacctgtaatcttgggtgctgaccggggcctctttgcttgccctttcttcttcggcgccattagggtggtgttgcggtcgatgtccactgcggtggtgcagcgtcgttgggctttcggcggcatatggatcgcgtcctacgaaccggcggcggtggagattggacgcacatagggtttggggtgaacaatgtggtgtatttataccaaccaatgagtgcatgcgaaattacctacaagtcctcctatttagaagagtctaggtcatggcaagcgagggtataagagtcttttgcagcttcgaatacattttggaggtgcgcggagcgcgcgcaccaagcgaaattttgccgccgaaatggagttgggttgattggagttcaggcccagttaaggatataatgtttttaatttttctttcagtagcataaatacatttcatttaaaaatataaattataataaatatgctgattatgaaaaattcatcatcacaaaagttgtttgaattattgagatctagaacttttgtattggtcctttctccataggagttcgtttcatattgtgaaatttgaaatcaacaatatgagaagttccaaaattatttggggaccagaactgatttgaaatgaagaaatcataaaaaacaaagttgtagaactcttgggtgtgtactacttttgttttcatcatttttccaatttacattgtttgaacaactcaaaatttgaatttcaaaattttagaacttcgaatacaaaattgagacactaaatgacttcaaatgaaaaagtcaagaaaaccaaagttgaataactcatcaaaatctacaacttttattttggtcatttcgttatccgagaaactaatatgaacattattcacaaatttttcatctctctcatagttctatgaaacactatgagaggtttgtaaatttgtgaacaatattataatcacttgatcggatgaaaaaatgaccaaaataaaagttgtagatcttgatgagttattcaattttgttattcttgactttttcaattggagtcatttattgttttaaaatgatatttgaagttgacattttttggaaattcaaatgttgtattgataaaacaaagtcccatgaaaagatgaacaaaataatagcttcaagaacacagttaattgatagaacacgattttataaaattttagggaaaaaacatcaaatttgaagcaaatcgtgaatagcgttgttgttgaattgtgcaagtgaacagctactatgtatgttagtcagctaatgtatgtgtgtttctgtgtggttgtatgattcctgaaattgaattgaaatgaaatgtgctctgctcaaccagttcactacttgtgttatgtactgtaaaatcaattcacaggttaaatgacatgataaattcatcgaaaaaaatgacatgataaattaaatttctcagaactgagctaagctgagcatgtatgccatctttcacatgttgacaagcacatagacagttcaatggtagaagtatataggcatgatggcctttcacatgctgacagaatatataattcacacaatttggacaggatgtcacaaaagatctcagctcacaaagacaatacttgtcgcactgacttaagttgacaaacataagttcataaaatgccaataggggcatcacatacacatgtcacaacaggaactactcatcatcgctatctacctcaactggggcaacttcaccttcactccaatattccacagccgtgtcgtcctctatctcatcaccagacgattcaccatcttcagcaggtcgattttgcttcataagtcgagcaacttcagaagcatcaacaacctggcgagcttcatcatctcggttcaaaggcaggtcagataaattctcatctacctctggtcttctcccatcttcctcaatgcactgtgtctgttgatacggagatgcactaggtgcattttgttcatcaacattgtataaatgccgatgcttaaacatttggacaagctgccaattttcgccatgcttattatctggcaggtagaaaatctgtttagcttgagtcgctagtatgaaacaatctttcttgtaccaaaagcttccagtattgacgcttctaaaaaaaccatcatcttttagtgcagtcttcttgccatctagcttgtaccattcacatctaaaaagaaccaccgttcttgtattcccatcatccttgctgttgtactgcaactcaataatatctgtcaactttccaaagtaatcaattacccgaccattatgtattccagcacacgccactccagagttttgagtcttcttatttatgtcacgctcagcagtacagaaccggacaccattgacaacacatgaagagtaagatcttactctcaggtcagggccacatgctaaggcaaacaggtcatcatctacaatatctgaattgttcaacctccacatctgcaaaagggattgcggattagcaaatcattaatcaaaacacaacgtatatcgaaaacaaaatgtgaggcaactaacatggttcctgaaccaagtagcaaatccaagcctagtccttctatcaatatcagctgcttgcacccctgcttcctgtaattcgccttgaaacattctgtgaacaaacagatttcagcaattaaatcaaaatgcaaatgtgcaagagtacaagatagagaggttagaacatactttatataatcctgggcctgatcgcaattatataggatataccaaaccatttgatcaaaatcttcagagtaaccatagtcacatgcaccaatcagattaacaccgtgcccaaaaacatcaatattgaaggccgatggatctgagaatcctggatttctcggtgctcggttaaacctagtctccacatcctccatatacctagagcagaatgtgagggcttcatctgcaacataagcctcagcaatcgagccttccggtcgtgccttattcctaaccgacctcttcaaagtgtacaatcgtcgctcaacaggatacatccacccaaattgcactggccctcgaagcattgcctcgtcaggcaaatggacagcaaggtgaaccattacatcaaaaaaagcgggtggaaatagtttttcaagcttgcatagtatagctggtatttctgtcttcattcgaaccaagatatctttgttgagtgtttggctgcacaattccctaaaaaatttcccaagctcggcaatcactaaacatatatcatcatccaaaatacctctcataccagcaggtaatatcctttgcaacagaatgtggcagtcatgagttttaagcccatgcaagctggttccctctgcagttatgcatctttcgatatttgcagcatagctatctgggaactttgtttctttcaaaaatttacagaatttaatctttttttccctagacaatgtgtatctagcttcaggcatgtgataatcatctccatttggctgcaactgcaattctggtttaatattcaaatcagcaagatcaagccttgcattaacattgtcttttgacttcccatgtatgccaagaagggtaccaaggaggttttcacaaatattcttttcaatgtgcatcacatctagattgtgtctaagcttcaaagatggccaatatggtaaatcccacaaactaaccctcctaccccaaattggcacatgtccctctgaacgcttccttttttgacctggtctaacatcatttaccttggccaattcttctaacagctcttcagttgtgaatgtacctggcttctctttgctttcatgtagagaggcatattcattattcgtgcgcagacgatgacgcctaggaaggaaccgacagtgaccaatataacaaagcttgttccttatggaatatgatagaggatttttgtcacaatggagacaagcaaagaaaccttgtgtggtccgaccagacaaagtactaagtgctggatagtcatgaatgcaccacaacacggcagcacgaagcttgaaatcttttcctgtcagagcatcaactgtatcaacaccagaccaaagactaagtaactcctctataagaggctggagaaaaacatcaaagtgcttcttcccaggcgatctaggaccaggaatcaacaaagccatcatgaagtttgattcttgcatacatgaccaaggtggaaagttgtatggaatcacaaaaataggccacatactataagatgatctcatattgccaaacggattgaaaccgtctgtagccaggccaagcctaaggttccttgcatcttcagcaaaatctggccagcatttgtcaaaatctttccatgcctctccatctgcaggatgggacatttccttctctttgggttccctattcaacttatgccattgtgcttcctctgctgttttcttggtagcaaatattcgttgaagcctaggtatcaacggaaaatgccgcaatactttttctggaaccttcttattcacaggatctttccatcttgatgcttgacaaactggacaagtatcaagttctgcatactcctttctaaatagcacgcaattgtttgggcaaacatgtattgacacataacccagtcctaaagtacgcagcattttctttgcttcttcatatgaattgggaagacaattgttctctgggaacgctttgcgcaagactttcaactgtgcagaaaatgctgagttgctgatcctgtagtatgacttcaaatggagcatcttgactacaaatgaaaaccttgaaaattgagtgcaaccaggatatagctcatgctttgcctcttccatcagagttttgaaaacagactcatggttactagatgggttgccatctccatttgctgcattattacaaggtacttgagcccccatgaggtctgttaagatatcttcaactctatctgcagcattgttttcatgttctataggattagaatgtggatccacatctactggttcctccaaaacatgaacatcattggcctctccatgatgaatccatcttgtatatgtactagacatcccattgagcaatatgtgcctctccacatctctttgagccatggatttctggttaatacaccgactacatggacacaaaattgcagcatccccaggaaatcgctcttcaacaaatttcatgaaatttcgaacaccatcaatataatctggtgtgaaaagtgcaccatgtatccatcgtctatccatctagtacagaaaattcaggcaccagattgacatcacattcatggctaaactccctatcataccctctaatcgaagtggatatcgaaatacataccaggccaatcagtggagctcttcaatggttgaactccaagggaagccaatggagctcgtcgataggcgagccacgccggaggcaggcagactgtagatctcgacggcagagtaccaggacaaaccactgctaccgcaccccccccccccctccatcgctgctgtacccagcctccgacgctgtcgcacctcgccttcgccgatgccgccccccgccttcgccgatgccgccccccgccttcgccgcttccaccccacgccccacttcttttccttcactgctgccgcacagtcgccggcaggcccaggttttcaacttgggtattcgaaattaaaagagatagaaaaaatttcataaagtcatagatggatagaattgaccataaattgaatgcgttaagcatattaaagtacaatactaaactattaattaacaaaacatttcaaatttatagagcatacaaaatgacaaaatgataaaaaattaacaatttagagaagaacttttcgtttcttgatattttgaaaatgattgatgatgtctttttcctacaatacaacaatatagtatattcaaccatgaatcattaatggatcaaattctaaataaaaaatgtttaaccatgaacaatatcctagaggctagattcaactatgaattaaatcctaatatcttatattcctatttcctaatccaaaatgttcctacttcctaattcctaaccacatgacatctaggtgactagacatgaaggggaaacttagtcattattgctatttatctgtggtaaactggtaatgtagaagtagtaagttcctatggtactccattactccaagacaacttaccttcagcgcgctggcgtccagtggcggtggcgggctggtgcggcgccgtggcgtggcattctggcgtcggcgtgtcgccggactagggaggcgacgagacgggatgccgggacgaccggacgggcggcggcacggcgcgaaatcgcgagtcagcgagtgcacggcgggccgcgccgccgcgcgcaagggggcggggcgatggccgacgggcgacggggcgggccggaggacgacgggcggtcgggcgccgggcgggcgcagggcgaccgccgaccggcgacggcgaggcgactggcgctggcggcctgacgcggcgccgcgggcttcctctccctggctgccttgcggctggcggctggctgctgagaaggttgtgaggaggaaaggcagatcacgatagggttccaatccattttgggccttcttttcctattgggccagtgggctgaaatggtgaggagagaaaaatggtgggatggtgagttcagtctgggcttttttgagtgggtagaccttttttctttttccggggggtcggacgtgtctaccaagngagccccaca

SEQ ID NO: 17238 - DNA, 22778 bp, Oryza sativa
ttatagatactcatgctgcatgcctgcattttgactctagaggcatccccttttcgttatatatatatatacatatgaaatatatccttcatatatgtattttttctgaaaaaatcttgggtattcatttgaatacccatgaataactgtggccccgcccccctcgtgccttcattcaccgatgccacaccccgccttcaccgcctccatttccaccaccgccgcgccgccgtgacacacgtgttatttgtttttagggtttgattttcatatgatgacgaagggatgtgtatgatttgtttgtataaatatgcagtgttttaagtataaagaaatgaatataccgtttcaaacattcaatcacaagttccatggcattgcagtggtaagccatttctctctggcctggccgatcgtaaggtcgaatcctgggttggccgcctttttttttttcttttctcgctatttaggctgctgtccatatcaccgtccacgtcaccatgacatccacgtcgctaggggtcccactgtccacgtcaccaaatatccatctgtgatatttattcgaaagcgtcatagataattatgaaggtgacaaatggttgagattgtcacagagttagcatctaattctcaaaccgtcataggtgtactacgcgatgacaatttcagaaaccgtcaccagtaaaccgtcatgtactaacatatttcttgtagtgaaagaggatgagctatatactaagatcataggtatcggttcttaactagaaccggcatgtatatctgaagccatataggtgccagttattatagtgaaccctccaatggctacttccgatggtgaagatcttaaaggtgtcggtacttaaatagaattgacacctttctcggatagcgatgttggttctaaaataggccccacattttagaactttgatgagatagaaataaaccctacactttttatttatgtcctcatatcacttaaattaaatttgatggtaactagttatagtttaatttgtttttttataacttgtaaaagttaaaatttaatttacatttttataacgatataacacatgttaatacatcatctcaaatatttttaaattttttcataactgtttgactaacatacgaacaaccagaaaacgtcccctccagttgaaaatccactgtccacgcgcccacacgaaacctagctaataaccatctatctttcggcgacgatctcccccgtggcggggctactactcctccctgccacggtggtcttcacggccgccgccgccgccgccatcttccgctccccctccggcgcccgggcaaccacgtcggcgcggcacacggggcaccaccggctcttcctcagccacgagtccacgcacggcgcgtggaagctgtgctcgcaccgcggcagccgccggcaccggtccccggcctccagctcctccaggcacaccgcgcagtccccgccgccgccgcccttgacgacgtcgtggcacggcagcgcgccgatctcgtcggcggacaggcccttccctcctcctcctcgggctccaccgccgttcccctccgccgcgcgcccgggcgccgcctcctcctcgccgcgcgacgccccgcgcccgcgccgcagcgcccagaagacgacgacgatgtggacgaccagcatcagcgcgacgccggccaccaggaggaagatggagatcaccgacgacgacgacggcgacgccattatattctagctaataactaagctacgcagctcgtggacctccatgtgctgcagccatggatgcatcgtctttgcttcttccgctgctcttgctttggatgtggagacagatagctagatatatagctagcgttggattgttcaggagaaaccaaagaggagatgacgacgacgacgacgactgtaactgttaattactcaaccagatcagcatgcaaattaagctagttgaggagggaagctaggcatgcattaagtgaagtagttaacacactcatcgtcactgctgataattcaagccaggagtgaccgaaacagaagggacaaacataacagttcagtgttgcaagcccaaatgtgcatgcctgttaattggggtgttttaaatgtgagcttagagcatcaccaacacttcccccaaattccaaatccaagaaatctttttaggaatctctaatcaggagttaggatttttttaaaaaaactcttatttttaatagtttgcgtaaaattagctctctaaaaaaaaagtatgcccaccttcaaccccctccatgctattgtcctctccatccgcgcgatcggtccctccccctctgcttcacgctatcaaagattggaagtggttgtgcgctcccaacttgtggagagcttaaaaattggataaggggcgttgaaattttcgggaattgattgggggggactgttggagcatgatttttaacctagaaatcatataatttttgtgttgggagctgttggtgatgctcttagttaataatctgtactcaccctatagcctataacataagtaaggtgttttggttttcttactggttaaaattttctaacttcgataagtttatagaaaaatatataaacatataaaatcaagttagtttcattaaaatccaccctgaaatatgtcttgatagtgtatttatttggtatattactatagatgttaattatctttttacatggtaaaagtagaaaatttttatttaagataaaattaaattaaaatgcctaacaatatggaactgagggagtatattgagatggattatagttacttgtttgatgtaattgcctttaacattttaatatttgataaacaacaactttaacctatgaactggatataacgtatttttttctaaccttaacttgatttgcaaaactagttataatgattatagatttaattttttcatgactataaaaggtggccaaacatggaggaacacaacaaccgtgaattgagccataataatcgtctctctcatgcctatctcgttctacatactactaattactccctccgtctcataatattagggattttaagcttttgcttacaacgtttgaccactcgtcttattaatttttttttgaaattattaattattttattcgtgacttactttattatctacagtactttaagcacaacttttcgttttttatatttgcaaaaaaaatttgaataagacgagtgatcaaacgttgcaagtaaaaactgaaaatcccttatactgtgagacggagggagtaattgttttgagaagatgcatccatgatccatgctgaattaaattgtcataccaaattgcagatagaattcctttaagaaaaggggaaagatagacgacaaagtagggcagcagggggcagggtatatactccctccgtctctaaataatatttgatgccattaactttttttaaaacatatttgaccattcgttttattcaaaaacttttgtaaaatatgtaaaactatatatatacataaaagtatatttaacaatgaatcaaatgataggaaaaaaataataattacttaaattttttaaataagacaaacggtcagacatgtttaaaaaagttaacggtgtcaaatatttatggacggagagagtatatttcagttcttaatcggataatgccattggaaaaggtaaaagatattgtgttcaaaagcggcatgttgtgtgtgcattgttccaatttgattcactactacattttttttattatgatctttttgattcgctactacttgtcttgctaccgatggataatggatatgtatggaggagtagctacctaggaaatggaccgctagtccaaattttatatgggaaagtttgtgacattagacggacctcctttcgtcagcacgatatgaaaggatgtgcccagcccgtgacagtcacactttaacggtgcatggttttgtcacccaaaacagggggactatgctacatcgcatttgcagccgacaaaattgatgagctgagatgcaaagcacggtcaagctagttaattacttcctccatttcatattacaagactttatagcattgtccacatttatatagatgttaatgaatctaatgtgcctaaattcattaattaacatctatatgaacgtgagcaatgctagaaagtcttataatcttaaacggaggtagtagttaattaggtgcgatgcaaacaacgacgggagaaaggcagaaagctagctcacatttttttttaatctctatgatcagggctactgtcaataacttcctggttaatcagggattaatcatgagctatgcaagctacctaatcctcaggttgaatttacttacttactgggccaggatatttgttaatcacctggttattgcaagatcagtgtcacttttgaatggatatggtcactatgagtatatttggtcgctcatatcctccatgcctatcctatctctctaatcctcgctaagtttaatctagtgaaggacatacacacgtagctattgggtttttcacatcggacaaacctagacacaatgagatgttgtttggttggttgcattaaaaataccaaatgtagaagagtttatttggttatatggactttcagaatagttacttctctatttggtagggtgttgatgcgaaaaacacacactggactgggagatctgtttaactccagtacaggttctaaatcttgctcttgggttcaaaggcatgccagttgatttgatccagcaatcaacaagaaaaaaacacaaagaaatcgtagttaaatccataaacgatagccgatcggttagggccgatgacgtatcgttcaaactctgagccgctggtattgataatagattggcgatgaagaataaaggaatataaggttaaatctactcgatcggctgtagatattaatgatatataatcatgttaataaaatatatttaagctaagcgattgggatatatcgaacagtatgtcgagacagtataaatcacttatactcaaatgtactttaagatgacaattatatatacatttatagagccgatcaaatagatctaacatgtatcggctaatactccgataccactctatattaagatattgaaacaaataagatatatcagacagcacacctgatatactttaatggaacaagatcttaatataaagggcagatttagcatgtcaatcaagcatacaataaataaagtagctaaatcaggtaagatcggctgaaaccccgatgctatcttcgttagagatcataaaacaagccagatattgcagttacgaatattacttaatagatcgaactcaaccgatgcagcattaagcataaggataaatacaagatctaagcaagatgatgaaaaccttagaaagatggtagatatgctatataatctagattaataacgaaatcgaaccctatcggctactctccagtgatagatactagccgatcatagattaaatcgtgaaactaataaaggttatgaaacatatatgataacttgacgattcacataaacaagattagagtaacatgaagatgcaagcactaatcccgagaacgcaagctgacataacaagtttacctcttgttgaagattgaaatcgatgcagctcaatccgaaagcaagaactcgtcgaaaacattgaaagtagaaaagggtggcgatgcgctgaaagtgttattgaactgtcgtttttaattacatgggttcgggtcatatttatacccgagatacatgataggtccttaccggacacgactcttatctctaacaaactctaaaatacaaacgaatcttcacggcggactcttgccgaaacatatctctaaagaaactattcaaaatatcctaattaatagatacaattgcctatctgtgagcttacctctatcgtggcaatcctgatgtagcacgtcgattgattccggaaacggtttcataaccatctcaacgaaatcggccgtatcggctgtatcggctatcttctgtccgacccatctcagccgatgccctcgcagccgatacgtactctgttttctgaacacaatccttcaccgaatctacttcgattctgatgtcgaacctggttcatggtttactaaatttggtcgttaacaagggttataatatatcatttttttaagaaatatattaaacacccaatataaccataataactcaaacgtcgattcttttttttttaaaaaaagagtatagtgcatggatgacctctaaacttatgtgaatgcatgtgtcatataggtccttgaagttgttatgtgtatcatataggtccaaacgggtttcaacctattccgtacgctgacgtggtatgctatagtagcacctatagtacgtgccggtgagatccatgtgttagtcacatatagaagcaaaattagaaacatatttttctcctctctctctctctctctcgcactcttaatttattatctttctatgtgactgacatgatatgtgggtcccactgacacgtaggcaatactgtaacatgccactttaggacacggagcgggttggaacctgtttgaacctatatgacatccaggacaagtttggggacttaaaagtatattatgaaatttcagggacctatataacacacaagtttagagaccacccgtgcacttcacccttaacaaaaaatacaatagtgtttgaccctcaataatggagcggccctttttacaacaattaggtggaaaaagaaaaaaaggaaaaagggaaaaagaaataaagaaaaaggagagaggactcgagaagagctttgtctcatcgtcgttggtctattcgcctgttcgccatttagcaccactcaccaccgccagaaccaccagatccgatgggcacgagctcaaggccactagatctaatgttggcgagctcgtggccatgggatcctgcatcgcgatggctgaaagagaggacaacggccactagatctaatgttgaaggcggcagccggtgagaaagtagtgaagtggcgtcagtagtgtgatggaggtgcggtagcgctcctcttcccagatctagtagtgatgggaagcaatgccaaccagatccagttaggcgagtggtggggcgatgaagatgacgggcgtgcctcgatgaagatgacgacaacgaccatggagcgatgggaagacaccgctgatgtgcctatttacccatcgcagccctccgcccaccactcctcgctgcattggatctggcggccggcgacagaagaaggtgcgggacgatggtggccaatgattgaaggtgcgggaactacttgaacaggagggatgtagcagcaaggtggatccatcgtgcaccattccctccatcaagctcattgtccccatcttcattgcctcatcgcttgctggggagaaatgaggagtgtccaggagcaaggtgttgaccccatagcctatccttgcacatgtgggcctggccgagtagcgaagctcaaattgagcattccaacttagcttgactcggggtggtggtgtggggggggggaggggctttttgcatccgttcgtccatgctaggagcgacatgcatgcaaccaaatgacaacccattgcatccgtgcatgcgagccaggtaccatgcaggcaaccaaacatgccctatggtttggtcccttacgggcccaaccttaatatgtaataccacccccgccttgccagtgctagcaaggcccgccgatcaccacctccctccatcctactctgtatgtgttggggcatcttcttttattcctcaagtcaaataagaacccaatcccctacttctcatcctctgtcagtctgtctctagctgcttttttttgttgggggtagtacactacccctatctgtgtcccgtcccttcccttgcctcctaaccacttcgacaacaagtagtcgctagctcacactagcttagtgctctcctcctatactgtggctaaggtggctccctaccacctggctagctagcaggggcacaaatccaaaaaaaatggccaagtatccagaggcggggaacgtgccgagggtagtatgggtgggtatgaaaatactgaattcggtcaatttgtctagtaccctcggttaagcaaatagatcggactgagcagatgagctgtcccccatcccgcatcaccttgctgcctccattaagcaccttgtgacatcctggcccaatcaggatgaggcatgtgtagcccatgtgagctgtgtgcgtatgtttagtacaaccttgctagtttaacaagggtggaaccaacttacaaggccgtgtccctccaactataccactcccagattaacccttttacacaaagcgagaacgaaaatgtaagtgtggtggtatgtgtaagtgggtccgcccgtcggatggactagctatgcggttctgaagggagggctgttgcacacccgcaccacctcgttgcccccatctagcaccggtgcggtaggccactaaccacatatccaaccttcctcctccactcctccacatcacgtgctcccttacaacagtgtgttcgcaggacgccgctccgagccttcgatgcttgcgtgtgtgctggcagtagcagagatccatgagcgatggctggagatgggttcatgtgttttgtgatttttgacgattgtgtgtttgtttggttttttgatgatcttggactctgtgtgatgcttgcatccctagatgatctttttggataactctagatgattttggtcatgatcgagaccgtattgcttggtcctaacttttttttaatgtaagtcaatcttaattttgagatgaccaaaacttcctcaatgaccgaagactgagatggaatccctacccctagaggataggccccctcctacatattctttttatgtaggattatttaattaaatcgataattaacataaatagtgtattaggcactctccatatctcttacctctcatcttgggtcagtagatgccggtgtcccatacatgtcactatatcataactaaacttcttgtgctctcaacatcaagcacttctatatacttttgtttctatatcattatatgctatcatttaattaagattgaatagttagtttggtccttaaacttttacttctgagtcaaattagtccttgatatttcatagtggccaaaggctgagtgcctgtttagatcccctgataaaatttttcaccctatcacatcgaatgtttgaacacatgcattgagtattaaatataaacaaaaaaaaaactaattacacagattgcgtgtaaattgcgagacgaatcttttaagcctaattgctccatgatttgacaatgtggtactacattaaacatttgttaattaggcttaataaattcgtctcacggtttataagatgaatctgtaatttgttttattattagtctacatttaatacttcaaatgtgtatcagtaaatccaatgtgacacgctgaaactttacacctttggataaacaccctcttagacctgaagaaaggaccattttggaaatactatattattcactgggatccaattcacgttcgtcttgcaaatttcaggaccacaaaattaatatctgtcaaatccaaggggctttctaagaaatgtcaggatcaggatcggttagtttggtatcatctgagccattggttcgaccggccggcgaggagttccacgcgccgccgccgccgcttctcctccagccgccggcggggcctcccttcctacccaagcctccgccgccgttcccatctcctcgtcctccgtgccaccgccggcgcctcttccgctgaatccatctccacctcctcacctattcgctaacgccgcctcccatcctctcttctctccgggctccggctagatccaagtcggcgtcgagatccagggctcgaaaacccctcacctatccaaggatttcaggtagtgatctctgcgaattccttgaaactgcatgcttttttaaaaaaaactcctgtggacactttaacaatccaaaatgataaagtagttaattggcttatttcctcacttttctatctaccaattggttcgttaattcatatagatatatcttaattgcttagtaaagattatctcttggattgttgtgtactcgtcgatttttgatattatcgagccgtcccgaaataatggctatagtttccatcttccattgggtagtgttcattgttgtctccgtttcagcgttataaatcaaacattgtgcaaattgtagatagaaaaaattgtgaagattgaggaaaactatcctacggctcaatgagcagagccggtatgtcagacaaccagtgaagtccatgtcttatgcccaatgcttgcactcaaacctcattcctttcctaggttaaagtatgctgttttattttggccttggtgcacatttaagcaccagatcttttactcccattttcatgtccgcaaattcatgaaccagcagattaatcatacatgtacaccaattaaatattgtaacagaagagatatatattcatattcaacatatatgcatagaggtgaagagtaatcggttactgggcatgttgctggtgctattcttgttattcttaacgcccgatgtagataaggatgccgagaataattcattcttctgtgtacagcgacgagggctatggttcactgctgggcattgctgcctgtctttgctgtcgatttgacatagtccttcctaatcttcttcagcatcacgaccacatccttcatttccatcctttgctctggggagtcagccgagcagagcaagcccagctcgaagactggcttaaggaatccatcaatgctactggtagaacaagaggtgtcctgtagaagctggccatcgacaacatggacaagatctataggaaatgcccagtgaacccactgcctgatgctcagatctcccacaaacatggcatctgtgggtctcttcctagtgaacacttcaagtagcatgatcccatagctgaacacatcgctcttccgtgacgcttttccaagaaccccatactctgcacaagaaaattagattaatgacaactgattgcaccacttaattgttgtgaaaagatcaactgggttgagtaagagtacaaaagctactaagtacctggtgccatgtaaccaattgttcctggcatgcttgcagagatcgtagagttatcatcgcctagtaacaacctcgcaatgccaaagtctgccacatgtgccgtcatttcatcatcgaatagcacattactaggcttcaaatcacagtgtacgaccacctcatagtgctcatggtgcaggtattccattgccattgacacatctagcataatatccaacctctcgagaaagcctaactgcatcctttcttccgagtgtaggagtgcttctaagctaccctgaggcatgtactgaagaaccaatgctctgaactccaggttggagcatgtgttcaatatctttatcaagttgcgatgtcgagccattcgaagcacacgacactcagtatcaaagcttctcatggcatgttccagatggttgtgtataacttttatggcaaccaccaaaccgctactcaactggcccttaaaaacttttccgaagcttccagatcccaacatattgtcttcactgaaattatcggtagcgcgaacaagctcatggtaggagagtaattggtggctgatcatgtcaagcataccagaagaaatattttgatgcttaactttctttctaattattccatataggcaacaagttaccgctgcaactactatgattatacccgggagtaaaatatactttagtatgtgtcgatttcttttgggagaggttgtttggcatggagaaaatcctaaacggacaacaccacatagccctgagttccctgccaaggattgcaacgtgatgtttgagaagacacctccttctggtatctgaccttcaagcttattaaaagacagatttaggttagcaaggctggtaaaattggccaggtattttgggatggtaccagaaatgttgttatgggatatatccaaaatttgcaagccagataggttactgaaagagtctggaatggaatcatggaattcattgacagataagttcaggtatcctaacatctgaagatgtccaattgaatcagggaggctaccgacaaagcggttcatatagatatccatgtagttaatttgttttatattgcctatatcaactggcaattcaccactgaagaaattttgagatagatctagcaggatgagcctatcaagatgaaataagctcggtggtactgttgatgataattggttatgacctaatgctaggtgctctaacttggtcaaattactggggtccaattgtaagccagagaacttgttggttccaatgtatattaattcaatattatttagcatgccagtgtttaatgggatggagccagacaagttatttgtctccaagttaaggaatacaagattcctcatcatcatgattgattctggaattttaccatgcagttggtttcccccgagatctagcacctgaatcccagttaaattcgaaatcatagctggaagttcaccggtaaagctgttctcaaatgcagagaatactcgcaacagacttgacagattccctacactgcctgggaggctcccggtgaaatgattcgagtagatgtaaagggtagacagatttatacagttggaaagtatggatagaaagtaaccgatatctccctgtaggttgttttgtgcaatactgagttgcttcaacgagttcatgttaccaattgttgccggtactgagccatccaactggttctctgccaatgaaaggattgtcaatgctgataggttaccaagacaagcaggaatgggacctgttagttgattggttgtaagatccagcactgaaagttggcctagttgtccaatacccacagggatggcccctattaggttgcacatttcaaggcctagtctggttagcatggtgaggttgctaagtgcagcagggattgggccagcatcaaggtgattcctactcaaagaaacatcactgagattcgtcgacttggccagccacgaagggaaaacaccctcaaatagattgtcaccgacgcgaagaacttggaggtacggacacgctgcgagtcctggtggaatttgaccggtgaatctattatgggagattgagaaccactgcagaaccgggaggctgaaacttgtgttgcccgggatggagccggtcaagctattaaagccaagatcaacaacagttaacctagacatgttgaagatggcttgtggcactggcccagtgagattattgtactgcagctcaagcaactcgagcattggcaaagagccgatgcaacctggtataggtcctgacaggctgttgttgccaatactgagataagctaacaaaggcgtgttgttgaatagactgtccggtatcgagccagtaaggtaattcccaatgagatcaatgctgcgaaggcggcgcaaggcctgtagttctattgggattggaccggatagctggttcgacgggaggtggagtagttgaagcctcatgaggttccctatggtggctgggatgccacctgaaagggcattgtggccaagatcaatgagcttgaggcgatgtagccttcctatatcatccggcaccgagcccgtgaggccggtatcggtgaggttgaggacggagaggaaagaaatgttaccgaggtgaggcccgagctctccttggagaggaatgcccggcagctccagggcggtgacgcgctgccggtggcggctgcacgagacacccacccactggcagaacggtgtgccagcggtccagttgccggcaaggatgttgtcaggatcggagaagtgcactttcaaagccagaagcgcagcgaggtcggtgtcgctgccattgctcttgctcagacctagagaagaagcagaagccacaatggacagagcaatcaacagcgcaacggagatccataccggcaatccaatcgccatgtctgggtgtgtgtgatgcattgacaaggagtgaagtaacttcactggacgaacaagttgtggttttatttagcaactcggtgctttcaacgtctaggacgaagaccttgactgttgctctcagaaagtgcaagaaactgtaacacttttgataattaggaatgctagtaccacagacttgctggaaaataatgtcatcacagactatatattcaaccgatcacagcgtgcacgacaagctagatatgagagctgtctctctctcagccatcagccatacactcactgaaaaataattttctgtcaaacaacttgaaggcaaccttagtctttgtcgattgggtggttagtggcgggccttatcaggaaaaatgtctagtacaaatttagaaactactgttgggtacataatagatgtctgagatttgtccacgtcaccctgactatttttttttactccaaatttgttactcctagacttatctatgcgtaatctttttacttcaaaaatgtgaacaaatctcaaacgtctatttgaatatccaacgatagtttttacgtttgtcctacatatatatatagagtttacactacatatttttccgtcttgttagccttaacaagacaggatacacggcctgttcagttatgtagttatcatacagctgtcaggtccgttttgcgtgacagcgtgaagatgtgcaccctgaaggtctgtgatgctgttgtcttttggaccatttgaatgtttttgtttacctggaaagtttgtgtaagtttctctgatgatgctgtgccgacttattatcagctggaatgataatttaatttgtcttagtagttctgatgctctgcttatactcttaggaatgttttgtttgtgtaaagacttcgttcatgctccttggctttctccaaaacccgggtcaataataagaaaaaagtgctctttcacctcccccctgcacgcacatataatcatgcatccaaaccaatttcatgtaggtgtcggtatcagtttactaaatcgatcagacgatggtagcttagcttatgttcattcaccagtgtgccttcatcggcagcagatgaacacaaccttagctcggctgtcttttaatttgattgacatactgtgcccatagtcaggaaactgggtcgaattcagcgttccttaacccgggactgccatcccccgtcttagacacacaggtcattttcatttccccaccttataaaaacatcttacaagtagcgtatcacggtttctcgactctgtcgatccgggaactttgtgagtgcctaatctagtatgctctgcaaatcgtagccgatcacgtacgttctctccatccacctgcacccacttgcacttatctacgcaccacaatctcactgcaacatcaatggtatcactactacagagaatctaaaaggggttggttgaaaatctcatataggtatcgaatttcccaacaagcatctcgcagacggtaccaatgagaaagaatcaaaggtatattggttttggaaccggcacttataatacctacaacgagaaaagaaaaatgagtcaactcgatgaatcgagctaatgaattgaccccatcatcactccaaatattgcagttgagatccacattaaaggcataaaaatcgagaagccatggaagaaaaaatcaagaacattcattacatttcgctcaaaaataaatcaagaatattcatcacattgcacacaacaattcatgtttggatccaacatgaacccatatgccccaaatcacgaactcctgcatatttcccttctcaaaaatcaagaaaccccaacgcaaaaacagaaaagtgggcaccggcgtcatcactggtgaatccccgcagcaggggaattcgcagttgaagtagtccttctgtggatccatcatgccatcctctctcgccgccgtggtgatcccgagcttgagggctgtcggagctggcccccacagccccgtgtctcctcctcgacctcacgggagagatggaaggatgagccggacctcctcgtcgccaccgtgtcaacctcccaccgaccggatctggtggccagggcgggacgacgtaggggagagggagaggggccgacaccgctgcgtatgggagaggcgtggttcgggagaggagaagatgaggcacgcgaggtgataagagcgtgattttttttctcatgctccacgcccatcggctcaattcaatcagtattggtttttttaaaacaccagcacttgtacgtactcaaaggtgctagttttcaataggaatcaacacctttctctgacaggagtcataggtgccagttcgtattaagaaccgatacctatctctttataaaggtgtcagttctaccggatggcgccctatgggcatgtgcctcggacgggggtttgtaggtgccggttttagtatttccgatacctacagcatcgtcactgttgtatatttctgtagtaacgtgtagggatgatcgattagtcgatgcacacaatatatcgtcagataatttaggaagggatcaggaataacttaagctagttaacctcgtgtaacaccttgaaaatttcggttttaaaatacgaaactaaaaattcggaataaccaaaaatcttttctaacttccttgcatgctggaatttattggatgttatttcctgttttcctgttatgcatggactaaagaacgaacgtctgagaatatgtttgtattttgattttaaaatattatttattcaaagaaacatgattatgaaatatgttaatatttgcaaataccaattgtcttcctaaaaacccttctctatataatagaacccctctgacatatttgctctataaataaagttatatattactatttggatggacaccctctatgggatagtacattaaaacaaatactatttcacaaaggaaatatagctctgactattttctaagaattcttaaaagggaataagccctttggaaaatgacttgcaaatgatatctactagtaaagtatttgttaaaatcctatttgtcaaatataattcctaaaaggctatttttaaagaaaaggctttctcagataaagtctggtttctctctttgagaggcctagcccagcccacataatggaatttttaattgttgtgtgtgtttagatttttgagccaaagatctcgactaaaccttatctcctaaaaggatgccctccgttcaacgtcctttcctttcattatcctcccggtctgatttattaagtgcttcggtactaaacaaatcaaagacccgaaactctctcctcttatcgcaatattatcactctctcaaactcttatcctacggttaaattaaaaccgctctattgatttgaattcgataattccctcgaaaaatctacaatcgttcgacagatttatttgtcgtgcgtcgattcgaatatctccaattctatccctatttttgaaccctaccgcgtcgattggatttgtatgccatgcgtcgtccctaaaacccctttgtgttaccgtcgttcgttcgtgcaagcgctcacaaagaaatcgcggtgtattcagccaagcaagatgcaggaaaagctctatgcttgacccttgctcatccaaatgccaatttaaattcaaaagctcacagttccagtccacatatacaatccatgtgcatactcgaattcaaatgtccaagttacacagtcccattacaattatacagtcccgttacaaatacactgtccatttacaaatcccagaaaaatactattacagtggaccaccttttccagcccaagcccactgccagcccactccctctctccttctcagccaactcatcataagtctgttttgcctccctgcatcaacacagccgaatcagccagcatgcatgcacaaaacatgctcgagggaatgcctacaagccacagcattgatttgcaccaaattttgccagccaacaaatgcctgggtcccctcccccaacaacatcccatacacccatgctcccaatccacagaaccatcccccaaaacacaggaaatacagtgagatgagtccacaccgaaaaacaacgccaagtccaggaaacaaagctcaccttggctcctacctacactccaaccgccgagaacgtatataagccgccgccaaaaaccatcaccccctgcacctcctcatttttcctctcctctccctactctgcatttttgttctgccactgcctctcctctgtccagcgcattggctgccgccactactacagaatcggtttttgcatacgggcgaacacgatcttcgcatgcggtcggccggcccgcatgcgcgaaatggtctgcaaagatcgccattagcgcatgcggccggtctagccgcatgcaaagatcgatcttcgcatgcgtctcttaagacggccgcttgcaaaaatacatcttcgcacgcggtccatttaagcagccgtatgcgaagatctatttctccatgcggtcgacttaactagaccgcatgcgaagatctattttcgcatgcggccatcttaagtagaccgcatgcgaaattcaatttccggatagcttaaataatatttattttagccttttggtgagatgtgtctcgtaattaatattaaattattgagggatttattatcgtatttcggaatagtaagcatatgacataagacaagtgccacagtaacaaacatgtaatacataaccataaattcaatcgtaatttacatacgaaatatataatacaagtgccacagttttttcatcatatgtataagtagtgtacatgtcattgcatatgttctttctcccactctctgagaggtttaaatttgtcgtccattgtgagttcactctggttgtcgtagaagagacctcttgcgttgcagacatcacgacggatgaatcggcagaggttagcggccacgttcaagatagtactgtcgttgaatcattgtacaatatatgggatttcagggatctgcgcacagaaaggaaaataaaatggtactcagtgagaagtgtgtgctagatgggtttctttgtagagaagagttcgctgacttactcggttactggttgttttgtacctcccgtttactctgagcatctcgcacacgtaataaccgcacaagttggttcccggtggttgtttgtagcactgcgatataattgtgagggaccgatctcactagatataatttagtatatatgtattgttctataattagttgtatcggtatagatttgatagtaccagccagccagtcctggcagataactgcttctaggatggaatatgtactggtctgcctcttttgcggtagtacttgtgtgctctgtttgaagaaaacaattgttttttcagtagttagaagactagggatcgacctaaacaatttatattaatgaaatgtttatcacttacaaattcaaaatagtgaggaattccataaatgtctccttgtcatagtgtgcggggtccaatgatatgatcaattgatcttttggatatacaaggaataatatgtagtggtctctgcatataagataggcttattggagacataaaattccgaagaagataaattaattaaacaaaaagaagagaaagcgtacgtgaacgcgtatgggaccattaagacatcttcgtcagcgtgcgccaacattgctattgctaagtatgttgctacttctagcttcttcctcttgtgcaatgtcttcacatattctcccttctcttgaggggtcttgccaaccaattgctcgcagtcctctctcagctctacgatgtgttgtgttttgcatattcttgttggatcgatgtatccaacctttgctccagttctatcagcttcgtggaattgcatactgtacaatgaacaaagaagtaatgagatttggtttctttgtttggaatgatacgtgtaacatgtaataaagagttcagacttacagacagaacgccgcaacgtgattaacgtccattttatctagcttgtagagggcataaaggtctcggaaagagataaaaaatatcccattaggaccactcatgaaagcgccttccgggacggcgacgcttatgaaaccgagacccttcctagatgccttgatataccattcgtgcattaccctcatttcccatggtagcttattcataagataagttggcaagaatggcttgccatactcataagtttcaggcacaccggcagataaccaggattgcacttcatcttgggccgctagtactgacttctgggagtctgacatgacgtgagcaagttcttttctcttctcagaattcctgaaagctaaaaacatgaacttctccttatccttgtcaatctcctttgggtcgtatgtcgatatcaactttggaattatacgacgaggttcgaaaggattagacttcggttcagatgtagtaccttctggtatgtgcacttgttctactagagcagattggggtgtaggtggagaggcttgaactgagggcggagccgggggagcatgctgtttagctggggacgtgggagaggcttgaactggttgcggagccggaaaagcaggctgtagagaaggggagggtggtggtgtaggttggcgaggcggtgacctaagcgatggtggtgatgccggatctcgaggtgacggtggttcaggaggcgacggtggtgcaggagcggcagctgtccttgcttgcgatgaggatggagttgaagatcctactgctggaacggccgcggtcaggattatgtctctgcggtgccacaagataaactgattcactgcatcaccgagaagttcaatccccttaggtgcaggtatgtctagttccaaggaaatgtggtcgctatggaccttggcgacctgtacccttgcgtaatcctcagggattgccgtgttgtggaattgatgtctgggtatcgctaaacccgttgcaacctccttagtctttccagcgcggccgataggtacgacgagactgcacggagttggtccagttatactattcacagggaagggagttgtctccactgagcctacactactgggtacattagttgtttgctatgcggattgtgtgggttgctggccatcagggaataaccttggaaaggctgtcgggtttttagctgccaacgagtagaagtgttccttcacttgcgcatagattttgtctgatagttgttctttgtatttgtctctcttcttataacttggtgcgtcttgtggaaaccctatcttccaactcgtctttgaggacaaaccccttacacgttcagagtgttcggcggtccccaacgtcgctgtaagctggtctcgctccctccgtgggacgaactgtcctgctctttctttctcgactatctgctgcaaattagtagtcacttgttctatgtctagagtctcgaatagtatgtctccctcatccgagacttgacctgtgctacgcgccaaaacagagttcttgctacgttccgccatggggtctaccaacagaggtttgccggccgctgcaaatctttgctcggtctcccgccactgatttacgtgcccagcgtatccgctcgaccccaatctatggggatatttgttcttcttcgcgaggtctgacatttttttactcaaagccaatgcttcatctgttgtatgatctttaacaaacgtatcccagtcagcctccgatatatgtccatattccgtgaacggtgggagattcttctgaacataatcccgatttagatcggacttccactgtcgccatcgatctcccatctttttaagtgcgtaatctctcctcctgacctctgatccaggagggtacacaaaatacttctgcaactcattccaaagaagtgtcttgatgttgtcgtccaccgtttcccataacttgacattaatgggacaacgcgtcctgactagagtgccacaggtgttgctaaacttggaccgcactatcagtggctcgacgggcttcctatcctgatcgagagcaatcacgttgtaaatttcctttggtaatttatttttgcttctctcaccacgtctttttttcccactcccgcctgcacttatagatgtatccgtacgttcaggtgcagacgtagtagtgtccatctcaacttcttcctctctcctggtcctcgcggctttgcgtttcgagcggcgtcggactaccatctgcacagtataggtaactctctacaccattaggttcatgtcacatcatagttagtaaataatatatggctaacgatgttcagcacttacggcctgttccataggtatgtagtccggatcatcatcgcgagggacgacttgtgttatttccattggaaacgggtcacttggtgtgcgccatgtttcttcactagaagcgtcaggctgcttgttgctaccggatttttgatgagcgtaaccttcttgaggcgttattggtgcgttcgatggaacctaatcgttccacattttccaacttaacgttaaaaaatttgacataagtcccaatttgacgtaagtcccaatttaacataatttgacataagtcccaatttgacgtaaggggtaccgaatgtcatcaaaggggcggcgcg

SEQ ID NO: 17239 - DNA, 712 bp, Oryza sativa
  unsure (1)..(712): unsure at all n locations
gtgttcttatgtgatactgtgttaattgatttcttcgtctacttatcttttgtcattttatttttgnaattatatcttttatctccncnccccccgtgggggccgccttgattgttatacgtacctcgnaccgcagaataccctaatgattttgggaaaaatcattaagttaaggtggatacacatcttgtcatatgatcaaatggtttcgcgaaaaatcaataatcagacaacaagatgtgcgaacttgatattttacacgactctctttaccaattctgccccgaattacacttaaaacgactcaacagtttaacgttggcttgccacgcattacttgactgtaaaactctcactcttaccgaacttggccgtaacctgccaaccaaagcgagaacaaaacataacattaaacgaatcgaccgattgttaggtaatcgtcaccttcacaaagagcgactcgctgtataccgttggcatgctagctttatctgttcgggcaatacgatgcccattgtacttgttgactggtctgatattcgtgagcaaaaacgacttatggtattgcgagcttcagtcgcactacacgggcggtctgttactctttatgagaaagcgttcccgctttcagagcaatgttcaaagaaagctcatgaccaatttttatgtcgaccttgggagcattctaccggggaacaccaaaccggttatt

SEQ ID NO: 17240 - DNA, 547 bp, Oryza sativa
ctagcaactaaactttacctgttgaaaattcgaacgcccaagcaacttgtttaatatctattcgaagcgaatgcagattgaagaaaccttccgagacttgaaaagtcctgcctacggactaggcatacgccatagccgaacgagcagctcagagcgttttgatatcatgctgctaatcgccctgatgcttcaactaacatgttggcttgcgggcgttcatgctcagaaacaaggttgggacaagcacttccaggctaacacagtcagaaatcgaaacgtactctcaacagttcgcttaggcatggaagttttgcggcattctggctacacaataacaagggaagacttactcgtggctgcaaccctactagctcaaaatttattcacacatggttacgctttggggaaattatgaggggatctctcagagctcggtacccgttttcatcgtccgtcaaaaaaaccgggcgaaaaaaatctgtccgatccaaaacaaaacggacgaaaaaaccggacaaaaaaccgggcgaaaaaaagaaaagagaaa

SEQ ID NO: 17241 - DNA, 1272 bp, Oryza sativa
cttgtagactatcgagctcggtacccagtgtcaacgcctcgaatttacaaaaccagacttctaggcatagtgtgtataattctctatgtaaggaccaatcaaagtacacaaagaaaaagggtactcggcgagcttctcattttacgtggagcctaaattatttggctgacgtgcacgctgacgagccaggggcctacagctgtaaacaccaggccgtgcgcttacgatgcgctcgcctgggccgcccggacccccttgctgcgctgcgtcgatctcgtgcgccgccgccgcccatgcgtgccgcctctcccgcgccgcccatcggtcgccgtcgccggagaccgcgctaccgctgcgccatggctcagctaggccggctttgtgccgtgctgtgccccagccgcgccgcccctggccgcccgatcggcttgggccgatccggaccgtcggttcccgtggaccggcggtggaccgccttggtggtcccggtccacggtggaccggcgcccttgtgccgctgaccggtggggcccgcttgccggcgccgcccctcccctttgatgacgtcagcaaccctcttttcctttggaaaaataaatgataattgcgtcataattcgttaataattatagaaatccattaaaatggctcaaaacttctaaaatccatatctaattcattcgaactccaaattgagccattcaacttgcaaaattcatctaaaattgagctctacatgtttgtttacttttgatgtattgttttcttggtttttattagagtttttccttgttttgcgtgccagcatgtagttcccgtcgtttcggaagtccgcggtcgcgaggaaaaaagttcggaagatcaaagtgaagaagcaaggcaagtcacacaatcccattgagcatattgagcctattttataaatgttttaccgtttgcaaataagtatgcatgttttgctaattacatgggatccgggtattatctatctgctcgcttgtgccatgtttacttgatatttgtcctttgtcaaccgggggtaataaatcgactagctcatgttacttatgtaacctagctagaactatatgcttagccatgcttaattaccactagctcagttgatgggataattacagtattagacctttttagtatcagaatgagctgcgtgctcgagacacctggcaatgcttcatggtcgtaattatccaactaaaatgtgactgaatagtgggctgtgggtgcatggttttgctagtcgcacccatg

SEQ ID NO: 17242 - DNA, 1072 bp, Oryza sativa
  unsure (1)..(1072): unsure at all n locations
tacggctccatcttcacaggcgctcaactggagtataagccaggactccacctaagacatctcctccaaagcttctcttactgaagggggaaaagattgagcaagaatgagtacaaccacagtactcagcaagccacaccggagaatgcatgattaatgcaagggagtacaaggagataataatataggggttcagttttgcagtaaacagcatttaaaagtcacttagttgcccaaagctattttataaagacgatcctagagctacacagtgttattaaacaaggccgtgaaccctcacgaacctgccttaacccaaggcctacgatgaattggaccgaactggcaacccgacctgggtcccaactcgtcccaagccaacccaggccaaccattccatattttagttgttgagcaaattttaagaattataacactgacctgggtacattgctaggcttgcccatatccgagggctcggctattcgaatagatttactctgatcagaggtgtacatctttacccacaagacacatctttactccgcattccatggccttggaacccgtcgtaaagatgtgacatagtttccaacccatcctagccttagacaagagtaccgacccaatcctacctacggccgggatacccgggacaggcaggcagaactgagcccctagcattgggcaccaaccctccgccgtatgacatctcgactaccgagccgcagctcgtgtagccttcatttgccctggagaatgtccatcgacgcccgacttcatccatctccaatccgtgtacttttgtttatgactagactgagccacaaactaagccttacccattagacatgtggaagtacggtagtgctttgcaacagaggcccgagctttagtccttatagtggccggggtgctacttcccataactggcatgcacccaaaccccaccgaaaacaggttttaggggttttgaaagaggaagagaggtgtatgtccaattccaccacaaggggatcctctagagtcgaccttagtcagcgagctagagangtctcaannnnaacccccc

SEQ ID NO: 17243 - DNA, 531 bp, Oryza sativa
gaccccagtaatttgaccaagttagagcacctagcattaggtcataaccaattatcatcaacagtaccaccgagcttatttcatcttgataggctcatcctgctagatctatctcaaaatttcttcagtggtgaattgccagttgatataggcaatataaaacaaattaactacatggatatctatatgaaccgctttgtcggtagcctccctgattcaattggacatcttcagatgttaggatacctgaacttatctgtcaatgaattccatgattccattccagactctttcagtaacctatctggcttgcaaattttggatatatcccataacaacatttctggtaccatcccaaaatacctggccaattttaccagccttgctaacctaaatctgtcttttaataagcttgaaggtcagataccagaaggaggtgtcttctcaaacatcacgttgcaatccttggcagggaactcagggctatgtggtgttgtccgtttaggattttctccatgccaaacaacctct

SEQ ID NO: 17244 - DNA, 6149 bp, Oryza sativa
gggggtttcgttgacggtcgttattgattagtttcgaccgtcaatattgccaaaatagaggagaactagtgatgcttacaatgcataattacgttagaataataatattccactagtattaggtatactaacattttgcagagaatgacaataaagtgaaggagaatcgacatcaacacagatgataaatcaatcggacgatgtcgacaatcaaactaatgtatgaatgagcctagaactcagaattgacacgatgaattgggccaaaattcacaagtctacagagtggagcaatagaggaggccaccagccgaaattgggctggattgggccagccccaggttcggccgaacctgatggttcgtgcgaaccaatcctggcgccgttggatctaggttttggcgtggacgtccaggattgcatcccaatgacggttggagggcacttcagacaattccccttccacaaccgtcataactacctttatataaggagctcactctcttcacttcaacacacacctcaagcaatagcttagtttagtagtatctagctggtggaataggaatagagtagaaatcaggagtccggaaatcttcggaagagttcgggtatggctctagcagcttttctcttctcttttgtaagccttgtacttttattagaatattcttctaaatacatttatggtattgaaatactttccgagtatattagtacatactttacattatgttcttgttatactgaatatacggctagcttatctgggagatgctttggtgcgggtataatgtttgcttatgcaattactctatgtcatgacgatgatattagaattactcagtacgggtattcctccgcgcctatatgaaatcctaagttaatttcctggggagggtattcctccgtatttagccccgattgtatggtcatgatgggctgtcgtaaggaactcgacagtcaggggtggcttcttgaaataccaggagggcatcggaaagagggtattagctagtatatcagttaactaagatgtatgtatactatgtatattagaagtataggaatatattatcttccttttttctttccacttagcttagataatatattatgagaatgagtagttaatgcttgtgtgtcactctacccttggattatcttaaaccccgcttagaatatgattattacatgcaacatataaattattagtcaagtcctctctacatgatcttcccacgggataaaataaatacgatacgcttggaatactctcgggtaaatgctacaatggtatatccgtgcgcttgcggatgaactctgtaaccataatatacgagaagtatttctgcgccattgctgggaattatatttctagtaatgtcgttaagaaataccaacatacgtgcggaaacatccaaaacaatatcagatgcaacattgacaaataacctactgaaacatcaggaaatatttattgaaacatccaaataatatattgtgtaacactagaaatatgggtgccaaaaagaaaactaaagaagtcatcggaatataatcacgttggatcttgttataataatttcattgtaacgaatttaatggtgttatcggatcacggattggacaaaaagtttttaaaaaaccatttgaagctaatgttgctcttttacaaggtggtgctagaaaataattgggctaggatttgcgaacactacgaattgaacatttgatacttacaaaatatcataaggtgtttcatcatgtgtaagtaaatgttttggataaatatatttcgttgtttcatcacttgaaaaaaattgtttcatcgtttgttagaaaatgtttcgaggagatgtaacattgaaaaatcattttatagatcgacgtttcgatcgtgtcattttatttgttataattaaatcttcacaccaacatctcaaatgattatattttgattgaaatatatatatgtcttcatcattataattcaatgtttcaggtatgagaaacaaatgtttcagctcgaactcgacaatgttacacattttttatgtttttttatacaatggatgttttttagtgttgcacacgggatgtttcaaataagtattttatgatgtttcgttatttcatttgtgaatgttgcaccagatgtttcttgcatgtctcaacaaatacattgtaggtaacatttgtaaatttagtagtgaaacgttgaaaaatacatgttgaaacatctaaacaatactatctgtgacattaaataaaggtccgttgaaatagaaaatttaaattctgcaacaaagtgaaatcctaattggaacatttatttctcacatgtgaaacatataattttaatgattgaaacatatatatatatattttttcatcggaatataatcatgtgagatcttgttatagagatttaattgcaacgaatatcatggtgcaatcaaatcgtaaatcagataaatagtatggaagaaaatgttgtttgaaaatcaagtttgtagttgtttctttgcatgtgtatctatctacgtcatcaaatatatctatttacgtagacatgcagtgaagccacgtgtgtctgatgatagcctcttgcgtcggacgctcggcgcaaagcattttcccaggttacgttcgagagttcaaaaggttcgatcattggttcattctcgcaaccgtccaaaggtgcgttcgttcgttcattctcgcaaccgttcaaaggtgcgttcgttcgatggtgcggtggcctacccatccctttgcccaaccgaagcttaccctaggccagccgcggcggagcaaacggagaggcgcactactacagaaacggattttctgtacgaggggggggggttggttccatgcgggtgagttgtgtcggcgcctggaaaaatcgccccccccccccccgggggggcgggttgaccagccgcaaaaataggcccattatcgcatgccgctagcctaagcagccgcatgcgataatggatcttcgcatgcggctggcttaaggagccgcatgcgatgattggccatatatgctcatccaggccgcgagcttgaccatttgaaaacgaagctttctctctcctaaagcaatctataattagggggggaggttttcaagtcaaaatttttgcttgaactctatacgaaaggggaaaaactctctcttctccatttggctccatttttgttatatttcgttggttgaatgtggagtttttttaatattttgacaaggtttgttctagctagttttttgcaaaatctagcttcaaaatatatgttttgatgggcaaattttgcatgtaatcacttgtacatactagttacatgtattgttgtaatttttttggagggacaaatgcatttaaacttttgtataaaatatctgctgtctattttttttatctgtaacttttttgtctttatataaatagatggatcggtcatcatggatgtatgagatgcggagaacgcagctgatatttattaaggcagcatctaaatttattgatcagtctaaggcgcatgctttgagggagaatatgacaaagatcttttgtccgtgccgtcattgcaagaatcataaattgttagtagatcctggtgaaatattaggtcacataatggagtacggattcaccgccaactacaaggtttggacctatcacggggaattcgccgatcccgaagatgacgatgaagagttaagtttcgagatgaatgaggcggagaattttataatcgaagacatgtcccgtgaaagaatgggtgtagatgtttccaccgatagtgatgatttcgagggtggttttgatttagaggatatgctacgccttggtgaaccagaggtggtagcgggcaggtcacgaggattggagaattggcaggcattagagaaggcattgaaggatcttctttacgatgaaacgaaggaatgtgataaggatttcacagtcttgcgttcagtgcttgaacttctgagattgaaggctaaacatggatggtcggacacaagttttaatgatctgatgagtttgttgcgtgtgtttcttcctaagcctaactttgtaccatcaaacacgtatcaaacgaagaaactcatatgtcctttatctcttggtgtagaaaagattcatgcttgtaaaaatcattgcatattataccataaagaatatgcagacttggaaagttgcccaacatgtggcacaagtcggtataaaacgggaaatgggcccgtagatacagagtgtaccgatccagattctgataagggtaagcgtagaaagattccctcaatggtgatgtggtacctaccaatcaaggaccgcctaaagcgtctgtactcaaacccgattggtgctgagttgatgagatgccgaaagacagatggtatgatttgacatcccgccgatgctcgccagtggaagacatttgatgcaaaacacccagaatttgctaaggatccctggaatgtaaggtttgcattgagcactgacggaatgaacccgtttggtgacttaagcagctcacacagcacatggccagtccttctcacaatgtataatcttccaacatggatatgtcagaaacgaaagtacatttttctcactatcctcatacaaggtccaaaccaacctagaatcgacatagatgttttccttgagcctttgatagaggacatggaggagctttggaaagaggggttacgactatgggatgagtttaagagggagcacttcaatctatgtgtgatcatattcgttaccatcaatgacctacctgcaaacttttcattatctgggcagattaaagggaagactggatgtctgatatgtttggagaaaacttcgtacaaatacctaacgtcgtctttgaagacagtgtacatgcgacatcgacggttcctaccacaaagacacaggtaccgtaagatggccagattgttcgataatacagtggagaatgacactgccccagaagcacgaagtggtacatacgtgtatgagataacaaagaagattaaggttgtatatggcaagggaaagaagaagacagtaaagatgaagaaagctgatggtgacaaagatactgcgttgcctttcaagaagcactcaattttcttcagatacttagattactggaaggacctagagattcgacatgcaattgatgttatgcacctcgagaagaacgtgtttgatagcaccattggcacattgctggacatcccgagtaagacgaaggatggattgaagtcacgtaacgaccttgtagatttggccatacgacatgaccttcacccagtagtgctgccaaatggaaagaccgagattcctcctgcttgttacccgttgacatttgaagagaaaaaagccttctgtaaatgtttacaaggggttagagtgcctactggtttctcatcgaacatcaggaagctagtatcaatgaaggatttgaccatttccggatacaatgcgcatgacttccataggttgctaacggtattactaccaattgctataagggcagttaaaccagtctataccaaggtggttataacaaagttgtgctactttttcaattgaatttcgcagaaggtatttgatcctctggaattaggtccccttcagacatttggtgtcgagaccgtatgccaacttgagatgtatttcccagcatcatatttagatttgatggagcatttgatcgttcacatcgtccctcagattattgaacttggtcccttatacttacatcagatgtgggcctatgagcgttacatgtcgatcctcaaaggctatgtatgcaatcgcgctcaccctgaaggatcaatgatagagggatacacaactgaagaggcggtcgagtgttgtatggattacataaaggatgctaatgccattgggattcctgttcatcgacacgaagggagattgtctggaaggggtactgttggtaggaagcagttcttcgataatgattacaaaaaggtgtccacggcacacaacagcattcttcaacagctcgctatcgttgagccattcattgagcgacaccttgaagaaatcaaagcctgcttcacagggcgagggtgcgagcaagcaatcaatctaaccccagta

SEQ ID NO: 17245 - DNA, 1311 bp, Oryza sativa
cggcatcaacaacatcgaagacccctatgattacaaccagttcgacgatgtaccattgtttactgatcttcctatgtgaattaagaatgttgagagaacaatcgatgaagcgaatatgtcgtacgttcgagcagatggtgttgccaaggttattaagtcatagttattttgtaacctttagttgtcattgtgttccaaatgtatccggatgaatttaagtgccccttatgttgtgctcattagcatgtaacatttggtaatgagttttcttactgccaaaattatatggaatttttgttgtaccaaaatattaaaaaatatatatatgtacagtttatttagatgaaagaaaaaaatgagtttatttggtaaaaagatctttccatgcgggcgacttaagccggccgcatggaaagatcattttcgttgcggccggcttaacggcccgcatgaaaagatcttttttgcatgcggctgacttaagtcgcccgcatggaaagatcatttttccgtgtggccacttaagccgcccgtatgcgatgatctgcgcctatatatagggagcgcggggagccaaaattttctaagtcccggcgcccacgaacccaagcacgccaggctgccaaaatttcccccctcgccgggtcgccgccaccaagtcctccccgctacagccggctcctcctcaagacctccctttcgccgtcaagtcctccgccggctcctccccgaagtagtctccctcgccgtcactgccgccaggacctctcccccctcgccgtcgccgccgcgcgcgaagtcctccccgccaccgccggctcctccccgaagtcgtccccctcgccgtcgccgtcgcgcgaagtcctccccgccaccgctggctcctccctgaagtcgtccccctcgccgtcgccgtcgccgccgccaggacctctccccctcgccgcgtcgccgccgccaagtcctccccgccaccaccggctcctccccaagtcctcccggcccctcgccgccaaggccgtgccggctcctccccgaagtcctacccctctctgccaccgccgtcgccgccggcaatacctccccgccaccgccgcgccggctcctcgggtcccaagtcccccggtaacatttcctttaaaaaaatgtgaaatgtgcaattgtggattgtggattgtgaaatgtgcaattgtggattgtggatagtttaattttgagaatgtttaattgtggattgtggatagttaaattgggacttatgttacattgggtctgatgtcaatctcggaattatgttaaattgtgacttgt

SEQ ID NO: 17246 - DNA, 1362 bp, Oryza sativa
  unsure (1)..(1362): unsure at all n locations
cccccccctccaacaaagaggccttatatggcccaaagagggcccccggggggttgaaaagagaccctctgggggttgtttaacaaaaaaaaagagagccctctttggtgttttgggacccaagagataaacacccttttgggaaaaaacacgtttgtggctcaaggcccccaacattggaaaaagacctgttaaacacccatttttcacaaaccccctacgggaaagggggtgccttaataccaaattttccaatgaaaaaatttttcaccctttaaatcacgagaactttttcccggaaacctccaagcaagttaggaaatctgcaaagtctgttgcaagatttcttggcaattaaaaccactttaaccgtgtacttccaactaatgatttggaattaatctggaatccaggtgttagttccgggggaaaccactgcaatgttaatatcccagatcatccatgatgatgaggaatctggtatcctttacttgaagacaaatacttgtctggctccatcccattaacanctggcatgttaaataatatgaatttatatacattggaaccacaaagttctctggcttacaattggaccccagtaatttgaccaagttagagcacctagcattaggtcataaccaattatcatcaacagtaccaccgagcttatttcatcttgataggctcatcctgctagatctatctcaaaatttcttcagtggtgaattgccagttgatataggcaatataaaacaaattaactacatggatatctatatgaaccgctttgtcggtagcctccctgattcaattggacatcttcagatgttaggatacctgaacttatctgtcaatgaattccatgattccattccagactctttcagtaacctatctggcttgcaaattttggatatatcccataacaacatttctggtaccatcccaaaatacctggccaattttaccagccttgctaacctaaatctgtcttttaataagcttgaaggtcagataccagaaggaggtgtcttctcaaacatcacgttgcaatccttggcagggaactcagggctatgtggtgttgtccgtttaggattttctccatgccaaacaacctctcccaaaagaaatcgacacatactaaagtatattttactcccgggtataatcatagtagttgcagcggtaacttgttgcctatatggaataattagaaagaaagttaagcatcaaaatatttcttctggtatgcttgacatgatcagccaccaattactctcctaccatgagcttgttcgcgctaccgataatttcagtgaagacaagggtaccgagctcgaatngcaaatcaacacg

SEQ ID NO: 17247 - DNA, 4326 bp, Oryza sativa
  unsure (1)..(4326): unsure at all n locations
catggcttttttgaattggcgtttgactgcaagtagctcatcattattccttgatacctggggtgtgtataacttgactagttgggctatatatattgggtcaacttgatattagatgtgaatgcttaaccatgcttagaaacattagcacactattgggataacttatgattcactattaattaatgatggcttactgatagttcacgatggtcaatcgtgattgggtaattaattatttgccaattaaaacctgataatgttgggttgagagcacatggttttgagagatcgcgctcatgacaattaaggaccggatcacgagtttcggttgtgaaacattaaccgtgccaaccacaagacagcgtgggcaacggctttacctttggtatagcatggttcattgcggagcaccagactgagaagtggcggagataagcccacgggggtcgctggggagtccatgccttgtttataaaggggtgattatgatccaagaaaggtgcgctgccgtggattgcgttgtgcgaggggtattgtcacagatcctttccgaggtaccgcggtggtattgaggcacatggagacatgatgtggtgctagttcttgtgggtacacgggtacacctactgtcagaggtaaactattcgaatagccgtgcccgcggttatgggcaggtctaaaaatgtctttcatgattagtctcacacttctcaccttaataaaagatgctataactggtaataatttgattagctcctggtttggaatggtatattcctggtttggagatagaactgtacagccgggatggttgttcagaatggttgggcctatacaacagggtatgttgtatagcgttggattaatattgtttaattattacttaactgttttattaaattctgaaatgtttatcaaatgctgtttatgcaaatgaaaccctactatgccatcctttgttatcctgtgcacttgcatatttgctgcgtggcttgctgagtatgtcatatactcacctttcaatcattcatcagaggaaaggttctacagtgatgctgatggtgtggaggatttggtgtagccctggtcaagctgcctgtggagtggagtcgtctgcgccgtttatcttatctttccgctgcttagatttttattgattgagaggaactatctacctctgtaatgacattttgttcgcttattaattagagtaataattgtactcaattatcaatttgttattgtgtgcctcggctgattcctggacgagggttcacacacatgtaagcgtttggaattttggatagaaattccgggcgtgacagtacgtgaagtacaaaagctcgcaggccgaattgcggcactcaatcgattcctctcaaaggcagccgaatgaggtttgcccttcttcaagaccctccggggcacgggaaaattcacctggacacccgaatgccaagcagcgttcgatgcgctaaagcaatatctgcaaagtctgctcgctttgatcagcccggcgccaggaagcgaactgctactatacctggcagcttcgccagtggtagtcagtgctgcccttgtccaagagacagagtcaggccagaaaccagtttatttcgtctccgaagccttgcaaggagtgaagataagatacattgaaatggagaagcttgcttacgccctggtgatggcttcatgcaagcttaaacactacttccaggcccacaaagtcacggtgccatcacaataccctttgggcgaagtactccgaggcaaggaagtcactgggcggctcagcaaatgggcggcggagctatctcccttcgacttgcattttgtcactcgcactgctatcaagtcccaagttctaactgacttcgtggccgaatggataccagtgtttgccgctgagcccgagcccgtcgaacaaccctaggtgatgtactccgacggctcgtggtcgcacaaggggacgggcgctgcgacagtactcactttgccagggggcgtgccgattcaatatgccgcaaggctgcagttcgacataaccaacaacgcggcagaatacaaagccattcttctgggcctgaaaaaggcgaaagcattggtgctttggcgcttgctgtaatgccccgattttcgtttgggattaaaaatcatttaataatgcattttctagaaattaaataaaagttagagcaatttaatcaagtgaaattatgggggaaattaaaattttcccttaaaaatcattggccgataatattttgtaatattctttgtcctaaatactctctgaaattttccgcgaattttcggagctcaatagctaattttaaagtcacaaagttcatatcatcaattaaaataaaaagaaaagtaataaaaattccccctctttgtttttgggccgccccggcccaatccccctcctccgccccttggcccgctcgccctccctcctttcccccttccttctcgtgggccggcccagctcggccccccctctccccctaagtctgcataaccccttcctggcctcctctctccttccctcaccgacaggtggacccgaggccccacctgtcagctcctcccccttcctccagccactccgccggcaaccgccatggcaacccgggtcgccccacgtcgccgctaaaactgccgcctcctgcctcccgcgcgcacatccgaccgtgcggacgtggtcgccgcccactcctccaccctctcccccatttttccccaaattttcgctccgattcgagctccacctcgcccacatcgccggcacccattcctccatcagatccgcccctcccggcctcgatctcgagctcctcaagttacatcagttccaatgcagagtcggtcaggttagttttcagaaatcaactatgcaactcgacaccgaagtcaggccagaagcaggccattcaagccagcagttagaactgatgggaaagttagtcaagagtcaatatgttcatgagctaagtgagagtctcttttatgtggactttcctatcctcagctaagggttaagttccaagtcttgctagaatgaaagtgcatcgtcattgctctattttgattgatcgatgaagttttcagttttcaaagccagggctctttgtaaatcggaaaagtgttggttacatttcaaagacaacagttcaattgatcccagtcaggcgaaagtaagactactctctgtaaggggggtaggtctcagagatgagtgttggctcacctcgtcgtcgtttcatttggaggttcaactcagtgcagccatttgggtaatatttgaagaagccaattatagggcgtcaacagaattacaccggtctcaggttatctgattggattccagggtaaacccgtgaggccaagtcaactgttcagcttaggcaagcagtgccaagaacagttgcagttcagccgaaagaccaatcaagcagcctcttaggatacctgtggttcccgtcagaagtaggttaaaataaagtcagaatctgtcattcatgcaagtccacatacaaggtttcatgaaagctttgcaagtttctagtatgcttggtgagctcacaggttactaagggagacaatgctagtggttcagtccaaagaaaagaaattctatgagcactagcaattttggtcaaggtcagactaatcggagtcggtctattcagtgtatgggaagcaacagaacagcaagcttatgcaggtttggttcatcgagcaatcagtcagttgaatcagaaagaggcagcatgtgtcagcagatcagtcagacagcccgccagcaccagctttctttctagccatcccaaaatcttgggacgagattcctgtaaggggggtagatttgtaacgcccccgattttctagaaattaaataaaagttaaagcaatttaatcaagtgaaattatgggggaaattaaaattttcccttaaaaatcattggccgagaatattttgtaatattctttgtgccctaaatactctctgaaatttcccgcgaattttcgaagctcaatagttaattttaaagtcacaaagttcatatcatcaattaaaataaaaataaaagcaataaaaattccccctctttgtttttgaaccgccttggcccaatccccttcctcctccctttggtccgctcgccttccctcatttcccccttctttctcgtgggccggccaagctcggccccccgtttccccataagtctgaataacccattcccggctcttttttcttcctcacgacaggggactgagtatacgttgcataaagcatatagntcaagcccc

SEQ ID NO: 17248 - DNA, 8201 bp, Oryza sativa
  unsure (1)..(8201): unsure at all n locations
cctctccaccggcaaactggcatgaaaaaccggggcgcccccacgtcacgcttaaaactgcccacatcctgcgtcccgggagcacgtccgaccgtgcggatgtggttcccgcccactcgtccatcatctcccccatttttccccaaatttttgtgccaattagagctccacctagcccacgtcgccggcacccattcgtccttcaaatccgcccctcccgtcctcgatctcgagctccccgcgctataaaaatgatcctcgagtcctcctctcccatttcctcatttttcccgagctccctgcgctctctcccgctctcctcacacgagcccaagcgctgccgctcgccggcgaccctccagtcggccgctgccgccgctgccgccgtccccgtgccgcgccgtttgcgccgccggcctcgccgagcgttgtcacaccccgtccatcgctcatcttccccaatccactaccgaaagaccacatccaccccgcacccatttcccccactctccccatgaaaatcggcgccagttaacccctccaccgcaagcccgaggagcgccgtcaccatctcgcctctctccggtgccgtgccgcttggtgagcatcccctccccatcctctctttcgccgcctctcatgccgtcgccgctcgtcgctggcgtcgtcgccggtggtctgggcttggcggtcgctgccgcctgtgtgcattcctgcctggccgtgccactcggccgtccgagcggtctcggccgatccgggccattgggtgcgcggccgagtggccggtcgccaccgtggactcggtccacggtgggccggtaccccttgtgtcgctgacgtatggggcccgccccttcgtggacgcggtccgcgcctcaccccttgctgacgacagcagtccccttttcctttgtaaaaataaataataattgcacaataaattgtatttagttctagaaattcatttaaatggctcaaaacttctaaaattcatatctaattcattcgaactccgaattgggccattcaacttgcaaaattcatctaaaattgagatctacatgtttgtttactttttatgtactgtttccttggtttttattagagtttttcctcgttttgcgtgctagcgtgtagaatccgtcgtttcggaagtccacggtcgcgaggaaaagagttcggaagattgttttgaagaagcaaggcaagtcacacattccccttgagcatgttgatcccaatttataaatgtttgaccatttgcaaataaacatacatgtcttgctaattacatgggatccgggtattacctatctgcttgcttgtgccatgtttacttgatatctgtcctttgtcaaccctgggtaataaatcgactagctcatgttacttatgtgacctagctagaattatatgcttagccatgcttaattaccactagctcagttgatgggataattacagtattagacctttttagtatcagaatgagctgcgtgctcgagacatctagccatgcttcatggtcgtaattatccaactaaaatgcgactgaatggtgggctgtgggtgcatggttttgctagtcgcacccatggcaattaaggaccggttcgcggtatgccctagaagaacttatcgtacttaccacaagccagcatgggcaatggttggacttatcgtacttatcacaaggaagcctaaaccatagagaggtacaacatgtctcaaacaagagtaatacacatgaaaatacacaagatagcacaagtgatcatacaatgggagacatgatagcacaactaggcaaataaggagataagcatcacaatcacaaagataaagagagtgagaggagacaaatgatttgttttccgaagttcggattctccaccgagaatcctacgtctccgttgaggagctccaaagagccgggtcttgattaaccccttgcctcaccaagaaaaggcctaggaagaggtctccggtcttcaagccaacacccctaggtacttctctttggtttcaagtgaccactaagatccccaacttgaacaccaaaagaacaccacaagtgaggcttgctctaccaagatgacatcctaaacctcacctcggattccactcaccgagttttccgtttccttttggaggtggaataacgccctcacaaatttgcccgggtcaattcacaaccttgttggaaactcgcgggcgacacctaaccatctaggaggtcaccctccaagagtaacaagcttcaaataatagcccaacgagataccccaagtgctcaagtcatcctagcgttcaaaaccttctccaatcctcaccaccaccctcaaaatcactctctcactcaagaagtacacaagatttgggtggaggaagcaaaatcacattgggagaggctagaacaagctagggaacacaagaactaaagtggaatggccaaagggtgacctggggacgagatccatatatataacggctaggtgacgtcatctagccgttactcacaagtttgaactggaaacctgccaggaggttccgggtaaaagtgccaggaacatccgggcagcacttatgaaatttttcaacctcacctcggtgccaggaagttccggacagaacctccgggtgggactctctgtcccgagtagagccattttcaaaaacagctcctaaaaatatttcaacacttggacaccactaagagcacttgtgttatctcagaaccacacttggaacccctcttaatagtacggtttttcctaaactcaaagcgaaaaagtaaactagtctaactcggctccaagtcttcttgccgctttgttttggggggtctccaagcatcctagcccactcctaagcaacctgggactaatacaccactaagaatgttatcttcttgcttcaccttgagggttgtcaacgtcaacgccatttcactattgggactattctcacctacacttaagcatattagtcccaaatcaattatacctttgccttgatcaatgcccactttggattttgacttgatgttcatcgaagaaccacatcctcttgatcctcggcattccatcttgcggtctaattgatacggattactcatagcttcaaatggcctcgcacagtccatcatgaccatcatgacaaagccttcactcgtccttcaccaccggattcggtgaatcggtgccaagcctcttgcttgcccttcaccccacgcatggtccattgtagccgagccttgcttgcccttcaccgttttgccataaatagccacttcatactccgcatcatcaatgtcttcacttattcctcattaaggtataatgtccatcttctagccgagcctttctttttcttcaccggtttgccatagatagccatttcataccccgcatcatcaatgtcttcacttgctcctcatcaaggtataatgtccatcttctaacttcaatcttttaacttgatggcggaacttaacctaatctcaccaactcatggaaatagttagttccaacaatgggttgtcattaatcaccaaaacaatcaccgcactcttaggatcatagatattccaatctccccttacaaggcaattctagtacatagatcttttaatctcccccttttcggtgattgatgacaacactatcacaaaataggaatttaaagagaatactctagtatatgttaccattagcatgaaacatatactagagggttggtttcatcaacatatgaaacgagtatacactttcccctttatatctctctctttatacttctccccctttggcatcaaacaccaaaagattgaatgtttgggtgggagcataaagaaaaagaaatcatcaagtatataagaactacacaagtcctatacacttgaaggaaaaatggtttaacatacctttggttttccaaagaggctacaacaagatgaaactctatcaaaagcgttagtttcaatatagcaaagtacaaatagcctcgaggtacacacgtatacaagaaaaacatgtgcaccaacaccgaataaagcaattgaactcatcgaaattccaatagaaagagttggagtccaaagaaacaccaatccaaagcaagcacttttttgttttgtgcttatgaaccacaccaattaatagaagaataccaatcaaaagagataggccttgattatagtcacaattggtaagaacccatatgcacatatagcaaatacattgattagttaaactcgcttaatttggagaaaggcacaaaagcataattccaaaaaaaatattttctctttaatgcatctcccaaaactcacttaaaggagggcaaaaagtatgtcgggcatataatgctatagacaagtcatgtatgcccgaatgaaatgtctcataagccaaaacccaataagtagtgatgatgaagagacatatcaagacttatgaaacatcacaacataggatgaactccttctaaatacgtgcatagcaaagagtgaaaagaaatctttatgcactttcacaaaagaaatgaaggaacaaaagaatccatcctatattatgaaatcaaggttgcaaagaaaatccatagaagcaataatgaagtctaccttgggagtcatccacttccaacatgagaccaaagaataaactcaatttaaaccattagtcttccaaggtatagaataaacttcccctcaaggtgtgcatataaggataaatttaatgcatacatatgcactttactaaaatgagaatcggggaggagtttacactatattttgggtcaaggaggcaaatatcaccaaaagaaataaattgaaggactagaattgtaaagcacactttcataaacctcacatctcaagatgatggtgcttaaccaatctcatccttcttcacccattccttcggttgtcataaatcaatctccccttgatccatcattatctcttttctctatttgaatcaatagaaaagagaaagcatcaaaagcacacgagtttcacaaataatgatccttttgatgtggaggaaaattggatcacttatttgtgaaacctcataatatagactaaattctcccaaaagtaatgcacacatatggtggaaggcaaatttatgtgcattatttgacatttaaatcaagcaagggaatttaatccatattatgaaaggtagctagataaaatataagatgaaaagttaattgaattaccacttgtgaatagcatacctttgagaatgtttcacttctcatgagactaaacataaaatacacttaacaagaagttagtctaaaaaaatacaaaacataggacatgctccccctaaatatgtgcatgcaagcatttgaattacttgatagaagcatgcacttgtctaatgaaaagaaatgaggagtacaccctataatttcaacaatttgcacataaatgatttgcaagaatatacatgtgccaaacattgggtagtaataatgcatgtaaattgccacaagataatagatggcaatcaaccataagaaagaatattcatgacacttgaagcttgtatatgtagagatgatgtaaaagatttaccattggagcatacaagtccttagtagaccgaaactttcggttcatacatgaaggtaatccaatccatgggctgaaaaatctacaacaaaccttggagatagattacacgataatgcacaattttcattgcgggagcattgcccatgtctcaaccaacatgcatgtacaaggatcaaaagaattaagaaagctgaaaatttgaagatgttcaaatttcggaaactcaaaaaataacttagaaagagcattgaaatgacattcaaatgacctttgataatttagacaaaatttggcagtgaagtccaactatagagaatcgaaagtcacaatgtaagctctttccaaatcacaacaacacaacccattttgagatataaagatcacaaattagctcaaagtcaagttttactgaaaatttctacaagttgagaaaagagagaaaaagtctgaaataattcaagcttgcaaaaaagatctttgaacttgagagaaacttctccaaaattaatttcactaaatgagttttcgataaagagaatgacttttaaaacaatgaatttcaaccaaaagattttttatgaagtttgacatttggaaagacttaagatgggttagaaataccaaattgagccaatgttcacaaagaacattaatcaaattgcttaaacccaccatatgcaaatatagaccaaatatgatcaaaacaacatgttggataaatgacattttgttccaaaaacaaaaatttcactccaaaagctttttagaacatttgaaataaaagatgaagccctttgaaacatttttcacaaattttggaccgtcaaataagaattttgaatttttaccaaaagagacccttttagaaaacatgtcatctaaacttttgaacttttaaattttggaagcttgagctaaacgtttttgggccaaaacaaactttaaggttaaaccaatattttaaaacaatgttttgaggcaagttggaccggaacttcctaccaatttgtccggaagttcctatcggccctctttgtctccacagagagtcctgaccggaagttccttgtactttgtctggaacttcctagcagacaaaatcagcacgcgagaactttcaagattttgctcaaaatcacccaaacaaactcggaatttcacgaaatttgaaccacgagctcacaacaacatgggaaatcagatgaaacaagaaataaccaaaatatttaatatttcatcaccaaatttaaagaacttggaaaaccaaaggtaaaaaccgagtttttggaaaaccatcaaaatccatggtgctcgtgtgagggatttgtttgaggatcaccatatgttcgttcacaattgacctagcatcaataaaatcacttttaaaggattcatgtttaattccttgctcgaagaaagataaaaagttgaagttccaacaaaatgacccaaatgcaattttgagcaaaatgagatgttttggagacaatttgatttttatgagtttgaaatacgtccatgaaccaatataaatcacaatatatggttctagtggctaaactcactcgatgctataataggaccaaatatggtcaatataaattttcatgtgaattttgagatcaaataatttcaaatcatttatcatataaaatagatataaataccaaaaagatttgaaatgaccaactctagtggcttgtcaaaaggattatttgcaaaaaccttttcagatacattttgacataaacacactttaaaagcaaaaacaagatcttagcatctagatttagaggctaaaatcatttttgtcgcgtcccaaaacgactctaaaatacatccttgaaattatgcctagaataattaaaatccttgtgaaagcctccaacaattaaaatgtgcaaagttaaaagtcaaataaggcttggaggattttttttatatttcctaaaagcctaaaatgcgtaaataaattttagtggaattttcagagcacaaataatatttaagaagaaataaacaaagttaaaatggttttataaaaagaaaaaccctaaaaagatccctttcccttcccctctccctcttgggccggctcggcccatccctttccctctctcccctcttccccgcggcccattcggcctacttcccgcgcgcgcgccgctgacgggcgggcctgcccgccaccctcgctgacgggtggggcccacccgtcatcccctttctcccgccggtcccgccgcctcgcccgtgccctagcgccgccgccggcgagaatcccgccgatcccgtacgtcccgcgtgcaatcaagaggggggaaatattccccgtgattacctccctctttccccccatttttccctccctctctccctcggattcgttcggaaactttccccctaacctcgccgacgcatcaatggcggccggatctttcgcgcccgttttcccctcattcggacggtctctccccttccaaccctatataaacactccccgtgccttacttcggcgtttacgcactcgccgctcttctattcagcgaataaactcgcgccgtcgcttttctcttcgncgtcaccggcgagctccggccgc

SEQ ID NO: 17249 - DNA, 4577 bp, Oryza sativa
  unsure (1)..(4577): unsure at all n locations
aggccggcaacagannnattttctcccccttcccaacattatataaacactccccgtgcctccctccaccgtttccgccactgaccgctctctctttcggcgggaatcaagctggcgcagtcgctctctctctcagcggtcacagccgagctccggtccgccgccgtcgtcgccccggaccttctcccgcttcggcgtcgccttcttcgggttcgccgcaacctcgccgacctcgtccacctctccgtttcggtcgccgactgccggaacgccgccgtgcccgtcgacccgagccgcgccgccgcctctctccgctccggtcgtcgtacccgtcgtcgccgtcgacccggggtgagccgtggaccgccgattcgtttcccccttccctcccctctctcgggcgccgctccgccgcgccggtggtcgccggcggcgaccatcggggcacgagtgcgccacctcccgtcggctgtgccggcgtggccgccttcgggcgcgtcccgcggctgccatgtggggcccggccgttagccgcccgcgccctcggatgcggctgacgcatgggacccacggcgccggccggtgtgagccgggtgcacccggtccaccgtggaccgtgaggctgccgcgtgggccccactcctgtggacccggtccgcgcgcccctcccctcggctgacgcaataaatccaattttaaattaaaatttaaatgaagaaattcacaaatattcatttaaagagcatataaccttcaaatggccataacttggccatttgaactcggaattggaccgttcaagtctctaatttttccttaagaagtcaagaacccatttttgtgctttgttcctgcttgttatatggagtttattagagtaaaagccttttcttttccgttggtcgtgtagacgctgcagcttcggaagatccgctcttcgtggaagttgaagccgacgtttgggaaagcgagcaaggcaagtcacatcatccttgaacatattgaatcccagtttataaaattatgttgctttaaattattgcattatcgctttatttaaattcccgcgttatcactgttttatctagccatgcctatttacctttgttatgaccttattattattgttattgttattattaccttgttcaccctagattaaacaaaaccccaactagtggacactcttctcatggtaccactagtatgattttaggtagatgcttcgctatttaattaggtaacattaggtggtttttcaactctagactttgggaatattcatatcacctggacactatggaatggtttggttattgtggaattggcttcacaccgctccttctattcaaaatccccaaaatagttttaggctgggctcggggtgcatggttttgatagtagcacctcggccatataaggaccggtcttcgggcctctgttgcaaagcactaccgtacttccacatgtctagtgggtaaggcttagtttgtggctcagtctggttataaacaaaagtacacggatggagatggaagaagtcgggggtcgatggacatctctaggacaaatgaaggctacacgagctgcggcccggtagtcgagatgtcatggcacagggccggtgtcctgctgctaggggctcagtcctgcctgcctgtcccgagggttccagccgtaggtgggattgggtcggtactcttgtctatggctaggatgggttggaaactatgtcacgtcttccgtccgtataccgtggtggtatgtggcacgtggttacacgtgaggaagatgtgtcttgtgggtaaagatgtacacctctgatcagagtataatctattcgaatagccgcgccctcggttatgggcaagccgagcaatgtacccaagttagtgttttaattcttaaaacctgcttaacaactaaaatgtggaatggttggcctgggttggcttgggacgagctgggacccagggtcgggttgccagttcggtctgaatcatcgtaggccttgggttaaggcaggttcgtgtgggttcacggccttgataaataatattgtatagttctagaatcgtgtttacaaaatagctttgagcaactaaatatctttaaatgctgtttactgcaaccctaaccctttatagtataactcctttgtactcccttgcatttattctgtacttgtgggtgtgtcttgttgagtacggtggttgtactcagtcttgctcaatttttcccaaacccagaagaggagcccctagaagatgaaggctttggtgtctagctcgtgccagccgtcaagcgcatgtggtcgtcgccctagtcttccgctgcttctcgtttgtctttgtgtgtgctgggccttcgctgcccatgtaataatttaactatttacgcttccgcttgataaactctgaaatgtatcaacttttggtgtaccttgcctcctgggacaaggaataatacacgcacgtaaggaacgcccattgggttaattccggtcgtgacaattttcttgccaaaactcatttttgtttgaatcaacttttaaaatacctctcaattaggtgaaggaacccttttgaacaaacaaaaccaagttttcacaactaactttatagatttttactttttaaccaaaatagaattttgaagactattatagcatcaatttaatcaaaacacatttaagggatgcaaatgatatgagaagttataacactccccctaaatgagataaccaaaacattactcaagatcaaatttgccaatcaattaagcaccattaaaggatagacattatacacaagtaataacctacacaaggttaggatatagaaatttcaatgtaaatacttgttaccgagatgacattggttcttaatgtagaacaattattcacatccttgattccattttttgctcattgcacaaagttagttcttcaaggatgagttgagcctccaatgcacctccaagtacctaattgacaatctaagcatattttggtacccaaatcacgttgggtccatggatgttagtcacaagagatttagggacccaaatggcctttgtgctagcatgtagcgaactaatcaccctagtagcacaagtgccatttttggccttcctaagcaaattgtgatgaaatgagaggtttggcttaggaattttaccaatgggacaatttttaccaatatgtccctttgcccggcaattgtagcaaagttgagttttgcttttatcttgcttcttgacttgcttgttgccggtttgcctcttgcttgatcgattgctatgatcatccttcttgtgcggacaaaatccaatttcatgccccttctcaatgcaaccgtagcacttccttctgttgattcttgatgtctttcttggaagtgtggcttcatcatcaatcttgcaaggacaacttgaggcaaagtgtccctctttggtggatttgaagaacttgtgagcaagatcctcattcttgctcaacttcttctgtttcttccaagggcaatctctcacatgatgtcccattttcttgcacttgaagcaagtaatggaagctttgttcttgctttgatcttgccccttgctcttgttgttggacttgttatcttcttgatagaacttggtgcaagctacggttgatcccttctcaagcttcttcagcatgctttcacggttatcttgagaaggttgagcattgcaaacaaatccatgatcgatgtatttatcctttttccctacataatccaagtcacatgtagtgcgcagaaaaatatttgcttgagagcaacaagagttagcacatgtaaagtcaacttgaacatgaggcacataggattttaccgttattatgatcacctcatgagttacttctagcatggcatgtgaatccacaagatttccatgagagcacaaaagctcatcatatttttcttgtaggtccacatgcttgctagtgagctccacaagttgagctttaagctctagattttctttctccaaatatgatttctccatgatgcaagaatattcatccaagtgtgaagatgagcatcttggagatgtaaattcttcacttggccattttttcccacatacttctaccttcaaaagattagttcgacaagcactataggaagtagaagtatccacattgacgctactcaccatttcattacctttaatggagacatgtgttggtgaggaggtgaatgtggcaagactatcttgctcattggatagaatcacttgaggctctttacaaattgtcgatgaatttgagcactccacaagtggttcttctatagcgagctttgcctcatcacactcggacttgtcatatctctcctcgagtgtgttccaaatgagatgagcatcctcaagtggcatgatggattagaacacatcttcactcaaagcactaaacaaaatattagtagcttgagcattgagatgtatgcatttctattatgcttcaaatgatatcatttgatcactaggaggagaaatgctcacatctacaactcgctatatttgaggtcccatgaccctaaacacataaa

SEQ ID NO: 17250 - DNA, 701 bp, Oryza sativa
tttgtttccagttattgcaagtgctcatcatgcttaacccaaggcctacgatgattcagaccgaactggcaacccgaccctgggtcccagctcgttccaagccaacccaggccaaccattccacattttagttggtaagcaggttttaagaattaaaacactaacttgggtacattgctcggattgcccataaccgagggcgcgggtattcgaatagattatactctgatcagaggtgtacatctttacccacaagacacatgttgctcacgtgtgaccacgtgccacataccaccacggtttacggacggtagacgtgacatattttccaacccatactagccatagacaagagtaccgacccaatcccacctaccgctggaaccctcgggacaggcaggcaggactgaacccctagcagcaggacaccggacctgtgccatgacatctggactaccgggccggagctcgtgttgccttcatttgtcctagagatgtccatcgacccccgacttcttgcatgtgcatgcgtgtacttttggttataaccagactgatccacaaactaagccttacccactagacatgtggaaggtcggcagtgctttgcaacaggagaccgaagaccggtacttatatggcacgagggctgctatcaaaaccatgcaccccgagccagtctaaaactatttttgggattt

SEQ ID NO: 17251 - DNA, 775 bp, Oryza sativa
cgtgtgaaaatttgacagttggttatcatcttctgattttaaaagaaattaaaatattttgagggcccctaaaagtattgtgggcactgtgctactgtccttaatggagaagtgggccctggttggatccttctcataatttaggcctcagtttaaatgtcacctactccagggttccctaacccccaggccacagaccggtaccacctgaactctgcctcctatcagagaatgctttagattctcataggagcgtgaaccctattgtgaactgcgcatgcaaggggtctaggttgcgtactccttatgataatctaatgcctaatgatctgaggtggaacagtttcatcctgaaaccatcaccaccactgcgacccccacccggggtccatggaaaaattgccttccatgaaactggtccctggtgccaaaaaggttggagaccactgacctactccaaaaggccttccttgaagcctgcatttaaaatatcttctggccgagcatcgtggctcgtgcctataatcccagcactttggaggccaaggcaggaagatcacttgagcccaggagctcgagatcagcctaggcaacatagtgagaccccatccctacaaaatattctttaaaaaatagctggacatggtggcttgctcctgtagtcccagctacagactgaggtgggaggatcacttgagcccatgagtttgaggctgtagtgagctacgattcccaactttgcacttcagccctagtctgggcaacagagtgagat

SEQ ID NO: 17252 - DNA, 72402 bp, Oryza sativa
  unsure (1)..(72402): unsure at all n locations
aggagcgcgtgcgcgtgcgtgcaggtgctcccctaggcccaccacatgtccacacacacaactccattgcaaaaaatcacccacatattttagaaaacctttattaagagaattcgtttcattttttgttccacctagtgtactcacaatatttcactatgtataaatataatgttgtagtgaactgaaacattcttttgcaacaaatcacccacatattttggaaactctctgttaagggaattcatttcattttttattctatcaaaaatagttcatctagtgtactcacaatgtttcactatgtattagatataatgttgcagtgagctaaaacattctttcgcaatttacaaaaatattgtttttttataaggtgaaacaacgtccaatttaaacgattgaaacattttcgatcacttagtgaaacaattccgatatatttggtggaacatcgtgtaacatttaataataattcaatgataagccaaaaaattttttgtcggaatatatccatgtgtggtcttgttttaaagatttaattgcaatgaatttaatgggtcaatcggattatgatttggatagataatttaagagaaaaattagtttaaagtggttttgcacgtatgcgtagcacccgatttttacacgtatgcatcagaggcctaggcctgatcagtagccccctccgataaaagacgttatcaataggtgttagtttgccgttgcaggtgataaatctttcgtacatcacgtgtgccgtattactgctgaaatatacagagccaatatacggcaggcgtgctggcacaccctggcaggcacgatcccaggccgtccggctcatatgcatggctgtatgcggcctacacgtagatacgtgcaatcgggcataatggattatggacgttactagacaggtagtggtagctggtttgtctaaactagctaccactctatctatgagagatcctatccacctatattttaaataaaattttctcttaaactactcatccgatctacgatccgattacaccgttgtgttcgtaacaattaaatctttctaacaagatctcacataattatattttgatgaaaaattataaattgcttttataatatatctaaatcacttttagctttcactaagttacttcttagacatataaaagtaaatttaataaagcctaaaagtaattacatatattatattatagaagtaacttttataatatatatgtaaattacttttaaagttactaaatttacttttatatgtctaagaagtaacttagtgaaatctaaaagtaatttagatatattataaaagtaatttatattttttcatcaaaatataatcatgtgagatcttgttataaagatttaattgttatgaacacaacggtgtaatcggatcgtagatcggatgagtagtttaagagaaaattttatttgaaacctccaccacatcttaggaaacctgccacgtctgtctctctcattctctctttgtctctctttttcttgcacgctaatggatgaggaggatgacttgtggtgggatggctaggacggttttcctggcgtcgagcgatagcgccagatcgagaggcctcttgaaatagtttttgcgatggattatccgttgatctcttcttggtttagcaccggtctgcttctgctgggcttgctagctactatctccgttttaggttataataacgttttgactttggttaaaatcaaactatttaagtttaactaattttatagaaaaatatagtaatatttttaacccaagataaatatattatataaaatttagttatgaaactatgctggtgtagtaaatattattactcttttctaccaaattagtcgaaccgaaatccacaatagttccggttccactaaaaaccagcactaaaaaggatctttagtcccggttggtggctacaacgggcatatgtaatctttagtcccggttgttaacaccaacgagtactaaagatcatctttagtcccggttctaagcctgtcaggcctatcaggccccccgggatctttagtctcggttggtgcccagcgatcttcttcctcctccagcccgagcaagcttcaaaatttctccaaaaaagaggggaggtcataccaaaatttcttgtgaaatttttgtggtgattatatataaatcggaggtgtctagaaggatagtaacttcatcctccaattgtttttttttgttatattacttttggagcaatgtttcacacatttttttggtctccaaaactttgttgtaagttgatgagagagaaaatttgtgtggggaagaagaatatatagaaattttgtttgtttacttaaaaaagttttattctctagcttaaaatataatgaaaattaatcttaaaaaaagaaaacaaactaaattgaaaattaaaagaagtacaacattaatattagtttataacttcaaaaataataaataagaattgtttgttggattattttataattattgtatgaattatgatatgtcattattgtatgactgttgaaagagtttttaattattttatcattattgtgtcattattgtacggaaatttatttatgtatgatttttttcatttcatgtagatggatcggcaatggatgtatgttgaccggcggtccaaagagtttatcgatggcgtgcattattttttgagagtggtcgaagctaacaagcataaggattttatttgttgtccatgcaataagtgtaagaaccagaaggagtattctgcatccaggactattcatttccacttgtttgagtcgggagtcatgccaagctataattgttggaaattccactgttgacggtcgttatcgatcagttttgaccgtcaatattactaaaataaaggagaactagtaatgcttgcaatgcatatatctgttagaataataaacttccactagtattaggtatactaacctcttgcagggaatgacactaaagtggaggagaatcgacatcaacatagacgataaatcaatcggacgatgtcgagaaccagacttgtgtatgaatgggccaaaaacgcagacttgacacgatgaatcaggccaaaattcacaagtctacgaagtgaagcaatagaggaggtagccagccgaagatgggctggtttgggccagcccatggttcggccgaacccccatctccaccgttgaggccagggtttggcatggacgtccaagattgcaccccaatgacggttagagggtacttcggacaattccccttccacaaccgtcataaccacctctatataaaggcttcactctcttcatttcaacacacacctcaagcaatagctctctcatttctctcaagtttagtttagtagtatctagctggtggaatagaaatagaataggagtcaggagtccggaaaccttcggaagagttcgggtatggctttagcagctttcctcttctcttttgtaagctttgtacttttattagaatactcttctatatacatttatggtattgaaatacttttcgagtatatgagtacctactttacattatgttcatgttatactgaatatacggctagcttatctgggagatgctttagtgcgggtataatgtttgcttatgcaattactctatgtcatgacgatgatattagagtagtatctggtagattaggcgtggtgtctagattacgggatatcattatttggggttatatattgcggatgagaggtgggccgctgatggtgacagctcagtacgggtattcctccgcgccagtatataatcctaagttaattttctggggagggtattcctctgtatttagccccggttgtatggtcatgacaggctgtcgtaaggaactcggcagtcaggggtggcttctcgaagtatcaggagggcatcggatagagggtattagctagtatatcagttaactagaatgtatgtatactatgtatattagaagtataggaatatattttctttctcttttctttccacctagcttagataatttattatgagaatgagttgttaatgcttgtgtctcactctacccttagattatgttaacccctgcttagaatatgattatcacaagtaatatataaattattagttgagttctctctacatgatcttcccacgggataaaataaatacgatactgacggagctcgtggctcctcaccgggagaccgcgcaggcccccctttgccggttcggccgggggcttagggtgagatctcaagctctctctgtatgtggaaagatcgcgtgccaggaagaaacgcgagacacggacgatgtatacaggttcaggccgctgggaagcgtaataccctactcctgtgtttttttggtggatctgtgtaagagcaagttacaaaatatcaaccagccctctcctctcccgggaaaatccaaaaatcccccccttctctttgtgggcatggtcctccttttatctcttaaggggataccacatgtacccttccctttttaaactggacttttcttctttacataaatggacggagatttgcacggttgccctccgaacgtccttctgatgggacggcacatacctacctccacttctgccgggggcaggcgcgtcgtgggaacgtggctgtgcgctgacgacatgagcagtgtcagaccggtcacaaatcggtcattcttgtccaccgcgtgtcagcttagcaacgtgcatgtttgcccttcttcacacaacatcttgcctgtaatggttaggatgaagcctggcatatatcgatcggggctaacgtgccatctctgggatgtaacacgccagctccagctggggacgagtgcctagaggctctcatcttgacgggacggggcgaggcgtgagtcagaccgccagtcgccacctaaccgttgatctgaccggtctgtgactggtcacagaccggataaaagagcgcgctgcattgcgctgcatgcagcgtgacacgcttaaccagaccgcaataaatgcggttaggtgagccctaccatgttcacccaacctatgtacatagtgcaaaccccacaaggggtcggggcacctcggccctcggggccggggcaggagcaacccgaccccccctcggggaaatcaggaggagggcggacacctcaccctcgggcccgacgtccccgaaggtgccaggccacgtgggcgattccatctgcctcaagcctccgggcgcaatactcccggtcccatatcaccgacagtagcccccggcgttatgtcagggcgattatccttctcaagggaagcggtcgggcatgacgccactcataaagcctggtgacaggtgggaccggtctccgtgattgggcagaaacccaacggtctcaaaccacgcatatcggtaacggtgtctgggccgtcagtcatgggcggtctcttcaagactgccacatcacttgagcagcgctcgaatctgggcgtgcagattcgtttcgtctggagatatggtaacgtcgcttcggtcggcgatcgtaattaacgcgcacacgatacgatctatctcgactgccacaaccgcatatccacctcatgcgccgcaagcgggcgaatggaattagtggaagcgtgggcgcgagaaacgagggagcgagatagcgagtaacgagggggcgagatagtgggcacgagaaacgaggagccgggctcagcgatgggaagggtataaagccatcgaggaaaagacttgctcccttcctttcgccactattcccctttccttcgccgtttgcgccctaaactctctctttgctgcgcctcaccttcgccacacacgctcgttctcaaccctctctttctccgacgacatggcacggggctccgctctgctcgacggtagcgtactaccgccttcccgcattgtgggcgagaggcaggctgggctgccgcgccgcttcatgccggaatccgccaccggccgggagatagtgatgctgggcgaggcgcgcccagcaccagattacccggggcggtccatcttcttcctccccttcgcaatggccgggttggttcctcctttttcttctttctttatggatgttctggagttctacgatctccagatggcgcacctcacccccaacgcagtgatgactttggccatcttcgcgcacctgtgcgagatgttcattggggtgcgcccatctcttcggctgttccggtggttcttcaccgtgcagtcggtgtcgccgccgtcggtggtcggtggttgctacttccagccgcgggggccagtgttgaatcgctacatcccctgcgccctccgcaagaagtgggacgattggaagagcgactggttctacaccccccttgccaacgaagcgcgcctccgactcccaagccagcccccggcgccggtctccagctggcgggcgccagtagatctgggggatgactatgacgccgtccttgaccgcctggcgggcctgcgatctcaggggctcacaggggccatggtgtacggcgactacctccgtcgccggattgcgccgcttcagcggcgcgcccggagcgcatgggagtacaccgggtccgaggactacatgaggacccaccggggagtcagatgggattgggctcccgatgacttcaagatcgtggtccaaagggtgctgaatctcagctccatggaggcgtctcttattcctcaaggactcctccccctctgctgcgatccagaccgcgcctccattctgaccatcatgatgggggtcggggcctcagaggaggtggctcctaagggccacgacggcgccggcgggagccgccaggaagaatcaaccccaggagggggccgtgcttctgggccccgcgacgggggctcggggagcaaccgccctgccgacgcccgggggaagaggaaacagggaggaacacctcccccatctcctccccgaggggacggggcggtgcgtgccagccgcaggcgcccggagggggccgcgccgacatcacagcccgagacggagcgcaagaagaagcggctccgcaagacgggggagacggaaccatcccggggaaacctgatttcccctccaaggtggtcgttcaaccgaccccctcgcaggttcgtttcacgcctttcacaaccatcttccctttatcccaatcagcaagttttctcttatccaccttgtttgtcttccggttttttcttctgcttcagcgatgtcccgtcgcgttcctcccgccatcccaagtccggccaatccgaggccgaagatccggcggccgcagaggaacggaggcgagaatctgaccggcgagaggccgcagatcgccttcgggaagctgaagaggccgcccgggaggccgctcgggttcggcaggcggaggataccgctcgggaggaggccgcccgggctcgccaagccgaagaagctgctcgggaggaggccgcccgggctcgtcaggctgaagaagccactcgggaggaaaccgcccgggctcgccaggctgaggcgatggcgtcttccgaggcggttcacgacaagaccgccggcgcgtcgctcgggcccactccttcgggtgacgctcaggcgacaacctccggggcggctcgcgacaaggccgtgggcgcatcgcctgggcccgctccctcgggcgacgcccaggaccaaacgggtccgggggacatccccgagctcagtgcgtcttctggcgggccgagccgcgtcgcattttctccaaggcggctcttctcctcgtcttctgccgccccgctgagtgccgagccccttctgcaagccttggccgccgcaaacaccgcggtgctagatggattcagcgcccaggtggaggccttgcgagcggaacgagcggagctcgaggccgcatgggcgcgcgtcgaggaggggcggcgctcggtggacgccatggtggaggtgggccgtaaggctcaccgccgccacatcttggagcttgaagcccgcaaggcggcgctggcggagatcgcccgagaggtggaggaggagcgagaggccgccctcatcgccaccaccgcgatgattgaggcgtaggactccctccaccttcaacacgggagctgggaggcggagctaaagaaaaagctcgacgccgcccagggggtccttgacgccgccgctgcccgagagcagcgagcaacggaggctgaagcggcatcccgacggcgcgaagaggcccttgaagcccgtgccatggcgctggaagatcatgccggcgtcgtggagatcagcttggcggaccgcgaggccgccgccgctatccgggaggcgacgctggcggcacacgaggccgcctgcgccgaagaggagtccgcgctccggcttcgcgaggacgcgcttgctgagcgggagcgagctcttgaggagtccgaggccgcgacacaacggctggcggacagcctgtccctccgcaagacagcgcaggaggagcaggcgcgccgcaatctggaatgcatccgcgccgagagagccgcgctggagcagcgggctgctaacctcgaggcgcgagaaaaggagctggacgcgagggagcgcagcggcggggcggctacgggcgaaagcgacttagtcgcccgcctcgcagctgccgaacacaccgtcgcggacatgcagcgcgccctggactcatccaccggggaagccgaggccctccgcttgtcgggtgagatagggcccggcatgctttgggatgcagtctcccggctggatcgcgccggtcgggaagcgggcctctggaaaggccagacaatttcgcgttctaccaatctggaaggcctcgccccgcaccttaggaggatggcctgggctgtccaacaactccccgaggagctcgagaagaccatcaagtcatcctcaagggacctcgcccaaggagcggtggaactcgtgttagcgagttaccaggccagggaccccggcttctccccatggatggcgctggaggagttccctcccgggaccgaggacgatgcgcgcgcgcgggtccgggatgccgccaaccacatcgtccaaagcttcgaggggtcggcccctcggctcgcgttcgcccccagctccgacgaggagggcgacgccagcggtgaggacgacggtggcgacgaggccggcgacccgggcgcattggaatgagcccccaggcccccgccaatcttcaattttttcattttctttcttctttttgtatagatcaacttaatctgcaatcaaaaatgatgaaaaatctctatgttaactttattttgctatgcatatgagttgaggatgatttgtgccgtggtccttttgcattttagcttgatttaagggctcgtgctcaagtcccgatcctcaaatggctcgggtcggggctagtgcctggggagatccacatgtcgagactggccaggccgggaacatggtgaccgagggttatgggtgacccgattgtgggtttttgccgattcccccccggagttcaccacgccccggggcacggctcggttctgggccccgcttggcgattttagctgaccgaaccgagcccccgagggcaaggttgagcacgagtgaccttatttcaagttaagattcttcagaaggaaaaacggcacagacacaacctttaggaaattgaaactgcttttattgaaatgctgaaataagaaaagtaaggctgtgcatgtgtggtagcccccggctaaccctgcacacccgaggggggtgcggggttagcccgagcccgaaacctgacacccgacccccccctcaggggtagaagcgacgaaggtgttcgatgttccacgggtttggcagctcagtgccgtcgcccgtggccagccgtacggagcccggccgggggacaccgatcactcgatacggaccctcccacattggtgagagcttgctcagtccagcacgcgtttggacgcggcgtaggacgaggtcgtcgacgcagagtgatcgggccaggacgtggcgctgatggtagcgccgcaggctctgctggtagcgcgcggctcggagggccgcgcgccgccttcgctcttccaagcagtcgaggtcatctctacgaagctgatcttgatcagcctcgcagtacatggtggcccgaggagacctcagggtgagctcggatgggagaaccgcttctgcgccgtagacgaggaagaaaggcgtttccccggtcgctcggcttggtgtggttcggtttgcccagagcaccgctggtaactcctcgatccatgaatcgccgtgcttcttgagaatattgaaggtcttggttttaaggcctttgaggatttctgcattggcgcgctccacttggccattgcttctggggtgggcaggtgaggcgaagcagagcttgatgcccatgtcttcgcagtagtcgccgaagagttcactagtgaattgggtgccattatccgtaataatacggttaggcactccaaaacgggccgtgatgcccttaatgaatttaagagcagagtgcttatcgatcttgacaaccggataagcctcgggccacttagtgaacttgtcgatcgcaacatacagatactcaaacccgcccggggcccgtttgaacggtcccaggatatcaagcccccagacagcaaatggccatgacagtggtatgatctgcagggcctgggccggctgatggatttgcttagcgtggaactgacacgctctgcatcgccggaccagatcgactgcatcattgagagctgtcggccaataaaatccttgacgaaaggccttgccaaccagggtgcgcgaggcggaatgggctccgcactcgccctcatggatgtcagcaagaagctcaacgccttgttcctgaggaatgcacttcaggaggattccgttagccgcgcgccgatagagggtcccttctaccagcacgtagcgtttggaaatgcgttgtacgcgttcactcccttcgcggtcctcaggtagagtcttatctgtgaggtatgcttggatctcagagatccaagcaatcaatctaagggagcttggagcgctcccttcgggtcccgaggcctggactccgacgggcctcgggggccggtcaggcgcatccgtctcccctaaggggtcgggtcgcgccgacggctgggtaatcctttcttcaaaggcgcccggtggggtctgggctcgcgaggacgcgagccgtgagagttcgtcggctatcatgttatcccgtctgggcacatgccgaagctctatcccgtcaaaatggcgctccatacgccgcacttggcgtacataggcgtccatttgcgggtcagagcaccggtactccttacagacctggttaacgaccagctgggaatcgcctaacaccaggagacggcggatccccagtccggctgccaccctgagtccggcaaggagtccctcgtactctgccatattattggtcgctcgaaagtcgaggcggaccagatatctaaggacgtctccggtcggggaggtcaaagtgacccccgcaccggcaccctggagggacagagaaccatcgaactgcatcacccagtgggtggtgtgaggcagctgcgcggagttcgtgctggcctcggggattgagacggtctctggagccggggtccactctgccacaaaatcggcgagggtctggctcttgatagcgtggcgtggttcaaagtgcagatcgaactcagaaagctcgattgcccattttaccacccgtcctgtaccctctcgattatgcaagatttgaccgaggggataagacgtaaccacagtgaccctatgtgcctgaaaataatggcgcagtttcctcgaggccatcagaatagcgtaaagcatcttctgggcctgagggtatcgggtcttagcgtcccggagggcctcactaacaaagtagacaggccgctgcacccttcggtggggccgatcctctttgctaggggccgtatccccggggcgttcttcattcaagtggcctttcggggcgcacttgtcttctgtgccgatgacctcggggtcggaggatgaaaggggcgaccttccctcagtggcctcggggccgtcctgggggttgggggctcctggcatcgtcggacaagcaggcaaagggccaactccggtcgtcaggggcctctggcctccgttcggctcgggggcctcttctccctgctctttcccgggtcgagtcagcacagggttagcctcggggtcaaagggcgttaagtgcggccttcccgcagtggccttggggccctcctgagggtcgggggcacctagcaccgtctgacaagcgggcagagggccgactccggtcgtcagggcccgtaggccaccgtccgactcgggggcctctcctccccgctcgctcccgggccaagttagcacagaatgggggtgcacgaaatgaggattgttttcatcgcgctccacaaccaacgctgcactaactacttggggggtcgccgctaagtaaagtagcaggggctcatttggctccggggcgactagaaccgggggagagctgagatatgcctttaactgagtgagggcatgttcagcttcctccgtccaagtaaacggccccgagcacttgaggagcttaaacaagggtagcgccttctctcccagccttgatatgaaacgacttagggcggccatgcaaccggtgacgcattgcacatccctaagtttgctgggggggcgcatccgctcgatagctcgaatcttctcggggttggcctcaatgcctcgggcagagaccaagaacccgagaagcttgcccgcaggtacaccaaacacacacttatcggggttcagctttatgcgggcggagcggaggttctcaaaagtttccgctagatctgaaagtaaagtttcttggttgcgcgtttttacaaccaagtcatcgacataagcctcaacattacgtcctatttggctacccaaagaaattcgagtagtacgttgaaaagtaggacctgcattctttaacccgaagggcattgatgtataacaataggttcctacgggggtaatgaacgcagttttttcctcatcctccctagccatgcgaatctgatggtaaccagagtatgcatctagaaaacacaaaaggtcgcaccccgcagtggagtcgacgatctgatctatgcgaggcagggggtaaggatccttaggacatgccttgttaaggtcggtgtagtcgatgcacatccgaagcttgccgttcgccttgggaacgaccaccgggttcgccagccactccggatggatgacttcacggatgaatccggcctccagaagtctcgccacctcctcgcggatgaaggcttgacgttccggggcctgccgccgcactttctgccggaccggccttgcgcccggccgcacggcgagacggtgctcaatcacctccctggggaccccgggcatgtccgctggtctccatgcgaagacgtcagcgtttgcccgcaggaaggagacgagcgcgtcttcctatttgccatccagaagaccaccgatccgtgtggtcttggatgggccgtcgcccaaggcaacctccttgaccgggacctcgtcgcatgtggcaatccgctgcctcggggcggtgggggcggaggtgccaagcctctcgtcaccaccctcgggcttggtcgcagcagcgaggtggtccgcgcgctgctccatgcaagcgagcgcgactttaaggtcgccacggacagagatggggccaccggggcccggcatcttcatctggaggtaggcgtagtggaccgccgccataaacttcaccaacgcgggcctccccaggaccgcgttgtagggcagactgaggtccgccacatcgaagttcacccgctccgtgcggaagttggctgatccaccaaaggtgaccggtaggtcgatgtgacctaacggccatgtgtgccccggcgtcacaccgatgatcggttgagacggctggagcaccatccccggggccttgatagcatcaaaggccgcgggggaaaggatgttgagagccgctcctccatctatgaggacacgccccaacttcacattgcagatggtgggggaaaccaccatcgcaatctgccctccccgggcaacgcacggtgggtggtcggtctggtcaaaggtgagggccacctccgaccaccgcgcccgacgtgtcgcctcatgagtaggggccgcggcgagaagctctcgcctcatggccttgaaactccggcgagaaacgtgagcacacgctcccccgtcgacagtggcaatggtggccccaggttcttggaaacctaggtcatcatcaccgtcatcgatgtcaacggcgggggccttctgtttggcctcacttcgccgtttaccggagggaactgccgcggacttgccctcacggcgttcctgcctcctgtcctcctcacacttcctcgttcgctcagccaagtttttgactgcgcgacaatccgcgagatcgtggagggaggtgttgtggacggagcaccacttgctggctgggcgctccctgctgggagtaccagcctctttctttttgtcgctcgcaggcctcccctttcgggtggcccgcggaacgccctcgacggcgaggacgtgaccctcgtcgccggaatggaccgaccttttcttcctcctcctgtcacgccgccctgtctgagcggcggatccgggggcggccgaagctgccacaccggaaccggaggggttccaggtccaggcctcctccttacgagccactcggtccgcgagctgaaaaagctctgcggtagtctggggctctttggaggcaatcttttcgagcatgcggttgtgccgcacaccccccctgaacgcgtagatcaccgcgtgtgcagggatgcaaggtatagtattgcagacttggcagaaacgctgaatgtacgagcgaagggattcatcatcccctcgctgtactgcgtgcaagtccgcttcttcacctgggcgtggataagtgccttgaaagttcatggtgaactgctggcacaaatcctcccaggagtggaccgacgcgggtggcaggttcattagccaaccccgcgcctgtcccttcagggccatgggaaagaaattcgccatgactctgtcgtcacccccagcggcctcaatcccggtcgtatagacctggagaaactcggtggggttgacactcccgtcatacttctcggtgatggtgggccggaaccttgggggccaacggacattccgaagactcgccacaaaggctctacagccgacaccaccagccgggggcatggagggctggtcctcacgtccctgtcgaggtgacactctggacgaagaggcgccctccgttgcgcggggagtacgccggctattacgccgacgctcgatgtcgaggcgggcattcggctctccatgccgatcctcccgagtcggaggtgccgacgagggagtggcagccgaatggcgtgcaacagccgccgctcgccgcgccctccgtcttgacgacgcggaaccggtagtggcggcgccggaggtcttggtggtggcggaccgtccaccagcacccaggcgctgctgtgccgtcatgaccaagttggccacgtcgtccagccatcgctgggctggagactccgggtcagggacgacaggcgggtgacgtaggagcgcgccaacagcctgaagcgcgccctgaggcgtgctgccgtcaccgtagacgaggaggcgacgctccccatctcgccgttctcctgcaccacccgcgactggcgatgctgcggatttttcgactctctcgagtgcctccccctgcttaggattttggtgtggaggaggtgggggagtacgagctcgacggcgtgggtttggctccccgtcgtcgccactcacactcggagagaggtcgtgcacctttgcttgcttggccattaggctgaacaagaaaaacttggcgcacacggaagagtatgagagctcagaaaacacacgctgagccccctacctggcgcgccagatgacggagctcgtggctcctcaccgggagaccgcgcaggcccccctttgccggttcggccgggggcttagggtgagatctcaagctctctctgtatgtggaaagatcgcgtgccaggaagaaacgcgagacacggacgatgtatacaggttcaggccgctgggaagcgtaataccctactcctgtgtttttttggtggatctgtgtaagagcaagttacaaaatatcaaccagccctctcctctcccgggaaaatccaaaaatcccccccttctctttgtgggcatggtcctccttttatctcttaaggggataccacatgtacccttccctttttaaactggacttttcttctttacataaatggacgtagatttgcacggttgccctccgaacgtccttctgatgggacggcacatacctacctccacttctgccgggggcaggcgcgtcgtgggaacgtggctgtgcgctgacgacatgagcagtgtcagaccggtcacaaatcggtcattcttgtccaccgcgtgtcagcttagcaacgtgcatgtttgcccttcttcacacaacatcttgcctgtaatggttaggatgaagcctggcatatatcgatcggggctaacgtgccatctctgggatgtaacacgccagctccagctggggacgagtgcctagaggctctcatcttgacgggacggggcgaggcgtgagtcagaccgccagtcgccacctaaccgttgatctgaccggtctgtgactggtcacagaccggataaaagagcgcgctgcattgcgctgcatgcagcgtgacacgcttaaccagaccgcaataaatgcggttaggtgagccctaccgtgttcacccaacctatgtacatagtgcaaaccccacaaggggtcggggcacctcggccctcggggccggggcaggagcaacccgaccccccctcggggaaatcaggaggagggcggacacctcaccctcgggcccgacgtccccgaaggtgccaggccacgtgggcgattccatctgcctcaagcctccgggcgcaatactcccggtcccatatcaccgacagatacccttggaatactctcgggtgaaatgttacaatggtatatctgtgcgcttgcgaatgaactctgtaaccataatataccaggagtatttctgcgccattgctaggaattatatttctagtaatgacgttaagaaataccaacacccacggtgagcaaggggttgaaatggaagaagatgcctagtaaaaaaaaagaagaagatgaagtggagaacgagaacattccgaattgggctcagtacgctggatttgaaggaaatcaaacgggcgaggtggacagggatgctgacgataacgacgctgcggacgatcttggtcagatgttgtaggacgccaaggaggactgtgaaagtgaaaaggaggcccataaattggagcgtatgttagaggaccacagaacgtcgttgtacccaggttgcgagcaggggcacaaaaagttcttgcaatggaaggcaaaaaatggtgttagtgacaaggcatttggcgatttattgaaactcgtcaagaacattcttccggagggaaacaaattgcccgatacaatgtacgaggctaagaagatagtctgccctctaggactggaagttcagaagattcacgcatgtccgaatgattgtatcctatatcgcggtgaggagtacgagaacctagaaacatgccctgtttgtaaagcattatgatacaagattagacgagatgatccaggtgaagttgacgggtagacaacgaagaagagaattcctgctaaggtgatgcggtatttccctataataccatggctaaggcgtttgttcaggaacaaggggaatgctagaatgatgcattggcacgctgaagaacgtcaacaggacgggatgctgagacaccccgccaatggttcgtagtggcaaaacatcgacagaacatttaaagactttggaaaggatgcacgaaacatacagtttggtttaagtacggatggtatgaatccttttggagagatgagcagcggccatagcagcccgttacgatgtgtatctacaacctccccccttggctatgcatgaagaggaagtacataatgatgtcgattattattcaaggccccaagcaacctggtaacgacatcgatgtgtacctaacaccactggtctaagatctgaaactgttgtggaagaaaaaaggtgtccccatgtgggacgaggacaaacagtaggagtttaacctacgagtgctgctgttcataaccatcaacgattggcctgcacttagcaatatatccgggcagtctaacaaggggtacaaggcttgcactcactgtatggatgaaactgaaagtacgtatcttaagcactgtaggaatgttgtgtacatgggtcatcgtcgattccttgctgcaaaccaccctgtacggaagaaaggcaagcactttgaacataaggcggaccaccgtacgaagcctaaacatcgcagcgggaaaatagtgtttgatatggtgaatgatcttaaagtagtgtttggaaaggggcctggcagccagcctatagagagtgaagatggtcacgcggcgatgtggaaaaagaactctatattttgggagttaccctattgggaattcttggacgtccgctacgcaatcgatgtgatgcacctcactaagaacctttgcgtaaacctgcttggcttcctaggtgtatatggaaagtcaaaagatacactggaagcacataatgatctaaagcatatggaacaacgcggcgaccttcacccggaaccaaaggagaaaggaagccattacttgagtccagccagctacactcttagcaaggcagagaaggaaaatatgtttgaatgcttagagagcatcaaggtaccgtctggatactccacgaatataaagcgaataataagcacgaaggagaagaagttcacaaacctaaaatctcatgactgtcacgtgttgatgacacaactgctaccagttataattcggggtatccttccagacaatgtccgggcaacaataacaaagctatgtgctttcatgaacgcaatttcgcagaaggtcatcgatccggatagattagaagcccttcaaaatgatgtggtgcaatgtcttgtcagctttgagttgatatttccaccttcatttttcaatataatgacgcatctgcgttgtcaccttgtcaaagagatcggtatggtgagtttaattttaaaaagaattatcacatggaagatggcgagtgctccgttctttccggtggcgatcgtcggccatggcgatcttgattcttggcactagctcttctgtgcttcttcatgatgaaggaggatctgataactccctctccgctggggggttggaactttgatttcggcaagtcttttgcttctcaagtcttggatctttttggttgccctgtccatttttctccttatttcagttcttctcctttcattctggttgtggattttgtccgcttcaatttccgtttgactgtcaagtcggttgctattgctctacaagcttgtctgggaggaagcccccatggttttagtgtgctttctcttaaagctaattgtttctcattccaagtctgtaacaagaatgtcggcctctatgtcaactccttccgggatttcacttgcaaagattttcatgtccgttttttcttgtggggtaatggcggtccaaattggaggagagaatttgatctttgggagaaagaggagaatgatctttggtcagttgtttcttacaaaaagaaggttcagcattctgtcaatttgagggctaacaaagcagttaagtttcagattaatcattctttgggcaaaaggcagattgataagccatcggttttcaagagattattcctaggggatcctttccctgttcatcagtgttcttcatcaggtactgttgttcctcctctggtaattcagcctggctcggattcaaaatacattgctccttcgcctaagattgcgcattccgttacttctgttattattcctgaagttattgatcattcaagtccgaggatttctccttcggctagtttgaattctggacaatctagagagtctttgttttgcaatcgatatttggcccatggtcatggcccagccaattgtcgtagcttgatccattgccggagttgttttaactatggccattttgctcgtgcttgtctggcccaaaaaccgtctcgtgtctggagggttaagcccttttggaaggccgaacccagtgggaacagtgtctttgtgagcagtgctctatttcttttggaaagtgcctcttcgtctctgccagtctcgccccccccccctcctcaatttccctcctctgcacagtgcttgtcctctcctcgctgtaaaaccccattagcgcttgtgctgccttcctccagggcgcaccttcacgatgctgacttccggccggagttgtttctgctggagggaacaaacattgaggtcccgtgggaagggcgtacccctcgtgcggacctcacgcttcaaggtgttctccccaactctcaccaagagttcgctgccgttgttgttgatcctcagccgccggagcacctttttggccagttgattcaagaagtggcaaacatcatcgagcatcagcatcacattcatgttgttaggatccagaggtatccccttgctctgtgccttgttcagctaccttcggttctggatagagacattcttgttgccagtggtccggttctgctaggtaattggttccatggtactttcgttaggcatgatcagttagctaactggaggaactcgccatacaccagggagggttggcttatgattctgggcatcccgcttaatcttaaaactggggctattattgaacggatcactaatctttgtggggaattcatagactggcactatagagatagagttctgggcagagtacttgttaaagccagatacaaatctgctaatgaggtgccaaactgtattgttctgggggatactatggcttatgggggcaatggtcaaacatggacctttcatgtctatgtgctgaatggagaacccactgatatgctacctggagatgaagacctactgcccatttggcaaatgatgccacctcctcagcagcaccatcatcataataagcatcagcatcacaatgaggaagatttcaatgctaatcacaatcagaatgaagatattgggggacaaccagatgattttggagcagaaccagattgaaaagccccatgattcagtttcagttcaggatttcactctcgacctaactgtcagttcctccaatgagagagagtttcagaacattggttggcagattattccttttggtctgccaatccctgctttacctatcagaagtctgcttgatttgttctgtcaagctgttgcgaatggagtatttgcaccactgcttttggccttacaaccaactcttttcaggcccatcgtaatgtcacctaggtggtctctgactactacttcttagggagtcatgatcaccattccctctttggaattcatggacagcagcccaagccctatcaaacgctgcacgacaagtctgattgattcaagggtggtcaaggctcttcctttctctggggttgttaatgatgattctgagagagtgactgaggttgttgacaaggtggttcagcccacactactacgaaaaccatctttcgtggtggccattttgggttttcgcgggcggaaatcgcagccgccagaaagcaaaggccagtgaaaatgtcgattttcgctagcggttatttaccgccagccaaaatgcatcctcgttggcggccgagaaaggaacgcccgccagcaaagagatgtcttcgctggcggtagccttaggacggccgctagcgaagacatgtctttgctagcggcggacataacgcagccgccagcaaagaagtatctccacttgcgttagccttaggtcggccgccagcgaagataattcgttgttggcggctcacagtgttttaggccacgtggcacgctaggaaaaatgaagtaaggcttctgtggatggacacgtggcccgacagcaaagatatgtaccgtcctagttctggcacgtggcccgccagtgaagatgcaatttttaaaaaaaaattaaaacattattatatatactattttttcttttcttcgtgtgtgtatttcagagtcagacgtggttgatataactaatcgagctatcgatagagtatgttctctttcgcgtatcttagagcaacgcattgagtatatatgaagcagaataatatacatatatataaatattcggaagctcctatatatatgtacgttgacaaattaaatttgactgacgacataacatttacaagtattttgaatgaattagaaaactctagctatattatacgcctggtccagttaaacagggatttgttctccggcagggctaagactccttcgttgtcaaaaaactgcccaagctgatgtgcgcactcacggtggatgaagtagcacatgtccgcctgaatgttctgaatggatgtatcattgagctctctttcagacttggggaattttggaagctacatcagatcatgacagaattaaggaaattaactattcacaataatacaagttagcgactaatttaacaagtgtgtattacttaccttgtcgtaattcgcacaatatttcccattaacccttaggaactcacaacattaatatccacatagtactgttcccaccggttgcttgtgacactttcaacatcaaaataattataaggtataataggttattacatggaaacacacaagcatttatgaaaattaagtagtactgtttggcatccatatatatgtacttaccggccacttattgcggacggatatgcgttctcttgagtttttgcattgtccgcctcgctggtaataccttttaaatgcactgttttgcggatataattaatttacgttcatcagaggttaaaacacgccatgctaatatcttacttacagatcgataattcttagaaattcctgataggtgttgctatctttgtcgagagaatccaagacgatgacttcattgtactttggatagagaagaaagactatctaatggtcgctgcaaacgaaattgttagtcgagccatgattatatgtatatactcttagtgcatatatattacaacttactcaaaggcatatggggcataaacatactccttgtcctacgtagattcaagcgcaatagctacgtacgtagcgacatcgagcaccttttcaagatgctttggtgctatgtaagctttcctctcttcgggagtcatcgccttgatgtgttccggtaacttcttctcgtctagcgtgtatgtgtggttcggtttacttatcctgcacgggtttaggtaggcgacaggctttttcatcgcttcggcttccacgtaattcatcctgccacaatggatgatcaaatgagctacgcatataggtgtaatgatctattaacacgttcaagtgtagcacttacagacaccagatggcaatcaaattggcgtccagccgcttcctacagtagagggaatgcatatcgaagaaatggacttggagtagacaaggaccgctctagaagatgttcacccccacggcaactgtgaatgaatcgatgcctttcatggtgcttgccctaatgtaccaattgtgccatcttcttagttgccacggtccttctcttagttgccagtcataaatgaatggtttgccattctcaaactcatgtggcacgtctggggaattgatatagttgagatagtcatcgaaggtctgtttgaacccttttaattttctattatcaaattcggcatttatgatatctttgtcccttcctcggaatgccgttaccatataatgtttcttggacgcactttttgctttgtgcttgtgcgtccttaccatcactggcacatcggcacgcttaggttcctctggttgcgattgctctggttgatcgggcattggctgatcaggcaccgcttcaatttcacccgtcgctagctttgtaggctctgctctacatccttttctgtctgaggtgatgcaacgggaggctccagtactggaggtgatgcaacttgtggctctggtactggaggtgatgcaactggtggctctggtcctggaggtgatgcaactggtggctctggtctagagggtgaagcaataggactatccctcggactggctacgactggtggacgtgacggtgacaccggtatccttggtggacgatcagttccatccgttgaccctagttcaatatcattcttgtgccatagtatgaattggtcgacggcatctccaaggtacacaatctgctcagtagttggaaagtcgagctcgtgcatccggtaagcctcaatgaccgtccggacctctaccttggcgtagtcatccggaatgtcttggcaatgaaacctgtggcctggtatgaacctcccagttgcaacgagtattttctttcccaccctgctgaccggaatcaagagcttgcacggagtatcctccgttacatcatcgaaaggatagctcggctcaggctctaaaacagcagcaccgtgcttcattttctgactccagtatatattgcattcgtcacgagctgctgccctagcctgagttcattttctgactccagtatatattgcattcgtcacgagctgctgccctagcctgagagtcaatctcttccttgtagcgatcacgcttcttgtaggtatgagcatcctgtttgaatccatccttccagttagtctttgaggaaactccccgtacacggccagagtgctccggtttgcccaaggcataggtcagcttgtcccggtctctatctggcatgaacgtccctgcctgttgctacgtgacgatgttctttatcttgacagctacctcgtggagcttctgatccttgaatactacatccccctcaggggtgaaggccggtgttcttgcacgcacccagttcctgcttcgtgggttgtgatttttcataggaacgggtttcccagccttctccatctcttcatcttgttttgcccatttcttcaccgcttgctggtaattggtcgatcctaaatgatgtggatattcattccttcttgctagctcagccatcttctggctcttctccttttcttctgccgatgtcttaagggcaacgaactcatcccactgggcctgtgttatccttccgtagtccttaaacggcgtgagtcccttctggacatatttcttattttggtccgttttccagtttcaccacagcttccccattgtgttcaacgcataatccttggctttatcgtcgtctgtcccctctggatattcaaacttgctttgcagcgacgtccaacagctgttgtttcgactctctggaactttcttccaatctttccatgtgatctccacgatatccctgaccaccgccccacattggttgctatacttcgaacatgagtcttccggtgacaagggttcccctgtctcactcatccgcgttagcacgcttacttccttcaacaacatgatgtgaccatggctactatggatacgaccattgctcacatcatgaatcaacaagaagacatcaagatcaagtcctccatgtgctgcaatctgattcggccacgtgttacattgctgatttcaaacggccgccaaatctacatacgtgctccgttttgggcccgtgagtacttgatggaaagctctcgaagtcctccttccaacggatccagcctcatctcggaattctatctcgtttggctgcaatcacagaagcaaggtgctgcgtcacctgtattgggccaatgggcttgtaactttgtttgggaccctggcccatgtggggcccatgtggggtgcgccccaatctggtggagcacgacccttggaccctcttggtcgtcctcccacctctataaatagttaggtaccccttcagggtttcttgggttttgatagattaaagtttagccattgctacttgcttgcagcgcgtgtgtcggctagaccgtccgtctgcttgttcttcggaaccccaacttatcatttgtattaaattcctatttgcaatatcagattgctttttatcttgttcttgcttgtttcttcgatttgcttgcaggaatagggttgatctgcaccggcaagatcaacaacccacggagaggtgtatcgatcgctaaggcgcaacacaatgtctcgtacggttgtagtcggatcgtcaacgtttctcccaaatcgtagttatcacaactcaccgaaagatcgggccaacaacagccttgagtgtcgagaggaactcagggttcatcaggtggtatcagagctttcgttgctcggtgagttttatctacccataaccagaaaattgccatacaaaataaattttatcctgtacctagccattttgtgccattgcattgtttttatcagtttttgctttgttgagttttgtgttgcattgtcgagtcgtgttgctggtcttagcgtttagttcgtttagagtttcgagttctggtcacgtttcgtaccactgtcatcgcccccgccgtgtctttgttgtcgtcgggacctaggaaaacggaatcatcttgttgtcggggtttcgtttttctagttttcagaagtttttgtcggtcggtcttggagttgctgagttgcatcaagggtttgtcgtctgtattcggccgtgcttgtttctcttgcgcgaggaagaggagagaaagaaaagataacagatctgtttttggaggaagttttgcagactagatcaatcaggttggttagtttccatctaaggccaaactttccaaactctccccacgcgtgaagaccggttagcgccatctccttttgtcgcccactttagctgagtccgactccctccctctcacgtcggtttcgcctgttccgagttgtgtcaaacaccttggtgaatttttgtttggtgtcggtttcgagatccgtttcgaaaaacggaatcagtataaattcagcattccatttttgtataatttttaattttggtttggacttttacagttgagtccttgtaattttcatatttacatttgagtcccagtaatcttgcattgaggtccttgagttgtttttgcagaaaaaaaaaataaaataaaaaaaagaaagtaaggaaaaggcaggaaggtgcataaaaagaaaaaagaaaagaaaagccgcaccaaaaaaaaaaggagagaaaaaaaagaagaagaaagaaggaagaagaaagaaagaaaaaaaaatcagttgtatctttgagctgaagatgatctatcagagtgtgcctaagttgtttctagtgctatcctgtggtatcgcttgtgtctaggctcacgtctctagtacgttctagcctaggaccagcacggtacttgactttgaaccattattcaactttgcattctctgatttgaacatttgctatccctttgctacatatttaagcctacccagagctccacagatctgattgcagccgtacaacaagtgtttgccaaggcatcgatacatccaacctctattggggtgcttggttaagtcggtgtacatcaccattccgcttgctttggtaagaacttgtaagagcttggttaaaagcttgagtgtgtgtgatatttgagctgccactacctagtagttgatacgagcatgcatatttttgtgtgtttcttgtttgctactaaccatggcaggattgcgtaagggaatacgagaacatcgacttctacaccttcgacgagatatgacgacttctccaaatgatgcatatgaggtacatgactataattttgaacaagttgcatctaagttactcttctatgatgggaagtatgattctgttgcatacattgattgggagctagcagtagacaatgaatttgatatatatgatttttctgatgctcaaatgattaaggctgctagtaataagtttacctcttctgcattattttggtggacttatgttagtaataaacctgaaacttgggatgaattgaaaaccatgatgagaaaacgctttgtgacatcttattacaaatgtactcttcgggagaaattagaacatctgaaacaaggtgacagaactgttagggagtacattcatgaatttaaggtctgtatcatctacagtggtctcaaagagtgcaatgaaaatacaacgcgtagatttttcaatgggcttaattctgaaattcaggttttgcttgataatgtgacatataatcatattgggcacctattcatgcttgctcgtagcattgagagtcagatcatatcaaaggcgaggatgcatgaccaatgtgatttatctcctatttctgaatccccaatatacttatgtaatggtgatgtgcaaacattggaggagcaatcttttgtctcccctgttactaacgttttgcaggaagatcagcacatccaagaaaaggagaatggtatacttgagaagaaagaggatgaagcacctgcgatgtctgaagaaagttcgcaaggtaaattaaatggtgctgagagaaatgaaggtgagtattctcaaggtgagctacacttgtccacttttcatgctatagtagagcaaccattagtggaatcaattgctgagttgcctttgtcacaagttgatttacttgctattccttgtgataaagaagagttgtgtgataatgtttcacttatatccatgccacaactagtgaatgaacatgttagttctactatttctttgtgtgctgattctaagcatgttgttcacattgctaatgaagtagaagaacgcgaattgctatcttctttaaatactttgggctatgttcagtttgatgatttttgtaagctcgataatttgaaggagaaattatttgctaaatctgatttgccatgtccaactaatgctatttttcatatctttggcgaatataatgatagaggaatatttttggtgcatagagtttacatttgttcggatttagaacatcttgtagttctggataaaatatgcaagctagagagacatgttactgctaatcatattgtctcgagtttgtcttgttttgattgcaagaaacaggttgttttcaggggactgcgcgaagagcaccatatggaaaaaccgaggacggttttccgtgaagaaggggaggatgatgtgaccatggctaccatggatacgaccattgctcacatcatgaatcaacaagaagacatcaagatcaagtcctccatgtgctgcaatctgattcggccacgtgttacattgctgatttcaaacggccgccaaatctacatacgtgctccgttttgggcccgtgagtacttgatggaaagctctcgaagtcctccttccaacggatccagcctcatctcggaattctatctcgtttggctgcaatcacagaagcaaggtgctgcgtcacctgtattgggccaatgggcttgtaactttgtttgggaccctggcccatgtggggcccatgtggggtgcgccccaatctggtggagcacgacccttggaccctcttggtcatcctcccacctctataaatagttaggtaccccttcagggtttcttgggttttgatagattaaagtttagccattgctacttgcttgcagcgcgcgtgtcggctagaccgtccgtctgcttgttcttcggaaccccaacttatcatttgtattaaattcctatttgcaatatcagattgcttttatcttgttcttgcttgtttcttcgatttgcttgcaggaatagggttgatctgcaccggcaagatcaacaacccacggagaggtgtatcgatcgctaaggcacaacacaacgtctcgtacggttgtagtcggatcgtcaacgtttctcccaaatcgtagttatcacaactcaccgaaagatcgggccaacaacagccttgagtgtcgagaggaactcagggttcatcacaacatgttcttccctcgctcgccccttcttttcttgggtttgcttaaagctgttgtgcgcacgacagctgtagcttcagcttcaggttcagttgcggcttgggctttccttttcgagcgacgtggagcattcaactattgtttgcaattaacgtgactttaattaaaatccatagttcgcagttaatatgattggaactaaacatatattatatgctaagtaccaccggttcggggggaacgtagtcggagtcaacttcattgtcgctaccgccctttctcttctttgcaggagaaggatgggggtcactcggcgagtgatacgatccactgcctggttcacttgagctagacgacgaagattcctccgcgactactttcgtgcaaatatcttcctccatgactagctgagtttccttgcccttgtcacccgtgggttgctcttggatgggtttgtccattgatatcgcttgaaggtgaatttatgtaagttgcgaaatggaatcattttcttattgtaaatccgaaaagaaggcaaaatttagatactaattttgtacaacaactataaatattgttatcgccagcaaactccttgatcgcttaaagcaatcaatgaaattggtaacggcatcaatattacaatccaccaaccctgaccatttcaaactacctaattaagttccttaattatcaaagaatgacataatacaaaatgcatggagaattatggtgtttaggtcggttctgtccatggactacactgaccaatccaccataattcgctatgcattttgtattctgtgatggtttgataacctaggaactacattaaatctacggccaatctatcaattcttccatttaagctacatttcaaaccctaaacctaattaagttccttaattatcaaagaataacagaatacaaaatgcatggagaattttggtgtctaggtcggttccgtccgtggactacactgaccaatccaccataattccctatgcattttgtattctgtgatagtttgataacctaggaactacattacatctgcggccaatctatcaattcttccatttgaactaaatttgaaaccctaaacctaattaagttccttaattatcaaagaatgacataatacaaaatgcatggagaattttggtgtctaggtcggttccgtccatggactgcactgaccaatccaccaaaattccccatgcattttgtattctgtgatggtttgataacctaggaactacattaaatctgcggccattttaagctaaatttcaaacaacacattttgatcgccatagtatcaaactaacaaattactcaatttcagtcaaactaacaaatttgtgcatctaaatattcacccacagtcatctcaatgaatcatattcagatatatatatatatatatatatatatatatatatatatatatataaattgcagaaactatgcacgctttcagatcagcaatggctagcaacagcataggcctgaataaaagaaagtgcatttcattttggaaaaaaagtgcagcaatacatatgtacaggtccatttcattttggaaaaaaagtgcagcagcagaacaattccttttcttaatatgttgagcacaagatcaattttgattgtacaatttaaatcacatttgcaacaagaaaacaaaggacagtactcatacatgcctctatcatcgataaaactcagtggctgcacatctattttagttggtgcacaaaaaagtcagtggctgcacaaactcatacatgcctctatcaacacaaaaaaaactgcatccacccaaattttcaccaccaattaacattcataaaaaattcatcccaattcagccatcaattcatctcatatcacattcatcgtccatcaattttcatcacattcatcatgcatcaattcatctcacatcacattcatcatgcatcaattcatcatttcaattttacagaatggggaggaggagcagaggagggggtgtacctcggcttctcggcacggctcaccgtggagtcccagcgcggcggcgacggcggtggcgcggaggaggaagaggcggcggagctggtcccggcatcgacgacgagtcccggtggcggcggcgtcgacaacgaggacccggcggcggcgatgactcccgaggtggaggcggcgtcgacgacaaggaaccggcggaggaagaggaggtcccggcagcggtcttggcggcggcggcggtgggaggaggaggcggcggagctggtcccggcgtcgacgacgagtcccggtggcggcggcgtcgacgacgaggacccggtggcggcgatgactcccgaggtggaggcggcgtcgatgatgaggaaccggcggaggaagaggaggtctcggcggcggtcttggtggcggcggtgggaggaggaggcggcggctgcggcggaaaaaaggagccggcagacaagtcccggtggtggcgacaactcccgacgtggaggaaggaggagccggggagaggtggagctcgatctgccaccggtggtggtgaagacgccggcccgatcgaggaggagaatgcggcgcccgtcggtcgaagaggagttggatctagcggtggcggtgaagagaaggcgcgaatggatctaacgccggcggtgaaggtgcgaatgaagaagctgtgtccgaaaagtggatggcgcgaatgaagaagaagtcgncgacggtggcgggcgctaggaatatcgctggcggcggcgctcgaaattttggcagcctggcggcacaaattttagggttcgcgcgcctccgggacttaggatattttcagccgcacgcgctagctacttataggcgaagacatcttcgctggcagaggaacgcgccgaccgctagcgaaaacattttcgctggcggaggattccgtgggccgctagcgaaaagggttttcgctggcggcaagcttatgtgggcaaagccggccgccagcgaaaaccctttggtcccacatgtcattctcaactgaaaaaataattttatttatttttacacagatatgattaatttatcaaaaaaataaaatatgattttttaatgtttgcgcctgatatttttttaatgcatgcatacaaataaatttataccaaactatttcttgatccaacaattatcatgtcaccatattccatatacaaaaattcatctcatccatcattgtcacacattataatacattaaaattcatcgatacgtccaacatgatatacataatgaattagcatctaacacttttccttacaccttcatttctcatgtatggctttggtgattcaccaattgattcttcgacgcgtaaaatctcgtttcgaaaatctatgaatagtgtcatgttctcatattgattgtatgcctcgacatcttcgacatcatcaactcccaaaatcctttgttttcccaaaataactatgtctttcttcaaatgagatgggtctgtcacatagaaaacttgagcgacccgatcggcaagcacccatgggtcatccttgtggcctacgttgtcaaagtcgacaattgtcagcccaaagttgtccacagacacgccggctgggtgtttcacccattggcaccgaaacagtggaatctacatatttggcccgtagtctagttcgcagatttcttctatgaatccatagtatgtgctcttttgcccagttgtgtcgattgcttctactcgaacgccactgttttggcatgcacttcttttgtctttcgcttttgtgtaaaacgtgtatccattcagatcatatgcttgccacgaggtatacacacttgatggcccatcagttagcattttaattgttctttcttccatggtatggccatctggtagatcgaggttcttgaaccattcagtaaagtgatgcttgtgtttcttcatgatccatctattagatcgacccacatttgttgcttgtaattcatgcaggtgttgctctatgtacggctccactattgtgagttactgcagcacagtgaaatgagcatctttcacttttttgtagtcattgtcgtggattcttttcttcccttttgttcctttcccagataatctaccttcatgtcgaggtaccggtaaaccaattgctttcccatcttttaggtaatcaatgcaacactcaacgacctcctcgattgtgtatccctctatcatggatccctctgggtgggcgcggttccgtacgtagccttttagaatggatatgtatcgttcgaaaggccacatctgatgcaggtacaggggcccaagtgcaattatctgaggcacgatatgaactatgaggtgttgcatcatatcgaaaaatgatggagggaaacacatctcaagctcgcacactgtctgtatagcgaaagcccggagaggacctaactcttcaggatcaattactttctgagatatggaattgaagaaataacacagctttgtgatgaccagctttatgtgaactggttcgactgctctaattgcaatggcgaggaatactgtgagcattacatgacagtcatgggaattgtagcctgaaagcgacatatccttcatcgacactagtcgcttaatgtttgaggagaagccagtaggcactctcaccctatgtagggatttgcacaatgccattttctcctctcttgtcaaggtgtagcaagcaggcggtatgtacacttttccattattaccttcatccacaggatgaagctctttccttatttgcatatccatgaggtccttacgtgatttcagcccatccttggtcttagttggtatgtccagtatagtcccaatggtgctatcgaagacatttttctctaggtgcatgacatcgatagaatggcgtatgtctaaatctttccagtacggaaggtacttaaagaaaatggagtgcttcttgaatggcacgctagggcttgctggcacttcggcatcatttctcttccgcttatttgtttccttcttttttaccttcccaaaaacaaccttcaggtttttggtcattctgaacacttcatcacccttctatggttctggtgctacacctttctcaacagtgctgtcgaaatattctacttgggagcggtacgagtgattctttcttaagaaacgccggtgccgcatctacacttgcttcttcgatcccttaagatacctgtacacggtaccatccacacaaataatgcaacccgtctttcccttgatctgtcccaatagggaaaacagtgcgggcaagtcattgacggtgacaaagataattgcatgtagcgtgaaatactcccgcaggaattcgtcccaaactcggatcccatgttcccacaaatcatgcatatcctccagcaaagactctagaaacacatccatgtcattgccaggttgtcgtggtccctgtacaaggatggtcaacaagatatacttccttttctgacacagccacgttgggaggttgtacatggttaggagtactggccacgtgctgtgtgagctgctcaagtcaccgaatggattcattccatcggtgctcaatgcaaaccttacatttcttgggtcctctgcaaacttatgatactttctgttagattccttccactgtcttgcctctgcaggatgtcaaatcattccatccttttttcacttttcatgaagccagcacatcaattcggcatcccttgggtttgagaacaaacgcttcaaacgatctttcaccggaaggtaccacatgacaagctgtggaatcttctttttgttactgtctttgcatggatcggactcttctatatcgtcaagggcaacatccagatcctcggactggctacggcttgttttgtattgactactcttgcatgttggacatctgtccaaatcctcgtactctttacggaataggatacagtggttaacacacgcgtgtatctttcgcacacccagtgacaaagggcatataagcttcttcgcttcataggtgcttgttggcagggagttgggttgcggaaaaagtttcttcaacagaaccaacaagtcattagaactactatcggaccaaccatttctggccttcaatctcataagctcaagcaccatccacaacaatgtgaaatccttctcacagccctttgcctcattgtacaatagatcattcaatgcctttttcaatgcatcaaagttatccaacccacgggcggacccagcaacaatcttaggttcagcatgacgcaacatctcttccaaatctgcaaaattaccatcatctacgctgacattaccatcatcggcatcatcaactgtactgtgctgaccattgccaccaacaacatcatcatcatcaacaagttctactgcacttcttcttcttcttcttcttcttcttcttcttcttcttcttcttcagctactacaatgacatcctcgtcccagctcaacacttcgtcgtgtactgtagcctggtttggaacttgcttgcttgggatctttccatgatgtgaccagtttgtgtatccctcaacaaatccatgcatcaccaagtgttgctcgattacagatggatcattccaacttttctgatttttgcagtgcacgcatggacatctaatatctttggtcttcttagatgcagcattcttcttagctgctttcatgaatatgtcgactcattcaatgtatgacgcacgatatctctctttattcatccgtgccctgtctgccatctatgcattaattaattaattgcggaaaaaataatacaactttagttagttcaaatattttgaacaagataattaaagctagccaaaaatctgcatatataaaacatacatccctcagacgaattaccaaactacccttctttctcttcttctcttcctagctagctcattcttttgcagttaactaatatataaatctgctaaaaataaacctatcgaaaactagatatatatatggaacatcgatcatgcacaatatttcttgcaaattttgccattttgagctccaaataacaaataaaaaatgtttttcttcctccatgtcaagtattttttgcgatgaaaaatctcaacatacaaccaataaaaatgaaaaaaaagttgacaaaaagagtaggacaaagtacaactaacctctggtacaataaatctttcaaaagattcgagatcaaaaccttgaatgctgttggtcaataccagtgagaggaagcaaccaggctattatcttgaatgctaagctcaaaaatcttagaaggggtcttaaagcttggagcaaaaggttatcaaatctcaacactcaaatttcaaatagtaatgaagttctgacaacccttgatgatctggaagaacaaagacctctagctctgcaggaatggaatttcagaataattctcaaagaacatattctcaagcttttgaattacaaaaatgagttctggaaaaaaagatgtaccatcagatgggtaaaatttggggatgagaacacaaagttttttcaggcctcagcaactgatagtcatagaaggaataaaatctcgcatctcagtttggatgatggaagtatagttactactcatgctgaaaaagaacagattttatatatggcctacaaaaacagaatgggaactcggggctcaatggacatgatcttaaatttgtctgatatggttcgtagaatggaaggcttggagtgtcttagtgagatcccatctacagaagaactggacaggatcattaaaaacatgcctactgatagggctcctggaccagatggtttcaatggcttatttttaaacaaatgttggagtatcataaaacaagacttctatgagttggcttttcagttctttaccaacaatgtctccctcgagaatttgaatcactccttcataacgttgatcccgaaaaagccaactccagaaacagcaaatgatttcaggccaattgcacttcagagttcagcacttaaattcattacaaaaatcttggcaaacagattgcaggaagtaattctgaaactcattcatgataaccaatatggtttcatcagaagcagaaccatacaagattgcttagcctggagctttgaatatattcatcagtgtcatcagtccagaaaagagatgataattttgaaaattgactttgaaaaagcttttgatttggtggaacatgaggcaattctccaaattcttcaggccaaaggattcaattctacctggttagactggatcaaaaatatcttgtcttctgcatccacttcagttctgcttaatggaatccctaggaaaagtttcaagtgtttgaggggagtaaggcaaggggaccctctttctccattgttatttgttctagctgcagatttattacaatccataattaataaggcttcctcaaatgggttactctcaactccaatcccaactagcggtaattcttttccagttatccaatatgcagacgatacattaataatcttgaaagcagatcagagataagttttttgtctcaaagctcttcttaacacatatacaatgtgtactggattgaaaataaattatcacaaatcaaacatgattcccatcaacactgacagtcaaaaaatggaaattttagctggcacttttggatgttcaataggtgccatgccttttacttacttgggtctacctcttggcacttcaaaaccaaatgtcagtgactttgcaccattgattgatagagtggaaagaagacttccttcaacaacggtttatctaaattatggacaaaggctcaccatgatcaattcagttctttcttctttaccaacatattatatgtgctctcttaagctgccaaagaaagtaattttgcacattgatagggcaagaaagcactgtttgtggaggaaacataatgagtcagaaactaggactcattcacttgctgcatgggatctagtttgcaggccaaaaaagagaggtggtctgggaattatcaacctagaaatccaaaacacatctttgttgcttaaacacttgaacaaattcttcaacaaaaaagacctgccttgggttcatctaatatggaataaatactatattggtttggacaagcctccacatgcgcaaattgagaagtgatcattctggtggaaggatattttcaggctaatcccgttatttcaagctatcacatcggtgactgtaggaactggagattctgctctttttcggaaagataattggagcaatcacaatttggaaaatgaattccctgtcttgatttcttatggaaggaatgaagatgtcactgtacaaggatttctgtcagccacagatattggtcaaaactttcacttacctctgtccaaccaagcaattcaagaatggggtaatttaaacaacagattacaaagcttacagattgtcactgaatcagacaaatggtcatatgtatggaactccgattgataccaatccaaaaaagtttatttgatgttctttcagcatcttcaggttgctagaccgatatctatactctggaaaagcaaatgtacaatgaagcttaaagtttttctctggctcatgttgatgaatcgactcaatacaaaggaaatgttgcagaaaaaaacaattcaatatacaaggtggtgtcaactgtttgctatgcagctccatggaaacagagaacatgatacacttatttttcagttgcccttttgctcaacagtgtttgcaacaaattggtattcagtggaatgtaaaccaggaattcttgaacatgatcacttcagctcagatctcttttcaacatactttcttctttgaagttttggcaataggatgctggcacatatggagtagaaggaatgatctcatctttaacaatgttgctctcagcttcgacaaatggaaggatgattttcagaaagagtttgccttgcatatgcacagggcaagagagagggacaaaacagattggcaatcatggatagctaactttacttaatacttctcctttttccctttttgtaaattcttgcatccttgtaactatgttttatttatttatatttaatatagcacagtaggagcctctcctgctgttttcagtcaaaaaaaaaagagatcggtattctcgagccagtgtacctacacaacatgtttcctttcgagaggtacatgggcgttctgaagaagtatgtttgtaaccgtgctcgtccagaggcaagcatcgccaaggggtatggaaaagaggaggtcattgaattctgcgtagaatatattgaagaccttcgcccaatcagggtacctgaatcacgccatgaagggagactacggggaaaggggactcttggaaggaaagcaataatgacggtagacaacaatttattccgtaaagcacatttcacggttctgcaacaatcttcattagtggctccttacatcgaggagcacttggctctagttcgcaccagaaacatcggtaagtccgatgcatggattacacggcatcacattgatactttccccgcgtggctgcgacaacatctcatgggtaacgagacgattaaccaacaactggccttcctggcaaggggaccatctggctcgatcgcgacattccagagatatgagatcaatgcgtacacattctacacgagagcccaagacatgaagagcatgaaccagaacagtgttgttcatatcgatgccatgggacacgatggtacaactggcacgtattacggtgccatcaaggacatatgggaacttgactatggacctctcaaggtccctctgttccggtaccaatgggttaggttgactggtggaggcgtaacgattgatgacagtgggatgacaacggttgaccttaacaaggttggatactcagacgaaccttttgtccttgccaacgatgtaacgcaagttttttacgtgaaggacatgtctagcaaaagaaagaagggcaaaaggcctgacaagccgaagcgccacgtggttctcccaggcaaaagaaaaatcgtcggagtagaggataagactgacgaggattacgatcagtttgatgggcaaccccctttcacggtgacgattgaccctagcatcctcctattaaatgaagacaccccttactcacatagcaatcacaagaaataaacaatagtgaggagaaagtacgtgcggccaaccatcaccgccgatgtattgccgtaattgttgtgtacaagatgtaaactattttggatgtattgaatatccatataaatcaattggtgtatggcatatgttaattatgtatgattattagaatttttaacaaatttaaatcatgcatatgctagttatatatgataattagaatttttaaaagttttaaatcatgtatgtgcttataatatatgattattagaatttttaacaattttaaatcattcatgtggtgtttacatatgattgttaaaatttttaacaattttaaatcatgcatatgctagttatatatgatcattagaacttttaacaattttaaatcattcatgtgcttattatatattatccacttaatttactgtagacaacaatatattttgaaggttttgtcattaattttgtgactttaaatcattttaatgcattatttactattttagaaacccatatgtaatgaaatgtaatatgcagtgcttttatctttagtcccggttcttaatcttaaccgggttcaaaaagaatttggaaatagtgggaaaagatctttagtcccggttggtctcaccaaccgggactaaagatcccggggtatatatatgcctgaggcgcactcgtcttctccaccaacacttagatgtttttctctgatctcggcttctcctttgatgccactgcctagggcatcccccgcgccgacgccgccgtcgtctctcgccatcatctcgctgtcgtcgtcgtcatcaccgccgccgccaccgccaccatatctctggggttgccgccgctgcctgcgcgaactctctctctctctctccaaaccgccgccgcctcgtcgtcgtcgtcattgctacgcctgccgacgccgaccccgactccgccttccgccgatgccgaccccgacgtcgacgcggccgccactgccgacgacgcccccgccgcaccgcgccatgccgccgccgctccttttcgctgccgacccatcaatgccgaacgtgaacgaatgcgaacggacatgaacgaacgcgaacggacgcgaatgaaacgtgaacaaaacgcgaacgaacgcaaacgaacgtgaacgaactcgaacttaacgtgaacgaacacgaacgaacgtgaacgaaacacgaacgaacgtggaggaaacgtgaacgaacgcgaatgaacgtgaattcacttgaacgaaacgtgtgaatgaaacgtgaacgaacgtgaaggcacgtgaacgaaacgtgtgaacgaacgtgaaggcacttgaacgaaacatgtgaacgaacgcgaacgagacgtgcacgaacgagataattaaacgattattaaacttagcatatatatatatatatatgattatatacttgaaaacgtgaacggaaaatatatgttcctttgcgtttagactaatacatttttttgcatgttgcagataagagacttcgtcgtcgtccctcaagccgaagtggtagctaaccctcggaggaatttgcgcaggcaagtgatataaagatatgattatctagagttctaatatacgaaacttagacttagcatatatgattgttagagttttaatataagattattagagttttaatatacgaaacttagacttagcatataagattattagagttttattatacgaaactttgacttagcatatataattatttgagttctaatatacgacacttagacttagcatatatgattgttagagttttaatataagattattagagttttaatataagattattagattattagacttagcatatatgattattagacttagcatttctgattattagagttttaatataagattattagagttttaatatacgaaacttagacttagcatatatgattatttgagttctactatatgattattagattattaatatataattattagacttagcatttatgattattacagttttaatataagattattagaattttaatatatgattattagagttttaatatacgaaacttagacttagcatatatgattatttgagttctaatataagattattagagtttttatatacgaaacttagacttagcatatataattattagaattagcatatatgacctatagaattagcaaatatttcttgtatgaatagatggttgatcgcgatgacgaacagatactataccatacaatcgcagagggaagcagccagtactggaacgaagaagaggggaacgaggatccaaaccagtacttgaacgaggaagggaacgtggagagggatgcggaggggaacgaggatgaggaggctagtggaagtcaaccctccgctagacagaagagggcacacggacaacgaggtgccgcgaagaagatagagggttggcacatcataactgaggtggacgaagacggctgacctagtgccccggcagaagcagccaagaattttgtacgacatagcggttgggttgtaagggataacgtgcctgtcagcaaggtgtactggcgcagaacaagggcacgcggggattatgacagctttgtcccagaatcagagaaagagatgttgtggaccacaatgctcgagatgttcacgctccctgcgggtacggagaacatagtgaaacagtggactcttaagaaaatggcagaacagttccagagcttcaagggagatctctacaagaaatacatcctgaaggggctgacactgaacttcgacgtattcccaaagctaagggatcattgggacgagttcattgcttacaagacagggcaacaagggcaagcgatgatggacagaaacaaagaaaataccgccaagaagaagtaccatcaccacctggggtcaggcggctatagcgtcgcaatgccgaagtgggaggagatggaagcaagcattattgagaggggtatcgaacaggccaccgctaaatggccgtatcgatcgaagttctggtactatgctcacggtggaacgcttaaccccgttgatggctccctgatgttcagcgatcagatacgcgaggctgccagtcgactaacggatgcagtggaagcctcttctcagggcatgttctgacccgacagagagaaggacgagctgtcactcgccctgcagactcccgagcatccaggacaaacacgagggaaaggcgtggttccttggaagattggattcaaggaggacatccacacatacaggagtcggatgaggagcaagagagataccgaggcgaagattgcagatcttgagtacagggtatcgagctacgaggcaagaggaggtggcaaggaaggtggatgaacgcatggccgcacatcggtcccaggatccccagctgtacattcctcctgtaatggttagcccctcaggcaatcgtagcagctgcgcctcaacggggcaggtaggatcacagagcatggacgccatgcaaactcaggatgaaaccacctgccccgttgatgagatcacgcagcggacaccatgtgagctgcatattcccttcaagaacttatcaatcaaggtatgttcgtagttttatgatttatgctcgtagttttatgatttttgacttgtacattccgcaagttgctacttaggttgattactaatagataacctctcatcacgtgaaggtggcgttggaaatggccatcccaacggacccttcagggacttaccactgtaggccggttccagcaggatactcaagggtcgaagttgagctggtggaagccgcgtacgaggacctcgagttggactaccctggaggagacggtgagacgcatctacgagacacaagccacgccattatactatggcgcaagcggtacatcatcctccctaggcgacaagcggcgtctcgtgcaccatctcctccggctccgccatctcctccgccacctcctcctgcaccatctccttcggctcctccggctcctccacctccactgtgtccacctgcacctctcaagacaaggtctcgccaagctccaccgcctgcccgcacaagggcaacgaagaaggcgaaagttgacgccaccaaaaacaaggagtcgccgtacgattgcagtcaagaggagcttaatgcttatgtggcaggagaagtgaagaggcaactcaagcctcggagtcctgaaaagaagatacctgttgacccgagcgtgaagaacttattcaagaaaatgtccacaacaaacaaggaggtcttaaagctatcggactatgaccgaacacttaagaaagcctattacaagaagtccaaactagtcccttagcttggagaacaaccataccaacaggtcgagccgttggtgactggcgaagaaattggcatagcagaattcatttctgacaccagtctaactgtggatcagttgattagaggcgcaccaatcctgaaggcggaagtggcatacaagtttgaactcggtaaaccgcttgtcacgcctgagcagctgtagtccctaccgacacagatgtacaaattccatgaacggtacatggaaatgagtgccaagggtagagagatgttcggagcgaggatcagaaactccgacttcttgcaaggagaagatgttctatggatccatttcaaggatgtcttcgaactataccctctggacaccctcgacgtctctcttctaagcgcattgattttgtaagtatcgttgagttcgatttgtttcgttcaataattaactccttgcatatatgtaaacaataataacttcctttttatcgttgtagaatggagattaaaagggctcgacggtggggggtttacgatactgggttcatcgaccctcggaaaatcaacgccgaaatgatcgacaagtacgagaaagacatagaggacaatctcgtccatctcctgacgcagcagcatttcaagacgttcatactactgccgtacaacacagagtgagtttttactatcgttcgaacaaatttcattcccatacatataacatgtacattttcatatatatatcatcacacgcatattgcagattccactgggtcctgttacttttcgacttggacgcatgcagagtcaatgtctataactcaatgaataaagaggagaagactttcgacaaggttttccaacggatagacatgtaatataattgcatctattcaaaagtcacggggatttttcctattgctattatgcgtatctcggataataattaatcatagcttgcaactgcatgtagggtttgggattggttccgtcaattggtccccgggacttggaaagaaaaacttggatggaggtttaattttctagtgagtacatgcatgatccaaaattatattgaattgaatctctaattacagttaatataagtgtatattaaatctctcgtcctttctcatgtactgtgtaaagcaggactagggaactaacttgtgccgctactacgtatgcgagtatgcccactgcctatcaacccaaatctacaccacacgagagcttgatgtacgtatatataaaccattcaaaatttcattgcgtatcgatttgttgtgtatatatatatatatatatatatattaatcagatttgaaccgaggttcatttgcaccaggaatctccaccgtagatgtgtttcaggattcacacatatgtatcagttggttactgcaggaagtgtctcttcaaaccatttaatcatggtcaaaaggtggtatggtcagatggagaggacagacatgcatgtgctgtattttctccgtgccagaaattcattatgttcacagggtgtctttttttttttccaatcggcacgttaaaacgatatatacaaattaatgatgaatcgagtaatctaattagccttttacgtcagagctataaatgagaaaatcattatgtgtgccatacgtatatggtacatatactatatatatgtatgtgtgatgttagtatatacgtgcagtttctgctgatcactctgtggtgtcatgtgggctgcagggagggcataatcgagaatgcaacctgtaccattcaacctaccaacgcacagccctatatagcagctcaatgaggttggtacatcttgatgctcattagtcacatgatggaacatgtctatgcatacacgcgtcaatcaggtgattggggtgcatatgaactgtggtctatattatccatgtcatatatatatatatatatactagcaaaatgcccgtgcattgcaccgggtaatgccgcgttggataatgtttaactgaatgattttgaaaacggtctaatatgacaataataatcacaacagatttctttttgtttggacaattattccacatatacgtgtatgatatgaacgatgttcctaacacgttagcgtaatgattgtaccatgggaggaacaaatggtgaatgcattaggttactttcatgcaagaatagatggacgaaaatttgtatgattaacaaaaaattctatatttaaaataggtaagtttatcataaaactaatgacaatcacgacagataagattacttttgcatatttactcagtctcatagtggtgatgcatgctttcttaagctgtcaactctcgtgttgcaagcgtgcgatctggtttccaaaatcatatgtcgactcacatggaggaagcaaggcgagtggaagggagatgtccattcagcgccaagcggagcgaagcggcggcgacgcggcctaagcggcatcggcggtgggtggggctccatctctcctcttcctcctacgacagatggtgagcagcacagagcggcctaaacggcaacaggaatccacctctcctcctccaaccggcagcgagcggagcggagctctggtggcgtggcccaagcggtgcctgggagtccacctctcttcctttgatcaacggcgagtggagtggagcggcggtattgtggcccaagcggtgggtgggagtccacctctcctcctcctccgaccggtggacggtgcgtgaacgggggcagcaggggcacggtggtgcgtccacgacagacggcgtgacgggtgttctggcgacacagctgatttgtcgctgctacgctccgaggcagcacggaacgacgatgacaatgaggttaggtgccagatctgtcgccgcctcttcctccgccgccaacatctctgccctaggccaccgccataccatcttctcttcttctccctatgctgccgcttccgccgtcacacgggtgaggggcgtcgcgtggggccatgcccccacccaatgcgtcacttgccctgtgcttcgccccacgcctgccaaattccgacgaaaaacgtgtagcttcatttggctccgcggttttcagtcgggaacaacaggcgtgtgcgtggcgatgaatcttcaatgtggctgctcgggacagaacgcgacatcagtgcactgtgaccgcttaacagctgcaatatgcagctcaagcgaggattcagattgggtgcagctgtaactgcaactgttcctgacgactgcggccatgtttagttccttttaaaaaaatttaagtatacgaacacacatttgaagtattaaatgtagacaaagaacaaaacaaattacagattctgcctgtaaactgtgagacgaatctatttagcctaattaatctgttattagcaaatgtttactatagcaccacattatcaaatcatggcgtaattaggctcaaaagattagtctcgcaatttatatgcaaaatgtgcaactggttttttttcgtccacatttaatactccatacatgtatccaaacatttgatgtgacgaaatttttagaagtttaaacggaagtaaacacagcaacacagctgttaacgaccaaatttggtaatccaaggatcggagatgaagaagaaaccgagatggaattcgagatggaaatcgtcccggaaacagagtgaggatcggctgaagttcgaatcggctacgactaagatcggcagagttcaagtcggacgaggttagccgattgagccgaatccgacaatatgacacaacatatgttgtcggtttaggttgatgtgcttcatgataattgctacgcatgtatagagtcctgagaaggcaactgtatcaattaattaggatattttatgtaattttcttagagatatgtttgggcaaaagtctgccgcaaagacttatggtatcttagagtttgttagagataagagtcgtgtccgatatggacatattttgtaattctcgggtataaatagacccgagccccatgtaatcaaactaacacacgttcaatacaatctcggtgcattgccaccctttttactttcgttttgtttcgacgagttcttactttcgggttgagctgcatcggtttcgatcttcaacaaggggtaaaacttgttatggtggcttgcgttctcgggattagtgcttccatatttatgacactctaatcttttttatgtaattcgtcgagttatcatatatctcacataatctctggcaatatcgctatataacctacaatcggctaacatctgtcagtagaaggcagccgattaggttaaacatcgatgctggcttagattatataagatatccaccactctatgacacatccaacggcttgattgtctagatattattcttcttttcatacttatagctgcattagttgagtttgatcttatgagtcgtgattagaatctcaatctctagcctgcctttgattgccgattagggtagtatcagggtttcagccgatcttacctgatttaactacatttatcttatatgccttattgacatgttaaattcgccctttatgttaatatcttgatgcatttaagtatattaggctttcgtttggtatattttacttgctgtgatatcttaatatagagtggtatcgaagtattagccgatacacgctagatctatcttatcagctatggtataaacacatatagtcttgttattaatatatatttcgatctaagtgatttatactgtctcggcatggcgaccgatctatcgcaatcacttgatttaagtatatatcgatataaggactatataccgttaatatctacagccgatcgagtatatttagttctttcttacttattaatgattgccgatcgatgcatatatgacatcggctcaaagataaatgatatgtcatcggcatctagccgatcagctatcatttatagatttaaccgtggtttctttgtctttgtttcttgttgattgcaggatcaaatcaactggcacgctcgcatacccaaaggcaagttttggacctgcattggagttaagcagatctctcaggcctcgtgttttcacatcaacacgcttttggcacgcccagtgggacccattagaagtcagagtcacaacagcggtctctaatggctgagaaaccaccagcatcactgtcctcagctggcaaagaggggactcctaaatctaaaatcccgaaacctggtacatctgaagttaatgagagtaacatcgtgcccatcactccggactggttgacacccgagcagcagaaggatcttgaggctatgatgcagtaagcacggaaccaattcttgaactcattcatggagacccgcaagggaacagttgttcagaagtataaagtaaaagtaattgctgatgttcccggaacaggttcttccaaggatgcagaagtacaacaggttccagatggtacaactcaatcaagtgataaaggtgttgcagatggttttcaagggattcaaggtgatggctctcaaggggttcaaggtgatggttctcagggatttcaaggtgaaaatcttaaccaagatggcgacactgcatcgctacagtttaacaacttccaagatcggattgactatgccgtgcaacatgctttgattaatcaatctggagtattagtcaacacattatcaaacatggtgaagtcgatggttgatggcttgatagctgaatatcaggctacaggaccggtttatttgccaggaggtgttttcccaaactatcggcccttaatcactaataatcaaccagttgtctagccaattcctcccaatgcaccatcggctcaaccgacagcaccagtatcggctcctgcacctgttgcaccatcatcggcactgggtcaattaattaatcctcggttgttggtgagagagcagccacagtatagtggacaaaatgtgaatcggctaactcaagatcaagttacaactatgttcctaccacctcaacctactgttgacacaatccagcaacagccgattcaacaaacaccaccaaggcagcaggttgtgcagccgattcaacagacaccaccaagacagcaggttgtgcagccgattcaacaaacgccactgaggcaacaggttgttcagccgattcagtagcaaggtttgatgaatgcatcggctgtgtttggaacacctgacgatcagctaaggtagcacgctgcgaatcaagttgtcctagagcatttggtccataacgtgcaaccagatcaaactgtggtacctcaggttattcccgaacatttggtgcgcaatatacagccgaactttcagaattaccattggggcaatttgaattatcagtattagcctccatcgccgtaagttcaatatcagcagggaggaccggctcagccccagtttgttcctcaatacaatcaattcgagaccgtgccacaacaagcacaaggagtgcctcagcaacgaccatgggctgtatgattgcagatgtgatgagagaacagtttaggcttaagccgaaagatgctgaaaatttgtatcggcatccttaccccgagtggtttgagagagttcctctgcctaaccaattcaaagttccagatttttcaaaattcttagggcaggatagtgtttcaacctatgaacacgttagccgatttttagctcagtgtggtgaagcatcggctgtgaatgccttgagggttaggttgtttccattgtccttgtctggatcggctttcacttggttttcttctttgccatgtggatcaatcaatagttgggccgatttggagaagcattttcatagctatttctatagtaggattcatgagatgaaactatcagatttaacagcgattaagcaaaggcatgatgagcatgtgcaggactacattcagaggttcagagagatgaggaataaatactacagcttgagtttaactgatgcccagttagccgatctggctttttagggtatgataactccgatcagggagaagttctcgtctcaagactttgatagtttgtctcaccttgcacagaaggtaaccttgcatgaacagaggtttgcagaagccaggaagaactttaaaagggttaatcatgtctgtccttacatatatggatcagatgatgatgatgatgatgacgactccgaaatagcagcagccgaatgggttagaaacaagaaggttataccatgccaatgggtgaagagttctggaaaagaagagaggtatgactttgatatcatcaaggctgataagatttttgatttgttacttcgggagaaacagattcaacttcctactggtaatacaatcccatcggctgaggaattaggcaagaagaggtattgcaagtggcataattctgggtcttattctaccaatgattgtaaaatctttagacagcagatccaagcggctattgaaggaggcaaaatagaatttgatgattctaagaggccgatgaaggtcgatggcaatccttttcctgtaaatatggtacacacagctggccgaacagccgatggaggaagagcaagaggttttcaggtgaattcggctaaaattatcaataagtatcagaagaagtatgacagacagcaggagaggcattatgaagaagatgatggcggttttgattctcattggggttgcgagttctttagattttgctggaataaaggtatgaggctgccatctattgaagactgtcccgggtgcggcaatgttgcagaaagttcaagccgatcgtataatggaagcaatcggctaaggcaagcaagagttcctgttcatcaaaggttgggcccggtgaaccgagattgtaaccaagaggacgatgaagacaggaagactcaatggtgtccttctggtatttttacaaagaatcagaagagaagggttcaaaggttgaggaacagagagcgttttcagtgtcacagcctgaattttcgtttcaggatttataaattatttaataaattattaatagaatttatattaaatgttcattaatttacaagtgaagttaaatgtgggaaataaaatttcctaaatataaagcatggctggatttaatttttattaaattctccatgattaattatactctctgaaattttctcggatttttttcggagctcaattcctaattttaataatgcaatgaatatttcagtaattatttaattaataaattaatcattaaatggtttggtttcaatattgttaaatactttgagtgtccaagtatgttcaagaattctcgtggaattatttgagcattggaagtatttttaacaattgaaagatcatttcagtgattaatttaattgggaaaagtaattaaaatccccttttccttttcgggccgaaacaggaaaagtttacttgtagtcctcggcccatccttccttcctctctctggtcggccttttctccccaaagtctagtttgagttctcctttaatcaggctgtgcaatagaagcccaatccctgcgccactgttcatcttccagctcaggcagagccgagccagccgtgcccgtgtcctattgccgccgatccccttccaaagtccggccacctcgttgctcctttttccaaattagttgcggcaatggaatcctctcaatctcctcttccttttccccaagaaatccccaaaagtttctatggaaatcctttcctatttcgtggttcaatctttcctttttccagcgtaaaccctagtctttcccaaagtttctcgttgatttgggcccggacccgagctcccgtgcctatataaaggaccccctagtcgtcctctacctatcccctcaagtcccgtcttccgccgtcgccggtcagcgccgccacctccctcggcaccgcaaagtcgagctctatcccgatcgctggttattttgcgccaaatcccaccggaggttgcccgtcgtcgtgaaccggagcgccgccgctgccgccgttgggttcgcgaggaggagaagaagatcgtcctccacttccccgaagctgaaatccaccggagctccatcgtcgccgtcaacccgaagttcgccgtcgagttttgatctccggcgaggccctactgctcatcccgtcgtcgccttcggtcgccgtcgtctccattgggttcgcaggagcaaggtgaagcccggccaccgggttttcttcgccgaagatcactgaaacgtcgccgccattgctgacccgaccccatcgccgcctctacctcgttgccggacgtctgccgtcatcatccatcgtcgcgccgcccctcggtgagctttcctctctccgatgtcgttcatcggtgtagtttatccatagggtcttaatccaaaatctaatttggcccttgtgtcgtcgtcgtctccatgtgttgccgccgggtcaccgtcgtcatctctctctccgatcactttttggttcggtgagacttctattcgtcgtttcgtgttcccattgccacattgtcgctgccacactgccgtgccacactatcaaagccttagtgtcgctccctgcctcagtcatgctgctgcgccgtgccgctttgctgttgccagccaagccacattgccaccgctgctggtgttgcgttgccaccgctgccgcgttcctggcttagtagagccattgctaccgctcggtagccgtctcgctaagtcgtcgttgagtcgctgccgctgctgcgccttgctgtcgtgctctgccgtagctgtgcgtcgtcgtcgctgtgccatcgccctaaccctaactgcgtgactccgccgagtcaccgccgcctagccgaaccaagtcgccctagtgccgccatgtcgcagctgtgtgccgctttaacctagccgccgctttagccgttgctcggtagccaagttgtctagccgtagatgcatcccttaattcctaccggcctattgtttgctgtaccggggctttactgtgaatcgtgtatagctcaccggtttagtcacagccgttgttgagtcgttcgctcgttcgttttaatgaggtgttccccgtgcttcgttcgttcgtccatgttaagtcgtcctttagtttagagccgttcagagccgccggttccgttcgccggtttcggttgatcatttgagtgatcccatgtcacgtagaattgactcgttgagtcagtatctcttgagcttcgcttgcaagattaatctcagccgtccaaaaccaatatatatccgttccctctttttagtggcatattatttctttttaatatatatcatctaccaaatataatctaatctttttcggaggttgtttccaatcttttatcttagttataaatcatttgtaaattgtttaattaatgtggaatagtctttttctttaataggtttaattggaattaaatcttgtaaaattcgtaactaattcatatgaaatcggaatgaggccgttcaagtctcataataaatctaaaatcatgatctacatgtttgtttactttatatgtactgtttatttggagtttcttagtctttttcctcgttttgcgtgttagcatgtagtttctgtcgtttcgaaggttcgcgagtgcgccggaagtgttcaagaagattaattgaagaccgattattgcaaggtaagtcacacagatcccaaacacaattcctttgagcatgttggtcctatatttaaattcgaatgtcaccgggtggtgtgaacctattcctttgttatggccaatttgcattgattaccctatttcttgattacctcgggttacaatttgactagttgagctctatatattgtttcagctagatgttagacataattgcttagccatgcttagaaacattagcacacgattgggataactaatgttcactattacttaatgatggatatttaatggtagctcacgatggtcaatcgtgattggttagttaattaatttgccgactaaaacttgataatggtgggttgtgagcacatggttttgatggtcgtgctcatgacaattaaggatcggttcacgagttttggttgtgaaacattaaccgtgccaaccacaagccagcgtggcaacggctttaccttttgtatagcatggttcattgcggggaccagactgagaagtggcggagataagcccacgggggtcgctggggagtccatgccttgtttataagggggtgattatgatccaggaacggtgcgctgtggtggattgtgttatgcgaggggtactgtcacagctcctttccgaggtatcgtggtggtattgaggcgcatggtgacatgttgtggggctgtgtcttgtgggtacagtggtacacctctggccagagtaaaactagtcgaatagccgtgcccgaggttatgggcgggtctaacaatgtcttttgtgattagtctcacacttctcaccataataaatgatgctataactggtaataatttgattagctcctggtttagaatggtacattcctggattgagatagatctgtacagccgggtatggttgttcaggatggttgggcctgagcagcatgggtgtgctgttcagtgttgattaaaattgatgattaattactctactgttttataattctaaaatgtttgctaaatgctgcttttgcaaatgagccctatattatgccattctttggtatccttgtgcacttgcatatttgctgtgtgacttgttgagtatgtcatatgctcacattgtaataatcaatcaaacctcagtggaagaaaaagaatccagatagagaagacatttggcttataccccagttgagctgcctgagggagtggagccggagcttcgctagaccgtaattccgctgcagttttcttttcttttttaagtatgtaacattgtattattgatgaatctgtatattaaattgtcagtttgtgtacctcggctgattcctggacgagggttttatgcacaaattagttcggaaattactagtgaatttatgggcgtgacattcaggaagttgagcaagaaatcaatcatcagctaaagaagacgaagccaaagcaggagtggcgtgttaagattcaagttcctgcagccgatgaagccacagccgatgaagcaaaaagattggctaaaggaaaaagtgtggtgactgcatcggttaacatggttttcacgttgcccgctgaatttggagtcaaacaagccgatgttgataaagttgaagaaaaatcggctaaattgattttattaccagaacaagcagtctttgagaagccagaagggatagagaatcggcatcttaagggattatatgtgaacggctatgtcaatgggaagccgatttctaagatgatggtcgatggtggggctgcgttaaatttgatgccttatgctacatttaggaagctaggtagaaatgctgaggatttcatcaagacaaacatggtacttgttggcagtatggcatgaggcccttcgaccaaacctgccgaaaccatgcgaccagtaaggattcaagcctaagacgtcaagatcggttggggcgaagcccccatggcgaagactatggagcaaagacggcgaagggcggagaatcgtgcgggtgcctcgtagagccaaagacctcttaggcgaaggatgtaaggcgaagagtgtatgtcgaagggagacgacttcgccatagcaagttcggcctcacgaaggcccagtggcctttgggccaacgatcgcctgacggaccattaggagcccatgtacctcaattacactgtatacccacataaatgtccctttcataagggcagccatgtaaattcccctgtataacctaaaccccagtagcaagaacttgtaatgaggctataaatattctcctagggtcatgtaatagggggatcccaagaaaaattctccattcaatacactttactttctttccaaccactgttgagtaaccacgtctttcgacgtatgcagttgtcgtttcgaaaacagctggcgccgaccgtggagacctccaagcgaaaccactgagagcgaatgccaccgaagagagtcgtgaaggagaaggttacaaggcgaaaggaaagcgaagccggaggggggatggccgccgaaaagggagcagagccttcggcgcccatcgccgaagatggcggagcgccaccggcttcggcaccagcgccgctactaccgtcttcggctcctgccgcctcgttggggcaggtgccgaacacggctgaagcagcgaaggcggcagcggcggcaagggcactccaaaccagggcggagatcctttcgacaagcaaactgctggtgccccaagccgctccgtcgcagctggcagcggcctcgactgcgctcaccgctgtacaagtcaaccctgatcccgaaacacaagccgaagccgacatggaagccatgcgacagaacatgacatgactccaagacatgcttcggcagatgcaagaacagcagcaggcgtacgaggcagcgaggcgggccaaggccgcttcggccccaatcctccagtattcggcaggctacatcccaccccaagtctatccacaagcaccgatccaaccccttccaccacaagccacgcaagcgctagtatacttcgctgggcagccttcgaccgcagcagtacatccgggccctcacgtgcaactgcaagctcagccggtcactacccaagcacactctcaaccgcctggccaagtgtcacaagcgatggcagaaggggcttcggctctgcaagcgcagcttcaagctttcattcaacaatttagccaaccccacagcatttcaggtatagccccttcggcccagccggaggggagtacaggtcatggtgcgcctagttggttgtcgtcgaatcagccgggtctgggggctttgccttggagtcaaggaccgtagttcgacttcaacaatattgctcaggcaccaaccgttccgccgcaagcaccaacactaggcttcgtggcaaaccaagcaccaaaccagtccgccatggcatggccccagccaacattcgacccatccatggcagctcaccaagcatcaccaatcggagctgggcagccgaacaccgtggcccaacctcacgcgcaggccgtgacttcgcctttcgccacaccgtatccgtagcaaggtgccgtgaacagggcagggggcgaaaaggggctactgctgagtgggggaatcaagacccgtccaatcccaccccagttcaagttcccacccgtcccacgctattcaggcgaaattgacccaaaggaattcctctctatctatgagtctgcgatcgaagcggctcatggcgacgaaaataccaaggcaaaggtaatacatcttgctctaaacagcatcgcccgttcttggtacctcaatttagcagctaatagcatctactcatgggagcaattgcgcgatgtctttgtccttaactttcgagtcacctacgaggagccgaagacgcagcaacatctactcggcattcgccagaggtcgggagaatcgataagggagtacatgcgtcgcttcttgcaagcccggtgtcaagtacaagacataaccgaggcgtctgtcatcaatgccgcttcggccgggatactcgagggcgaactcacaaaaaaaatcgccaacaaagagccgcagacgcttgaacacctgcttcgcatcattgacgtgtacgcatggggcgaagaggattccaagcgatggcaagcaattcaagctgagtatgataaagcctccatcgccgctgccaaagcccaagtacaagctcaggtcgccgaaccacctcctctcgctgttcgccagcctcagccggcgaaccaaggataaccgccaaggcaaggccaagctcccataacttggaggaagttcagaaccgaccgtgcgggcaaggctgtgatggctgtcgaagaagttcaagccctccgcaaggagttcgattcccagcaagcaagcaaccatcagcagcccgttcgcaagaaggtccaaaaagacctttactacgccttccacggacgctctttgcacaccacggagcaatgctgaaacattcggcagcgtggcaacgtgcaagatccaaggccgcagcagggagcagctgtcgaagcacctcgcgaagacgttcaagaacaagcacccccggccgaacagcgccaagatgtgcagcgtcgagtaatccaagtgattacaagggccgacccgccgaatcagctgtcgaaatgacaaaagaagatgcagcatcaaatggtccacaacatcacttcggcgggcgaaggggccccacaatatctgaaccagcaaatctctttcgggccggaagatgccgaaggagtaatgttcccgcatcaagaccctctggtgatctcggccgagatagctggcttcgaggtccaacgaatcttagtcgacggagggagttcggccgatgtcatcttcgctggagcatatgccaagatgggattaccgaccctagcccttacccaagcatcggcatcgctccgtggtttcggcggtgagtcagtccaagttctaggccaagcgcaattgctggtagctttcggcacaggcaaaaacagacgcgaagagaaaataatgtttgacgttgtcgacatcccgtacaactacaatgccatcttcggctgtgcgaccttcaataagttcgaagccatttcccaccacaattatctcaagctcaagatgcctggcccggtaggagtgatcgtggtcaaggggctccagccttcggccgcttcaaagggcgatttggccataatcaacagagctgtgcataatgttgaggccgaaccacatgatccggcgaagcacgcgccaaagcccgcccctcacggcaaggtaatcaagatacagattgatgataccgatcccacaaagcttgtatcgctggggggcgacatgggcgaagaagaggttgagaacatcctagaggtgctcaagaaaaacattgataacttcgcctggggccctgatgaggtgggaagtgtttcgacagatctcatcatgcatcacctggcagtcatgccggatgccaagccaaggaaacagaagctacgcaagatgtccgttgatctccaagaagcagcaaaagccgaagtccaaaaattgctcaaggctagggtcattcaagagatcgaccaccccgagtggctggcgaatccggtgctggtgcggaaatcaaacgacaaatatcgcatgtgcgtcgatttcacaaacctaaacaaggcatggccgaaggatgatttccccttgccacggatcgaccaactcgtggattcgacagctggctacgaactcatgagcttcttggatgcgtactccggttaccaccagatccacatgaacccggccgacatccccaagacatccttcatcacaccattcggcaccttttgccacctcaggatgcctttcggcctgaggaatgccggggcaaccttcgccaggcaggtgtacaaggtcctttacaagcagttggggtgaaatgtagagggttatgtcgacgatatcgttgtaaaaagccgcaaggctttcgaccatgtgtccgacctgtaggagaccttcgacaacttacgcgcggcgggtatgacactaaatcctgataagtgtgtttttggtgttcgcgcggcaagttgttgggtttccttgtttctgaaaggggcattgaggcgaaccccgagaaaatcgatgccattcagcaaatgaatcccccgtcgagcgtacgtgtcacaccctaaaaatcctaaatatataaattgttgtttaattggaattatttttaaaaggctagaagagaagatttaattttaattaataaattccaatataaaatggggccagataaaatttcattaaatactttgtttaattctataattcctagatttttctgggatttatttgagctaaggaagtatttttaataaatggaattgcatttcatgaataatttaaattgaaaaaggtttttaaaagtctcttttggctttgggccgaaagtcggcccaaaacctcctctctctttcccccggcccaagtcggcccagtccgcagccgtccgcgcgcgcgcgctcgctgtcgctgacaggtgggtcccacctgtcaatcttcgtcttcctcgcgccgccaccaccgcccgaaccctagcgccgcgccgccgccgtctccttccaaattcggccgcgccttttccttctccggtgaaatcaatagaggggaaatgatctccgggatctcctccaccttttctcttttggaatcatcggctaatttcgtttggaaatccatggattcgaggtcgattcggatcggtctctctcctccgaaccctaacctttccttcttgtcgctggtcgccatgggccttcgccaccgcctccttgcccctataaaaggatccccaagtccgccgctacccgtcgccacccttgccttcgtctctcgccgtcggaagcgccctagcgccgtgagaccttgtgccgttgtcgtcgccgtcgctccagccgtgcttcgccgtcgttccagtcgtcgccgtcgctcggggagaccgccatcgtggtcgtcatcgcgtcgccgtcctcgtccgccccttcgccgtcgctgtagaccgccggagcatcgccgtcgtcgtcaagccgaaggaccccgccgccttttcctcgacgccgccgccgtctgttcatcttccgccgtcgttttggtcatcggtgagttcgccgcgtcgcgctctacgtcctggtgccctccgtttatgccgtagcgccgtcgttcgccggcgagcttgcgctcccgagccgccgccggaggtgacgtcgccgctgacgtcatcgggaccgtccgccgtggcccggtcgtggaccgttcgatctcagccgtccgttttggataggatcgatcccgaccgttcgttcccgcgaaccgctgccgtgcacccggtccaccgcaaaccctagccgctgacgcaataaaccctttttccttttcaaaaataattcattattgcgtcataattcaattaaaacccatataagtgttttaatccgatttaatctttaaaaattcataactaattcatcttagctcggatttagttggttcaagtctctaaatttttctaaaattgagatctacatgttaaaaatatccacatgtactgttcatgcttgtttatgtgctgtttggtgattttgctcttttttgcttagattccgacgtttccggagagtccgttttcgcaggagaagaatttgaagagttccaaggccagtaaggcaagtcacacagattccaaacaaccctttgagcatgttgatcccgtttaaagctactgtttctattcaactattgcatttattttcgaatgtcattgggtggaattaacctattgtttgttatagcccctttgttcttgcttactttattccttgataccttgggtgtttataactcgactagttgggctatatatattggttcagctagatattagatgtgattgcttagccatgcttagaaacattagcacactattgggataacttatgattcactattaattaatgatggcttactgatagttcacgatggtcaatcgtgattggttaattaattatttgccaattaaaacctgataatgttgggttgtgagcacatggttttgagagatcgtgctcatgacaattaaggaccggttcacgagtttcggttgtgaaacattaaccgtgccaaccacaagccagcgtgggcaacggctttacctttggtatagcatggttcattgcggagcaccagactgagaagtggcggagataagcccacgggggtcgctggggagtccatgccttgtttataagggggtgattatgatccaggaaaggtgcgctgcggtggattgtgttgtgcgaggggtattgtcacagctcctttccgaggtaccgtggtggtattgaggcacatggagacatgatgtggggctgtgtcttgtgggtacagtggtacacctctggccagagtaaaactattcgaatagccgtgcccgcggttatgggcaggtctaaaaatgtctttcatgattagtctcacacttctcaccttaataaaagatgctataactggtaataatttgattagctcctggtttggaatggtatattcctggtttggagatagaactgtacagccgggatggttgttcagaatggttgggcctatacaacagggtatgttgtatagcgttggattaatattgtttaattattacttaactgttttattaaattctgaaatgtttatcaaatgctgtttatgcaaatgaaaccctactatgccatcctttgttatcctgtgcacttgcatatttgctgcgtggcttgctgagtatatcatatactcaccttgcaatcactcatcagaggaagggttctacagtgatgctgatggtgtggaggattaggtgtagccctggtcaagctgcctgtggagtggagtcgtctgcgccgtttatcttatctttccgctgcttagatttttattgattgagcggaactatctacctctgtaatgacattttgttcgcttattaattagagtaataattgtactcaattatcaatttgttattgtgtgcctcggctgattcttggacgagggttcacacacatgtaagcgtttggaattttggatagaaattctgggcgtgacaagttggtatcagagcccccttgaccctaggttatgccaaacggttacccatagaagccctctaaaaatattggaaaagtagaactgttctcctccccttctcttttaattaaaccaaactaatagcacatgcaattcataatctcttttagtggttctcgttcaaaatttattccagcgttattagtactgtacatctattactgtactaatggctcatttaccagcaaaagttttacaatatggttttatttaatcttgctgcaataaaataaatttagcatgttgattttataactttcttttatttctttggaacctgttgttcaaaagtacaaaatttgtgaccttatttccaactgtttcaacttatcttgcaagcttggtttactttatttacttacctttttctttgattttctaactttattcaaattaatccaaaaacttgtgctattaattggataaatgtcttaactccctcctttcacttgtctttagatgccgtgctacaagcctgagtacttgtttggtgttgagggatttgtccaggagttgcgtacgatgtcctttgccataggatttgggactacccctttttatgcccagattcctcatgatcgtcacgaagagaagtgccgagtcaaagtcaccttgaacagtaatagtgaagatatcccctcagtgatgttcgaagctggaggaagaaactacatccatgcatgtcaggaggtggcaaggatcgccataggagagctccgcgatcgctacagtgatcagttggccgacactgagtatctctaccatcctcgcaaccacagggaagtgaccgtggcagctaccttgagactgaaggaattgagaatgatgctaccacaaagcatttggttgagatgctgtgggctatggatgaaacccgtgcagagactgtgttagcagctcaagatcgtgaagaccggaatcatggtaagatttgcaagctataggacaaagtggatcgtttagagaaggaactagccgcattgaagggagaagcaccaccgcagaaggccaggattcgtcttaccgcaaggaagagagctctatttgtccctcgctaccaattggcgccaaaggtccgtgtggtggagaaagaagttaccccagccctagcgaatcctccggtcgtcaacgtaagtgatgatgaaggagaagaatccaagcgcacccattccaagatcgagtggggagcaactcaagatgatgaagacgagccgaacgagccttcaatcaactccgatgcccggaagaactagaatgccttgtcaaacagttgtcttagatcgttgtgttagtttgcttgttttaagtttggttgtgtgtgtctcgcatgtgatttacatcagtggtgggatgtaagtccatgcgtttgtttgctttcgagtgttaggtagttggtgagtttagtggtgtgagagtctttagttttgtaataatgaaactcacttaagatcaataaaagttaaattaattctctgtcctaagtagtttttcccggtttctcttcttgtgatcctgcccatgccagatggtgctcactcgcagcaacgggaatggccccaacaacaacaataacaacaacaatggagagaatcccacacttgcccaagtcctggctcaacaggtacagcttatgaacataatgatgcagcaacttcagaaccagcagaaccagggaaataatcatgcacctcctcagaacaagttagcagaatttcttcatgtgaggccgcctactttctctagtaccactaatcctgttgaagctggcgattggctgcatgccatagaaaagaagttggatttgcttcagtgcaccgatcaggagaaggtctcatttgcatcacatcagttgcatggccttgcctctgaatggtgggatcacttccgcctgaacaggactactactgaacctatcacttggcttgaattcaccgctgctttccggaagacgcatataccatcgggagtggtgtctctcaagaagaaggaattcaggtcgctcactcaggggtctcgctctgttactgagtatctgcacgaattcaatcgtctggctcgttatgctccggaagatgtgcgcactgatgaagagcgacatgagaggttcttggaaggacttaatgatgagctttcttacccactcatgactggggattatcatgatttccagaagttagtggataaggctattcgccaggagggcaagtacaaccgcatggagcagaagaaacgccggattgctcaattcaaggcacaacaagggaatagtcagaggccgcgtcttactttaggaccccagtccatgcgacagggaggttcttcgtctgttgttcgtccgcagcgtcagttcttcaacaacaatgcgggcaacaacatccgcaatcaagctccacgccctgttgcagcttcgacacagcaacagcctgccaagaaggagcaaggcagcaagcccgtggtgtgcttcaactgtggagacccaggacattacgctgacaagtgtccgaagccccgacgcgtgaaggttgtccctgcccagagcaactctactgtaccagcatcaaaggcccgtgtcaatcatgttgctgctgcagaagcccaaggtgctccggatgtgattttgggtacgttccttgttaacttagttcctgcaacagtgcttttcgattctggtgctacacattcattcttatctatgagttttgcgggaaatcatgggatggaagtagaagatcttagacgtcctttgatggttagtaccccaagtaatcaagcactctctttgcaacgtagcccctctgtcagaatagaaattcaaggagtaccatttctggccaatcttatcctgttagaatccaaagaccttgatgtcatcttagggatggactggttagccagatataaaggtgtgatagactgtgccaacagaaaagtaactatcaccagtaatgatggtcgagttgtaactgttcatgcattgtcttctgagcctttaaggtcaagactgaaccaaataactttggaagagattcctatagtccgggagtatcccgatgtgttcccagacgatttacctggtatgccgcctaaaagggatatagagttcagaatagatttggtaccaggaacgactccgatccataagagaccttatagaatggcagccaatgagttggcagaagtcaagaggcaagtagacgatttgcttcagaaaggatacatcagaccgagttcatctccatggggagctccggttatttttgtggaaaagaaagatcatacccagaggatgtgtgtagactatcgtgcactaaatgatgtgactatcaagaataagtatccgctgcccagaattgatgatttgtttgatcagcttaaaggtgccatcgttttctccaagatagatcttcgatcagggtatcaccagttgaggatcaaagaggaagatatacctaagacagcttttaccactaggtatggattgttcgaatgtactgttatgtcttttggacttaccaatgcccccgctttcttcataaacttgatgaataaggtgtttatggaatacctagacaagttcgtggtggtctttattgatgacattcttatctactcccgaaccaaagaagagcatgaagaacatcttcgccttgcactagagaagctacgagaacatcaactgtatgctaagtttagcaagtgtgaattttggttgtctgaagtgaagttccttggtcacgtcatctcagcaggaggagttgccgtcgatcctagtaatgtggaatccataaccaattggaaacaaccaaagacagtttcagagattcgcagtttcctaggccttgcaggatattatcggaggtttatagagaatttttccaagattgctaagcccatgacacgattgcttcaaaaggatgtgaagtacaagtggtcagaagaatgtaagcagagttttcaagagttgaagaatcgcttaatatcagctcctattttgattttacctgatccaaagaagggtttccaagtgtattgtgatgcatcccaacttgggttaggttgtgttctgatgcaagatgggaaggtggttgcatatgcatctcgtcagttacgtccgcatgagaagaactaccctactcatgatcttgagttagctgcagtaattcatgcgttgaagatttggcgccattatcttttcggtacttgtatagaggtgtataccgatcacaagagtttaaagtatatttttactcagccggatctgaacatgagacaacggagatggttggaattaattaaggattatgacatgggaattcagtatcacccgggaaaggctaatgttgtagcagatgctcttagcaggaaaggctattgcaatgctacggaaggacgacagttgccattggaattatgcaaggaatttgaaagattaaatttgggaattgtcagaagaggtttcgttgcagccttagaagcaaagcccactctaattgatcaagttagagaagcccaaattaatgatcctgatattcaagaaatcaagaagaatatgagaagagggaaagctatcggtttcttggaggatgagcaaggaactgtatggttgggtgagagaatctgcgtccccgacaacaaagatttaaaagatgcaattctgaaagaagctcatgatactttatactccattcaccctggtagtaccaaaatgtaccaggatctcgaggaaagattttggtgggcaagtatgaagcgtgaaatcgcagaatacgtagcagtatgtgatgtttgtcagcgagtcaaggcagaacatcagaaacccgccggtttgctgcagcctttgaagattcctgaatggaaatgggaggaaatcggtatggatttcatcactggtctacccagaacgtcatcaggccatgactctatttgggtggtagtcgacagacttaccaaagtggctcatttcatcccagtaaagacaacctattccggaagttggttggcggaattgtatatggcaaggattgtgtgtttgcatggcgtccctaagaaaatagtgtctgatcgaggcagtcagtttacttcaaatttttggaagaagcttcaggaagagatgggttctaagctgaactttagtactgcttatcatccgtagacagacggacaaaccgaaagggtgaatcagattttggaagatatgttgagagcttgtgctttagacttcggtggaagttgggataggaatctaccttatgcagaattttcgtacaacaacagttatcaagctagtcttcagatggctccttacgaagcactgtatggtcggaagtgccgcactccgcttttgtgggatcaaacaggagaacgtcaggttttcgggacggacatcctaagggaagcagaagagaaggtgaaaatcattcaagaaaggttgcgtgtggcccagtctcgtcataagagttatgccgacaatcgtcgtagagatctaagttttgacgaaggagattatgtgtatcttcgtgtcacgcctcttcgaggagttcatcgttttcacaccaaaggaaaattggtaccgcattttgtgggaccttataagattgtcaatagaagaggagaggttgcttatcagttggagttacctcaatctttggcaggagttcataatgtgttccatgtgtcgcaattgaaaaagtgtttaagggtacctaccgaagaagctaatcttgaacagatagaagtccaagaggatctgacctatgttcagaaaccaatccgtatcttggaaatagaagagagaagaaccagaaatcgagttatccgtttttacaaagtccaatggagtaatcactcggaagaagaatcaacttgggaacgagaagatgaattgaagtcagctcatccgcatctgttcgccagttcttccgaatctcgaggacgagattctgtttaaggggggtaggtttgtcacaccctacaaatcctaaatatataaattgttgtttaattggaattatttttaaaaggctagaagagaaaatttaattttaattaacaaattccaatataaaatggggccagataaaatttcattaaatactttgtttaattctataattcctagatttttctgcgatttatttgagctaaggaagtatttttaataaatggaattgcatttcatgaataatttaaattgaaaaaggtttttaaaagtctcttttagctttgagccgaaagtcggcccaaaacctcctctctctttcccccggcccaagtcggcccagtccgcagccgtccgcgcgcgcgcgctcgctgtcgctgacaggtgggtcccacctgtcagtcttcgtcttcctcgcgccgccaccaccgcccgaaccctagcgccgcgccgccgccgtctccttccaagttcggccgcgccttttccttctccggtgaaatcaatagaggggaaatgatctctgggatctcctccaccttttctcttttggaatcatcggctaatttcgtttggaaatccatggattcgaggtcgattcggatcggtctctctcctccgaaccctaacctttccttcttgtcgctggtcgccgtgggccttcgccaccgcctccttgcccctataaaaggatccccaagtccgccgctacccgtcgccacccttgctttcgtctctcgccgtcgaaagcgccctagccccgtgagaccttgtgccgttgtcgtcgccgtcgctccagccgtgcttcgccgtcgttccagtcgtcgccgtcgctcggggagaccgccatcgtggtcgtcatcgcgtccccgtcctcgtccgccctttcgccgtcgctgtagaccgccggagcatcgccgtcgtcgtcaagccgaaggaccccgccgccttttcctcgacgccgccgccgtctgttcatctgatgaactactgtacatctagtcatccattnaaccact

SEQ ID NO: 17253 - DNA, 710 bp, Oryza sativa
  unsure (1)..(710): unsure at all n locations
gccgcttcctgccttgcgcctcacagtggtacagtcgttcatcacaactttgaagtagctatcaccagttatgatgggctagttgtaactgttcatgcattgtattctgagcctttaaggtcaagactgaacctaataactttggaagagattcctatagtcccggagtattcccatgtgttcccagacgatttacctggtatgccgcctaaaagggatatccagctcacaatagatttggtaccaggaacgactccgatccattagagaccttatcgaatggcagccaatgagttggcagaaaccaagaggccagtagaccatttgcttcacaaaggatacctcagaccgagttcatctccatggggagctccggatatttttgtggaaaagaaagatcatacccagaggatgtgtgcagactattgggcactagatgatgggactatcaagataagtctgcgctttccagaatcgatgaccttgttgaccacgttaacgagccataggtttctccaagatagatcttcgatcagggtctcaccagttgaggatccaagaagaagatatacctaagacagcgtttacactatgtattgagtgatcgatgtgctgaatgccctttagacttaccaattgccccgcgttcttcatataccagctgaataaggtgccatggattacctagacangtttgtgcggttcttaat

SEQ ID NO: 17254 - DNA, 754 bp, Oryza sativa
  unsure (1)..(754): unsure at all n locations
acaaggccacggccaccacaccagccaccacaccaaagagaatgttgccacgctgcttggagcgctcatattctggatccccagcaatgtcaatatccagcggcgtgtccaggctgtggcccaggagggtctccagcagcgtgcggttggccagagtctcattgacataaagatggaccaaggctgtgccatagcgtgggggcttgccgcggtcactgaccttcaccaccaggcggtgtagcccatggtggcgccgctcaatctccttctccagggtgatggcacctgaatgtgacccaatctggaagagtccataagggttgccacctgcaatgctgtagatcagctcggcattgacaccagagtcaaagtcctcggctgccacctggctgaccgtctcaccaagacgtgtctggggggtcagcagcttgtgagaggtgttagaaggggcagtgatatagggtgcgttgtcattctcgtccagcacattgatggtgacaccaacgtaagctgagcgaggtgggacgccaccatccactgccttcagctggaaggtgtaggtgctttgttgctctcgatcaaagctcaggctggataggatggtgcctgtgccattctggataacaaagtcaccgttgtcctgctccactgagagctgcacctgggcattctcccccttgtctccatcaatgacagtcaccatgcccactggactcagtgctggcatgttctgataactgctctcaancccact

SEQ ID NO: 17255 - DNA, 751 bp, Oryza sativa
  unsure (1)..(751): unsure at all n locations
taggtcctttgattactagagtggcagtagttcatcaaatcggcggtgacggaggcaggccggcggtgaagtcgtagacgcccaacagcggcggcataataggccagccgtgtaggcggaggcaccactcggcggcgacggaggcaggccggcggtgaagtcgtagacgcccaacagcggcggcataataagccagccgtgtaggcggaggcaccaatcggcggcgacggaagcaggccggcggtgaagtcgtagacgcccaacagcggcggcataataggccagccgtgtaggcggaggcaccactcggcggcgacggaggcaggccggcggtgaagtcgtagacgcccaacagcggcggcataataggccagccgtgtaggcggaggcaccaatcggcggcgacggaggcaggccggcggtgaagtcgtagacgcccaacagcggcggcataataggccagccgtgtaggcggaggcaccaatcggcggcgacggaggcaggccggcggtgaagtcgtagacgcccaacagcggcggcataataggccagccgtgtatgtggaggcacccaatcgcggcgacngaggcaggccngcggtgaagatgacgatgcccaatcacggtggtgtgaccaaccgaccgtataggcggngacaccagtcggcggcgacggaagcaggccggcggtgaagtcttagatccccacagcggctgataataggctaggcgtgtaggcagaacaaccatcg

SEQ ID NO: 17256 - DNA, 766 bp, Oryza sativa
cacggaggtgagactacatactgctgcaagtgttcatcattcacatgaccacctcattgacgaaaccgattgtgaccatttcctgccttacattcaaaagctaaacctatgactacactgagggcgtggcattcaaggtggagatatgctcctacgtccattcttatgtctgctatttattcaccatcgatgctacagttggcactattcaaagatctacatatacgctattgctcatcatctacggtacactgaccacagctgtcgtctaaattgatcacacggggatggaagctacctgctgggataactcgcgagttgggacaaggatgaaaacatttggagcagattttcggatacgcccttctgcagacaacttcaatagctcatgcagcatagggagaaggtaagcaaaggtctttccggagccagtcttggccttagcgaccacatccttcccttcctgaaatcacagtattacactattcgtcagttgcacaaattattgaaaacctgaatgtctgctggaattgctaaaaaaacgtcgcaagttttttgggaaaaaaacatgcaaatgtaactatatcagaattatattacaattatactataattagatttggaaagttttttttctaaataacttaaacttaacatgtctgcccctgacaaacaggagaaatatagcaaaacttatcgaaaaggttcaccaagacaaagcagacaacccaaatatgcaaagcgaacaacaattttgcacattggc

SEQ ID NO: 17257 - DNA, 748 bp, Oryza sativa
ccctgtagtagaccacacattactgcagtagttcatcactatcatgattgactttagccctcaaaaggaaaaccataccgctttccacaacacaacccgtctattacaacgacccatgcttcattccaccggcaacgcgacgctacattagatcacgctcgcgctcgatcggcacgccaccacaacctgcacacactagagagggggcgaagcactacgttgcttcgcaaactcagggtgtggtggcacagccgcggacatcgatttggcagcatgagcaggctgggcttgcacatgctttcttgaacggtggcgtccccggttcatgtgtcgctcacagtacttctggtcggcgaccgcatccctcgagcaccgccatttcttgccgtccgtccggcggcaccggccgggctccggatccgcgctgccggagtagcccagctggaaagatccccatcccactgcaaagcaaaaacccaaccaagggcaatgcaaccaagatcagggaatggaacagcttttatcataaatatcagtccatgatgaaaggaactaaagccaagaaagcattcggttgatctgctttctttcccatttcttggcttacatgtgcttgagccaaagtaggcaggtgagtagggcgatgtgaggctcctcctgatggggatgaggaggctgtgtggtacagggctattcgcagccaagtacttgtatatcagcgcctggtgcttcagctcgatccactgag

SEQ ID NO: 17258 - DNA, 88445 bp, Oryza sativa
  unsure (1)..(88445): unsure at all n locations
tgacaaaactgacctttttgatgattttgatgatgaataatttcatgcaaggactagtttttgccttctgatagttgctctatatagtttcgacttattactctagatcattctgtgtgaggtttaatattttttttcttggggaatcactggatctagattgtaaagttgctaatccaaacaagtcaataaacatgtcacaaaaaaatatattgttttttttttcatatgcaactagagcgaactgtaaaatcttacacgtgcagagaaataggtagtctgtaatgatctactttatgtctcttaagttgttgcatgcagtatgattgtgatcataagtatatctcattgtaatttcaatttgtgataactggtaggttgatgtatacgtagcagtatttcttttcccaagtttgatgggcattgaatttctctggtttcattatatattgtagtttaaagtatcacgcaatagtattactttaagttacatttgtttaagtatttcttaattgaattcctcccttaagaaatacggagtactgcactaaagtaatgttctttgttctagggtggtgaggagccgaagaaacatggtttggttttctattgttcgtttggttaagccaacaaaaaccagatcgggtgttttgactatgtgtacctgcggaaaacgttggctagaagaagaaaatgactgtttgcctgaaaattgggatgaatacatacatttgtcgtgtagtaagaccccccttaaaacgcacgatagaaaaacacaataggttcccggcgaaaaaaaaacacaataggaaaaaaacgtaataattgaagtattatgtttttccaatcctatgaaaattgagaaaaaaatatatataaaaagatgagtaaattacacccgcggtacatgaacttgtgtggtgggtgcaaatagatacaacaacttacaaattgctcactttgatacaataacttggctagttggtgtgaaccgggccaaaatgatccacacaagtaaaattgctctaaattagtgcacactaatgacataacaacatatacatataactgtgatttggagatcttatttcgaatccaaataaaaatgtgcaaaagtttatttttcatgtccatggtacaatatttgtttcattttttggaaaaatttgatcatctatataactcgtctaatgtttatttatctgttcaagaccaagacaatttttatatgtactattaactactaaaagaaaattttaattttcatgttcatgttctgacactttcatcgaaagtgtattttaacaatcaggtatttttaattattttgctttttcgttggtctagatcttaaaagtatcatgcgactaataatatgtgtcagtaaaaaattttgatgtgtaacaataattacacactagtacgtatcatattacatcaattttacttgtgtggattagtttggcccatctttgtatgaactagccaagttattgtaccggaataagcaatttacaagttattgtacctaattgcacccaccatacaagtttgtgtatcgtgaacgcaatttactctaaaaagatggactctttgattgcatcacaggaaacattcaacaatcaacgaagaaaagtttcacaagagatctaacctcttatttattttcatatggaattgaccataggaatggaatcctatggaatcaaaggactctagaaaaaaatccttcaaaatttctttgctaatcctccatttcaaagggtccctaaattaccatttggacaagattttttaacaaagtttcactttgaagtctttgcgctattctaaattctatattttatataataaagctaaaagtatttacatattttactttgaaccactctctaatgagcggattacctttgtaagtaacgtgtgggccaaaagattatcaggcccacatggtagtaagaaaggcaatccctaacgactaagagtaagtataatagtgggctataagaaggctgaatgctgaggtggatgggagaaaagaggagagagatgagaagcaggctgtaagtttgtggagattatgggtaccccatacccacacggcatggttatccgactagttataggggataacttatatatatgaaatatgtaacagattatgacttgggtattacgtttccctgtatattatggaacggcctaaagtcctggtttgataagattgtaaagtagatttaggaaaccgataccgtgttggttaaggtttctatcttgtaatcctgcccccatcctatataaggtgggcaggaggccctctagggggcatgagacaacttgatcgtcagatctatactacacccggcggattcaaatccccaaacaggagtagggtattacctctcattgagagggcctgaacctgtctaaatcctttgtctctgcatccatccacttttaggtctcgtgcgctaccccgttttattattgccgaattcatgtttcgacagttggcgcgccaggtaggggctgcgtcgagttttccgtcgagaagtgcgatggaactttgtgccggcatcatcggtgctactcttgtctttggccgtgatcctctcaacaaaagggcagggtcttcgtcgccaaaaattctatctggatctggtcaatcaaccaggagattaatcaccgatcgaatcgatctacaaccagcttgttaccgtcaattttacctccgtcagtgagatcaaatccgtcgctacaatgctgccatatctgttggtccgtcggtttcgtcaccagggcatgatttgaagcaatcagcaagcagccgccgccaaaatcatgcgaagatcaccgttggttgagcctgtacatcaccaagtcaatactactcggatacgtacggcaagacacaaagtccaggatacaaattaaatatacctggtcaaatctgtggtcaaggaaattaatccatacacaaatcagctattacatgcacaaagtggtctccaaactaatccgtgcatgtgctaccgacgattacatgtctacacggctgcatgacacggctgcatgctacggttcatccattgacaggcctcgaatcaaagttggatcacaaaccaggtttatcgttctaaattttcttatataaattagaattaattcacagatcactaattattatttgatctattattttatacatgtaccgccggccgccttcgtcgctgccgattggtttcatcgcctccacggttggtgtgcgccgctgccgttgctgatggngatatcgtnttcaccgccggcctgcctccgtcgccgccgactggtgtcctcgcctatacggtcggttggtcacaccaccgttgatgggcatcgtcatctacaccgccggcctacctccgtcgccgccgactggtgtccccgcctatacggtcggttggtcacaccaccgttgatgggcatcgtcatctacaccgccggcctgcctccgtcgccgccgactggtgtccccgcctatacggtcggttggtcacaccaccgttcatgggcgtccacgtcttcaccgaccggctggccttcgccgactggtgtttccgcctgcacggctggcctattatgccgccgctgttgggcgtctacgacttcaccaccggcctgcctccgtcgccgccgactggtgtcctcgcctatacggttggttggtcataccaccgttcatgggcgtccacgtcttcgccgaccggctggccttcgccgccgccgactggtgtttctgcctacacggctagcctattatgccgccgctgttgggcgtctacgacttcaccgccggcctgcctccgtcgccgccgactggtgtccccgcctatacggtcggttggtcacaccaccgttgatgggcatcgtcatcttcaccgccggcctgcctccgtcgccgccgattggtgcctccacctacacggctggcctattatgccgccgctgttgggcgtctacgacttcaccgccggcctgcctccgtcgccgccgattggtgcctccgcctacacggctggcctattatgccgccgctgttgggcgtctacgacttcaccgccggcctgcctccgtcgccgccgattggtgcctccgcctacacggctggcctattatgccgccgctgttgggcgtctacgacttcaccgccggcctgcctccgtcgccgccgagtggtgcctccgcctacacggctggcctattatgccgccgctgttgggcgtctacgacttcaccgccggcctgcctccgtcgccgccgagtggtgcctccgcctacacggctggcctattatgccgccgctgttgggcgtctacgacttcaccgccggcctgcctccgtcgccgccgagtggtgcctccgcctacacggctggcctattatgccgccgctgttgggcgtctacgacttcaccgccggcctgcctccgtcgccgccgagtggtgcctccgcctacacggctggcctattatgccgccgttgttggacgtctacgtcctcaccgccggcctgcctccgtcgccgccgagtggtgcctccgcctacacggctggcctattatgccgccgttgttggacgtcttcgctttcaccgtcgaccgccttcgtcgccgccgactggtgtcttcattgttattgatggacgactttgttcccacattggccacttctgccatcaccaaggggaatattataaagctaagtcatcatttattttattctttatatgatatttttccttttcctctgcctcactacaccaattggtcttccattgagtagtgagtcgggggctacagatgttatatcatatttttcataatatttatcttgattgcttgcgacataatctgagtacaaaagtacctatcgagttatggagttctatcttcctatgctttccgtttggtttgccaatggatggttgcctttgggccgattcctagcacccgggggctcgttggatggaccgagtaacgcaaggtgctaagtattattcggaataaatcaaaagcatagagatgagataaatttattttctgctcttaataattgcaaaagtacccgagtagaaaattctgatccgtgaaactttgttccattaatgacgaactcatgtcactcatatgcatgtttgggaagtgcctaggccgactcccggtgcttgatggttatgactagtcggacagagtgtttaaacgtacagagtcatctgctcggggaaatcaaaattgacaagaggagaaatacatatttataaatattttaaaatacttgattttttctcgagtattatatttatatcagatactactcatcctatatgtttgttctgcaggatccagatccagatatgcataaaagggattcatggctttaagcttatctcttacgctccaggaatggatcagtcagaacgtcaccaccggctcgcctcgaccgccgccgactggtgtttccgcctgcacggctggcctattatgctgccgttgttgggcgtctacgtcttcaccgaccggccgcctcgtccgctgccgactggtgtttccgcctgcacggctggcctttatgccgccgttgttgggtgtctacgtcttcaccgaccggccgcctcgaccgccgccgactggtgtttccgcctgcacggctggcctttatgctgccgttgttgggcgtctacgtcttcaccgaccggccgcctcgtccgctgccgactggtgtttccgcctgcacggctggcctttatgctgccgttgttgggcgtctacgtcttcaccgaccggccgcctcgtccgctgccgactggtgtttccgcctgcacggctggcctttatgccgccgttgttgggcgtctacgtcttcaccgaccggccgcctcgaccgccgccgactggtgtttccgcctgcacggctggcctattatgctgccgttattgggcgtctacgtcttcaccgaccggccgccgcatccgccgctgactggtgtcaccgcctgcacggctggcctgttataacgccaactgatgctatcttcttcacggctggctacatcgctgtcactactaataggcatcagtatcttcaacacaagctgcctacgtttgtcatggctgccgactggtttcttcacttccatggctgcatgattctgccagtgttgattggccttaccatcttcatcgctggtcgtctcgtctgctgctgactagtgccctcgcctctacgtctggtttatacagctaccactactgatggacatcatcatcttccgtcgccgactgattatgccgccgccgactggtgcttttatcttcacaactgcgcgtcttcactaccggtttgcttctgttgccgccgacttgtgttcacttcattacggcaatacaactttgtcatcatggtggagcgacttcatctttattatcttcggcaccggcaaactctattgttgctacttcgcaagttttactacttcaccacccacgacgtctttgtgaacctcgacatctcggcatgcaatgccatgttattttactacaacaagtggctctccaatattcaggatttctacttggacatcttcaacacatatcttcaatcaagtgatgactactcgacaacaagaagctataattctcgactctatgttcagttgtttcccaactaatcaaagagtcgggggctacacaaatacatggctcaaaatttgacaagctttatgtcaagatgaagcaatcaattaatcagccaacaagtcaactctgggagtcatcaattttgtcttcgcttcagagcagtaggtcaagattaaatttacatgtctgggagtttggagtcatcaaccaatcaactcatatcagattcaatgagttgaacaacagcatatactttcctccaagtgaagcatctacaacagtttgatggattattgtcactgacatcatcaccagcacatctgcttcatcagctctgacattccgccgttgctaatggatgactaagactttgccaacttgctattccgccttcacggttgacctactatgcaaacgctgatgagcgtcttcgtcattatcatcggctattacaccgctattgactggatcaccgacatcgtcatcttcatcaacatcctgtcaaacctctttatcatagcttactctactgctattgataggcaacttcgtcatcatgtttgatcatctctgttgatgcttatcatcattactgtcggttacgtttgtcgtcgccgactattttcctcatcttcatgattggtggatttcgtcatcgcctttgatctgcctcgtctgtcaccgactgattatttcgctgccatggctacacaactttatcgctgggcgccttcatcttcattgatggctgacctgactgttgccgactggtttcttcgcctccacggctgtgcaacttcatcacttttgattggtatcactatcttcactaccaccaatatttttgccacctctgttgggcaatattatctctatattggtcgtcttgtctctatgccaactgcgtcagctaccatcaatgaacaattgtgactacgtgctcaggggcttactagctcaaatacaagtattatatcttcaatttggacttgctccggatatatgcaacatgaattcatgatcatgggtctattttatatgctcaaagactggactatttattattccccgtaagggttatcaactgaatacttgcgccagtcgggattcaattgttatatctattttggagtatcccataagggataatcactcagatcacatggtctatatcacccgggagcatgttacatgtgtcatcctttaaagggtatcgaaggcatattttttggcctaggcctaatatgtctgcagcccatattttcaggtgtggcctgtcacgttcttttagggacttaggcactttttgcttaggccaaagtgcgcgtgatcaagtgcccaataccttaaaatccttttataccgcagttactcaactttttaggagttggtacaatgcatcttaaaaggtgtcaaacagtaaagctttatatagctgccccgctggcttttttatatagtcatggtgctgtttgggtttttaagcaattgattggatacaatatcattgctttttgccacgtaagtgtgcatttttattgaccaatattatggcttaggctgattatatattgtggtcatttttcaggcggttggtaaatcctttatgagtttatttactcggattttataccacatatgccatatatttccaggtgtggtggaaccatgtgtcttctagggacttaagcacatctgttaaagcagtgtgcgcatggcgtatgcccaatactttgaaaatttctttattcacaacatacaagcttctttatagctattttgctatgtgaattttcaatgatgtagccaactttaggttacactcatcatattttacaaagcagtcggtatatcacttggatcatattattcagggattcacaccgcatatgctacatattaatattaagtcgcttggttgactacaattatcgaaaccactcggtgcatctagtcgatgcacctgactttatttttcagccctccacagtcttcagatttggtaaaaatactcgggagaccatggcaaagatgattgaagtactcggttttggagtaatctagttcgagagaagattatcttttcgactgtgaaggtctcaggggctactgtggagattatgggtaccccatacccacacggcatggttatccgactagttataggggataacttatatatatgaaatatgtaacagattatgacttgggtattacgtttccctgtatattatggaacggcctaaagtcctggtttgataagattgtaaagtagatttaggaaaccgataccgtgttggttaaggtttctatcttgtaatcctgcccccatcctatataaggtgggcaggaggccctctagggggcatgagacaacttgatcgtcagatctatactacacccggcggattcaaatccccaaacaggagtagggtattacctctcattgagagggcctgaacctgtctaaatcctttgtctctgcatccatccacttttaggtctcgtgcgctaccccgttttattattgccgaattcatgtttcgacaaagtttacagccggcttagacataggaaccaagaaaatctgtaagacagacatgtggatcatatatttatagtgaatagttaaccactatatgagtgagctgatagatagactataactaagcagctggatgtattattatcttgctctaacgagcaccggctgctgggctcctctccccgtcgctcaacggtctattggcccggtctaatagtagggtccgatcttttttggtccaaccgatcgaccgaaccgggtctgctacgataggtggaagtgtgcccatatccactcctcggcaatttcgcattccccccgaaaaatttgaaatccttttcgcatccctctcctctccgcgattccccactcccggctgcagggcggtgcggcgatggccgacgctccgccgccggtgctgacgctgcaggtgaagaagggccgccgcggcggggagacccggcagtggcgggcgggcgccgtgctccgcgtcggccgcgtcgccaccggcaacgacatcgccgtgcgcgacgccggggcgtcgcagcgccacctctccatcgagttcctcccgccgccggcctcgcggtgggccgtctccgacgtgggatcctccaacggcaccctcctcaacggctcccccctcgtgcccaccgtcccctccccgctctccgacggcgatgtcatcaagatcggggagtccagcatgctcgtggtctccatcgcgcccgattcggatcccaaccctggccctaggcgctcctcgcgccaatccgccgcagtggtgggggagcaggagaaaccccctgcggtcacccgccgtggcggacggaagaacgctgcagcggcggcggtggcggttgagccgcccattgcggagaaggaagagccagagccggaggaggctccagtggtgactcgccgcggtgctcggaagaaggccgcgcaaccccccaaagcggaggagcacgaggagggcgaggaggaggtggtcgcggcggtggtgacgcgccgctgtgggcggaagaaggccgcagagccccctaaaccggatgaggaggaggagcaagagaaggggaaggatgaggaacaagaggagaaggaggaggaggaggtcccggtggtgacgcgccgcggcaggtcgaggaaggcggcgccggaggcagccgttgcgccaccgccgccgagggcaaggtcgacgagagctgctgctaggagaggcaaggcagtggacacaagcctggatgagagggagagcgagatggccggaaagggacggggaagggctacaaggtctaatgcaaggaagtgtaggatggccgttcctgaggacgatgacgatgatggggaacagcaagagggggctactgctgtggcagaagagcagataaaggatcaaccgagggcaatggcggtgactgacggtgaggaggaagatgataaggtggaagccatggatggagaagttgaacagaatgacaaggcatcagaggaggaggaggtgccagtggcgcggagaggacgggcacgaagagctccaaaggggaaggctactgcaagtagtaatgctcatgctgcttcggacaacgcggttgaggaggaagacggcggtagaggagagggagcggctgtggaagtggagggggagagttctgggagcagcagcttggaaaccatgacactgagggagtggtttcagaggatgaatgtgtacctccctaggatgatcaatgaggctgctgaagaggcgctttcagccctgcgggagaggcatcggcgtatagatgagtacatttcaacgcttgaggattagcgtgattcatggtatgttcatctctcaagagaaatctttgtccttctgttacttctcttcagcaagttcagttctctttatgaaatttcctactgctgtcagaatgttctattatgttcgaatagctcaatctttcaggtctagcaatgacttttctgcattgcccagtaattgataattcattttaattactagatacagtatatgtataggaactgtacttgaatgcagttggtattggggccgtatctgcataaatttactatgccatgcctaatgccttattgctgactatcaatctggattgcctcaacatttgcttatgttaaagttttctcgcaacaattttgtaggatcatgtttattgagaaagttcttgcataccaaataacttcatcaggtgctcttgtcatatattttatcttcacttcataagtctgatttatgtcctctcccagcaaaaaccagaatgccgagtgcatatctggctaatctccagtgcaaccattacccattattagtctccaacatatgatgggaacaattacgatgtagttgacagttactgtttagatctgaaatgaatgtgtaattgtgaagcaagtgtgatctattcattcttgcatattgaataactgtttactgatcaattctagccattgaggtgtagcaattaacatagacaattactctctccgtttcataatgtaagacattctagcatttcccacattcatattgatgttaatgaatctagatagatatatatctagattcattaacatcaatatgaacgtgggaaatgctagaatgacttacattataaaacggaaggagtagaacatacttatatctgcagtttgttctttgcctgtaatgtttcccttttgcatccataacatatttacatgtaaaagctgcctctgtcaccatatgatgtgcctatttccatactgctagtgctatgacactccacgttcctgatctgctactatgggactgaagtttcatgagtgatctattacacaaccgaacagataattgttcagctgcagttctttgttctgcttgacgttttgccacagccaatgcttgatgccttgaactaaaatgacaatgttgaagaaattttttgcacgactctttcaagatctaaaattgccttttggtgccacaccgtcttattcagcaagctttacaacccagtgacacagaactcgcaaatagtttttcacagtttcagcgtttccgtttgagatgctgaaaaggaagatacatccagtggatcatatttttctgtgtaatccttgctcccatagtctcatgtattgagctgtggcagaagtacggtttattttgctattcatctactaatgcttgtgcttagcttttatccacaatttgcttaacatgccatctgtctgcaggataattaggagctatttggtcaatctgacgtaggggtgatgcctggagataacattaattggaggcaatgctttgctgaagcgccacaaagatttgctgaagcgccacaaagagccattaggtgatatttcactgggatcatctcattatcgattccagttccaccaaatgccgcaaaaatcattgatgcaatacactgtagcactcttcatgtttactctagttatgtagtaccagtactctagtactcatgaagtaggacctgggttcgtaggcctctatgcaaaggcattcaacatgcatcgcagatttcattctgtaaattgcctctctaaggtgatgtttattcatgcctaacctctatctggaatacaacgcgacaatgttttgaatgtatatgtcgtttctaccatggctgctattaggagtcagaactgattattttgcccctcccccgttttttacttttgaataacgtgttcctggatgatcagtatcaactgttgggaatttgttggtgaagatgagttctcatgttttgatactaaatcagaccaccttctagtctcaatgacctctctcatctcacttggaaaatgtacctgatttgttgcagtgatcctcatattgttaaaacccactctttaatgggatccttcgatcctctacatgcaacgctcagtaataatctcaggtgaaaaatgaacgaatgctcaatcttatctttattttcagcgatacgaagcgcacaatgcaatttcacctgcacagcatgaactgttaaatcgaatggcaacacagaagaaaggatcagatgcaattatctaacaaagaacaacacacgcatggcaacatctggtatccatgccattttgtggagaaaaacacacccatcacccccagctcattcagtgccatgtactgatgtacagactcacagcggaagacatttccaaagggtttaacctgctcatcgggagcacgcagtccacattctttttgcagatgcagaagcattgcttaacttcatacaatgaacaatctaagttctaagacctaccatcagtaactcctagctcaactagaacattggcagcaagagtcatcgttttctcttgccatgagtctttgacttgttctcaaggtcatttcctggtggcgccttaagagacttggatgcaactgctgagctccacagcgctctctcaacatcagaagtagtgaaaacttcttctcctgagctcaattcctaccagagaaacaaaaaatatgaaataaatgtcaatcaagcaccgcatgtgttcatcttcagacttcagctaacagtccaaatgttcaacaatctataattttgatatggaatttgcagtttactcggtgttattctagcaatgcggacgttacatgcttgcattttgcaaatataaaagcataacgttcaagtactaatcagcttatcagtatattaccctattgttgcagctgctgtctggaataaaaaggcaagcagctgaaaatttggcatacgatttttgtaatgcatactctgtaaatttatgagcctggcatccttgagcctattggacgttatgatttagagaagcatcagcaaacaagaaaaaggtgttatctttctgcactagttcttgaacagtactataacaaaaaatatgtggtggtatgttctatttcaatttcaaatgtcagctaagatcaattcttctaaaatgactccacacaaccagctaccttttgaagtccctttcagtttatctgcattaaatcaaccacatatttgaagtgtatcaactagaaatctccacacaagggaatacaccgtatttttttcccctttgtctgaactcaagtgatagtcaccgcaaaacaatcctaaagcattaactaggttcagacttgcagctgcctagcaaaccgaaggcttattatacagacacttcgatcagcacaatcaggaaaaacaaatgctatcttaacaacagtttatcacacatcacaaatgcagaagcaataccttcgatttagtttgcaacttttcagcaaaagcaagatactgcttcagagtgtactcctttgcattgcctaaggctgccaccatagcctaaacacagtccatccatgtttacaacatcaaagatgcattcatctcacctggaaatgcagaactgccaaaacaaaattcacaaactcacctcatcagacatgaacggtgcaacatcaggcgcgtaggcagcgagaacagcggatgccgtggcagggccaacgcccttcagcacggtgagctcggtgatggccttgcggaggtcaggcagcgctgcgaacgccttgcacgatgctgattctaccactgcatcctccaagcccttgacgaaatccatcagtctcggcctgcacaaaagaacagagcaacaatatgattattttttcccccaacgagtttgataataacagggtagtgtaggagtatcatcaactaaccaactagggtaatgattgatttgccaagaaaacgagtccctaaatcaatggatcaaatcagtccaagcacccttaagatactagcatcatccaattgatccacacatttcggcacgatttctagggagatttgagcgagaaatactactacaacatcacacgcccctgggaaccagaagttcaagtgctctaaagaggaacaggaaagaaaatctaagagcgggatgagacgacctccacttgccgcgggagagcttccattggaggaggcgcaccagctcgggcttggcgaggaagggctccgggtcgcggcggcgcaggagatcggggaggtcgcggcggtagaaggagtcgacctcgacgaggtcgggcttgcccagggccgcgagccggcggtcgtacgccgccagcgccgctcgccactccgccgcgtcgccgctcgcgaagtccaccgtctcggccatcgtcgttaccggaggcggcggcgcggtggaagaggtcacttcggcgcctcaagagccaggaatttcaaacagactagtatctacccatgtattaatatctctcgataaatacaacttcggcacatatcattggatatctactctattatattatcatcggtcgattggattgattgttcaagttcttctattgtctttatatcattatttatctgagcgttagaatttacctcggacatatagccaattgttcaagaccatatcaaatcggcttattggctgatcggttcttttatcatcaatttatctatcttgtcagttatagtatcaaactgactgacacgtacaaacctgatattttaggacttgcactggagcaaagcacgtatagatgatgtcagcacaagcccatctatagatagatgtttgttcctccttttttttgcaagcgtcctgtgcgttatattcttattagacactctttaggcccattcgtgaatgatcctatgtaaatgtaagcttctctattgcctttatgcgtacaaaaagattattccgtataagccttttctagtcttatttcgataccttagttatcttctagagttaggtataattatgataaataattatttctaaagtgtgaatgatattgtccattcaaatatactccctccgtaaaaaaaaaaagacaaactctaggtttccgtgtccaacatttgaccgtccgtcttatttgaaaaaaatatgaaaaaaattaaaaagacaagtcacgcataaagtattaatcatgttttatcatctaacaacaatgaaaatactaattataaaaaaattcatataagacagacagtcaaacgttggacacggaaacccagggtttgtcattttttgggacagagggagtttgatccaaatgactacaattattctaaaccacaacaaaaataatgatgttggcataatatatatttaatgtggatgttttttattttaccaattttcgtttttcgtgtgctggaacacatcaatttctcccagtggcaacgcacgaacacctacctagtgtaaaaaagaagagagaatctactatatgctactgagtttgtctcagttcaacgatttgctactgataatgtctctttgtgcaatataccgatgggacactgaggagagtacaaagttcaagaagattgcaatatatcgatgggacactgaggagagtacaaagttcaagaagattatttgagccagtgaacatatcattatgatcatgatggtgagcagcgtagtggatatatgtcccacgccataaaagaactagtgtgcttcttggaggagcaactccagcaaccccaaaacacctcagaccacgtatccacccagacatatctacgtaagttcgataagcatatcagtcatggtaactaattattttagtaaacaacaacattgaacaaactctccagattaactcggaataaaaccataaaaaagtgggaacaaactctccaacaaacattaacctgtaggacagaggcttgacataagacatcgggacatagatgataaacattaacctaaaggcaaggatcatcgatgtgatgctcgccacgtgaactacaatcttcaccctcttgatctccatggttttgggttgctcgtcatcgccaatttgaaccaccatacttattttctctaatatctattttgtcatatataagtcaacttaaacgcataccacctatacacgattcttggtagatgagcactacgcgaccatccgcagtagctagtagcgcctcctttatctcactctctcccgcaccgtcgttgcaacagtgcctaagagcgaagtccacgacaggcaataccccacatgcccccctacgctcataaaacaaagggtaccttatagaaatagttgatctccatggttgtgggttgctcgtcgtcaccaatggagcttaagctaaagtggaggggaaacctatagaaataaacatcaatatttgaataaattgatcaaacatttaaaattttaggatgagataatcaatttaccatttattttggttaattacaacactttgagctaacatatatcacttgaaagaaaatagataacaggatgacaaaaacgaatcatccacaataagaattaacagatatcacacctgaaaataaacttacactaataaatataaaaagggtttgttggaaccatgctaaatttgagatatgccacccgcatctcaatgacatgtaggacccacgagtcaatgacatgtgggtcagggtggcatatcacaaattttgcaaaatttgtgtggcatggttcaaattgtcccatataaaaaatgcattatcatttgcagcgtaaggaaatcaaacttaatatgaaatgcattcctcagcacgagacggtagatgtgtacatagtgctaacacaatcagatgtagagtacatatatcatcctaatcctcaagacgaaaaatacgtgtagttttatagatcctcctacttctcggcacgaggaaatcggcatcgaagatccatagcatgcctagtgccttgacaatgctacgatcgtgttgtctagcaagtagggcagtacccaaggctgcaattagccctacctcacgtgcagcacatgagtacctgcatgaacataaatataagttaatcaaattagggggcgtttgagagggaagtgagttgaaagacctcatttacatggcaagcattaaggcccatataaataaaacattaattaactctatccatttccaagatatagttagttttataaataatttctgacactattccaaagccaagtacactcatccactgttgtttaaaaatgtatttgttgtactacaatgatgaggaaagtagtaacattttcaacccaagacaaatttattatgaaaatatattcaattattgatgtgatgaaactaatttagtattataaatattactatatttgcctataaacttagtcaagacatatccgtaaggtcggtaaggataccagtcatggtaactaattattttagtaaacaaaaacactgaacaacaaactctctagattaacttgaacaaaaccacgaaaaagtgggaacaaactctccaatgaacactaacttgtaggacataggcttgacataagacgtcgggatataatgataaacaccctgatgacgaggatcatcgagcacatcctcgccacgtgaacgacaatcttcaccctcttgatctccatggttttgggttgctcgtcgtcgcaattcgaaccatcaaatctcactttctctaatctcgtcatatataagtcagccaaagcgcctaccacctacgcactagataagcatagcgcgaccaaccgtggctaataacacctactttctctaatctcgccatatataagtcagcctaagcgcctaccacctatgcagacaagcatagtgcgaccaaccgtggctaatagcgcctcttctatcttgccctctcttaactagacaagcacaacgcgaccaaccgtggctagtagcacctcctctatcttgccatctccgcaccgtcgttgcaatgttgcaacggagcgaagcccacaaggggccaatgggggcacatgcctttctatgctaatagaacaaagggtaccttatataaatagttgatctccatggttgtgggttgctcgtcgttaccaatggagcttaagctaaaatggaggaggaacctatggaaataaacattaatatttaaataaattgatcaaacatttaaaatattaggatgagataactaatttaccatttattttggttaattacaacactttgagctaacaaatatcacttgaaagaaaatagataataggataacaaaaataaatccaaaataataattaacagatatgacacctgaaaataaacttacacaaataaatataaaaaatatattatcatttgcagtataaggatatcaaacttaatatgaaatgcaatccttagcacgagacgtagatgtgtacatagtcctaacacaatcagatgtagagtacatataccatcctaatcctcaacacgagaaatatgtgtatatataatactgcgtatagttttatagatcatacttcttggcacgaggaaatcaggatccgaggatccataacgtgctagtgccttgacaacgctaagaactccaacaaacaccgctagcacagatccaactaggaaccgtgtgcactcaaccacgctgatgcaaagatcatgctgtctaccaagcagggtagcgctcaagctgcaattcaccctacctcacgtgtaacacatgagcacctacatgaacatagatataacttttactctatataacttaatcaaattagggggcgtttgaggggaagtgagttgtaagacctcatttgcatggccagcattgaggcccatataaacaaaacattaattaactctatccatttccaaaatatagtcagttttataaataatttccatgacactattccaaagccaagtaccatcatccactgtttgtttaaaaatatatttgctcgtactacataacgaggaaagtagaaaaaatgttagtagtgctttactactccattcattgcccagcttattttggtccatcattggggagggatctttcattgcacggcttattttggtccatcattgattggggagggatctgaggaaaagacattgaaagtatttcattttattctcaattttttctaaacaaactattaatacttgtactttgaaactgagagagtagaatttattgattatcgtcatgctctatgcatattaatcatgagattataaagtataaggagattatttgagccagtgaacatatcatattgatcataaccatcatgatgtgcagggtagtggatatgtgtctcacgacacaaaagaactggtgtgctgattggaggagcaactgcaggaacccaaagcacctcaaaccacatatccaccgagacatctccgtaagagcaactccagcaaccccaaagcaccgcaaaccacatattcaccaagacatatctccgtaaggtcggtaagcatatccaccaagacatacctacgcacgattctttgtagacgagcacatcgcaaccaaccgcgaatagtagcgcattttctatcttgccctctccgcaccgtcaatgcaatgatgcaacggagcgaagcccacaaggggcaatggggggcacatgccccttaagctcatagaacaaagggtaccttatagaagaaatagatgatctccatggttatgggttgctcatcgtcactaatagagcttaagctaaagtggagggggaacctacagaaataaacatcaatatttgaagaaatcgatcaaacatttaaaatattaggatgagataagcaatttaccaattattttggttaattacaacactttgagttaacagatatcacttgaaagaaaataggtaacatgatgacaaaagtgaatcatccaaaataagaattaacagatatcacacctgaaaataaacttacactaataaatataaaaaatgcattatcatttgcagtgtaagatatcaaacttagtatgaaatgtaatcctcagcacgagacgtagatgtgtacattgtactaacacaatcagatgtagacgtgcacattacagtacgactgtgtacatataccatcctaatcctcaacatgagaaatacgtgtgtatatatagtactatgtatagttctataaatcctcctactacttgtcacgaggaaatcgggatcagaggatccataacatgtctagtgccttgacaacgctaagaactccaacaaaccccgctagcacagatccaacatgatataaagggcattaagtggaaatcctctatgtttaactttgaaatcaactagttcttgagaggatttacaacatgtagttgaataaatttggaattcttataatgaaaagggttctagtattgacaaatgcgttggagaatgcaaatgataggaaaaaggctaaaaggatagaacatgaactgagatggtgaatacaaatggaaaaaaaggtggcaaatgaagtattcatatcaagattcggatagagatgagccaagagaagtttggagtggagggactgaagtttttgtgtgctcctctttttggcctgatgccgatggatgcaggttttctgccctagcttatttgtagtttttttggtagtcgatttggtcacacctgaaccaacgagaattaggccaacaccttttattttctttcttgaacttaatttctcttaatacaatgatgcataattctttgccgtattccctgaaaatactttcactgaactaaagtatataagaaggagaaatagtgatcaagctaataaatgaaacatggtgtaataaaaaaaaccataaacaaacatgtgagattgtgataaaaagcaattgtaactatatagcagctcatccctcatgcggagagagagataatggggagaggggtgtttataataaggatgagtatgcattcatgataatcttaacaacactaaacaaccttgactaacctggccaacagttcttgtgtgcacaatccagaggaaggcactaaatcactacatgccaatcgatagaagagacaaatacttggatgagcccctacaatatgtccacaggcaaaaaaagttgacagacttgcttaggagcacaccaaaagccagatcaagtaaatacaatcaccaaacatctattttgttttgtattttttatacaaccccctaatgggaataaactaagcatgttcttattgatttagttgattgacatggatgagccattgaaatatttgttaaatataaattactttccattaaaatataataacaaaaacaaggaagaaggtttccgcatgtaaaagtactaaaaagataattcaatatgtattcaaactttagtagtacctcaagaaacatttcatcgagcagttcttgagcaccaaaaacctctaatgcgttcctcctcttccttgttctctttgtatccttctattctctagccatggcagcagtacacggcatcacatacatcatgaggtcagcacagagcagaagcaaatcaacaacaaatcaaaaagagcaatgcggaggcagtaacataatagcagcagcaacaacaacaacaaggatacaaagagaacaaggaagaggaggaacgcattagtggtttttggtgctgcagcggaacagcaaatcgtccctaccaagcaaagcaagagcattgaactcattttttttagcagacggtaggagcaaccgcataggagttggcaagggatgtgaagacctgaaaaaatttcaaagccttggtaaatcagttacttacaacaactgtcaggcgactcaagctcgtgctgccaaccgttgttgctaccatctctccccctttgtccgcaggaaaccgccactattgccgctaccatctctcccctttgtccacaagaaaccatcgctatccccatcctttgcatctgtagtgatacatggatggggataaacggaagacaatggatcattttataagatttcatctcttcctcctcttatggtgacgacgttgcggcctgctacctagtcccgctttgctcgccctagggtcacactcggccctcaacccatgctcactgcgttccttatggcgaagatgcggagtcgaggacgacgacagatcgacagcaccgacagcggtgggcaggcggcgatgtcgagcggagttgatgtgtagcggccacagcgcactgtgttgaggggaggtggcgacatgggacaaggtgacggtgctgggctaaggcgcacggtggcaggcctgttggtgagccggcgacggcattggatgagggatggcagtggcgatgagccacatgggaaggaagaggggtggttcaaggcggcgacgaagtggaggcgtggggtgctcaaagcaaggaggttgtccattggtttcactaatcctactactaatccatctgctaatccaactcacaatgtaggtcgttagatgagaggatccaacggttaggaatgatctgggtatattttgttaattcgttttgactttttccgtagccaaacttaaccaagttttttgataacatatttgttttgtatttaaaatgctatgctaacttgattaaataaagtttgattagtcaaaacaacttataatatgaaacagagagtatatgcctactaattactaattgacttactatactagtaatatgaacgtgctaacgctacggtgatatttcataaaacaatggtgatagacagaaaaatagaatcatgttgagaatcaaacaactaattatacttgttgctcaaagtatattgatttaaaacccattgcatgatcagtttcacttgagcaatcaaagcgtaaggattctttgaaaaataaaatcaaccacatacaacagtagtgggagaccatagtttacagggtcaataatcatgttttctccttttctagcctccaaagataggaacattgattcaattgtttttaaaagagtaaaatacacggccggtccttaaacttgtagggatgtgttatctaggtcctcaaaatacaaatccaggtcctagaacttgtcaaagtgtgtcatgtaggtcccaaatcgtcacagctcctccaggatcttacatggcactgatgtggcaatgacacacagacatgacatggcataatattgaatgacaaatgagacccacttaaaaaattttcatttcccttttttattctcttttttttcctttcttctccttttcttgctctcactgcagctataggccaccgctacacgggttgctcaggtcacagagaaaagagaagagaataaaagaaaaaaaaagagaagaagaaaagaaaaaaaaggaaaaggaaaatttttaaatgccacgtcacgttcgtgtggcacgccacatcagcgccacgtaggattttggaggagttgttgcgatttgggacctatatggcacactttgacaagttctgggagttggatctacattttgagagtttagggacttagatgacacacctctacaagtttaaggaccgcctgtgcactttactctttttctaaactcccaagttactttagaaaggttgattttgaagatcatctgatttctaaccaacattttttaagatgttggagaggtggttgaaaaccaaagacataaaaattacatgatttggtacaagacaatcacttgttaagcatccaaactacccttcatcatgctcagaagtaaaagagagctgaaactcacagattcagaagtttggatcactgaaggctgcaacatggactgttcacttcagaaaagagtcgacacttcaaatttatctacactgatcacacaacctaatagattcaccagacaccaatctaatgacatatattttgacaaaatatgtagcagagaaagtactaatcattcataaattacaccatgaacgttgcttaccacgtagagcaacaatcgacagaaagccaagcttgcactgttgtttccagcttcctatagattttcctgcaaaactataaaactggtgaatttcaacaccaaacatggccaatgatatttaatcatgaaaaatcggtataaatctaacggcctcatcttttcgcttatgcttattagccagaatttaaattttcaaccttaaatttggagttgattttgggttttttttcaccgtagtttattttttagcctttgcttttagatcgttaagaacacgtacataaaattttattcacaaattatttttcgtttgcaaataagccatttggcttattcctcaaataagccaaacaatggggtcgtaaaaggctaacctcaataaatggaaatcttcattgatcatgatgaataaaaaacatgaccagagctactactatacataaattaaaaacaatattttttttataaaaaaacactactaattggtgcatccaactcacattaatagataactcagtacaaaaataggaacattgattcaatagaataagatgctaatagctctcccatccctaatctcccaagttactttaggaaggttgactttgaagatcgtctgatttctaaccaacatcttttaaggtgttggagaggttgttgtaaaacattaaaaattacatgatttagtataatacattcaattgttaagcatcctgtcacgaaccagggggctgctggaacaacagagtcagcttctgctcctaatctcataccatttgtcgtgatctatgaagtaaaaattgtcattcagataattaatatgaagagaggaaaccttataataccttctagtggcaggccacacagttctaatagccttcacctccacttttgcagcaaggtggaagtaattttacaaaaaattaactaggttagtagagcgcagatgttcagtgcaaaattactcaccagttgtcttcccataaaacagaaaaagtagttgagccttataaaataaaaactttgatgcagggtgttcagcattattggtgattaggaaatagttccagttctaaaccagagatctaccgctgtttacaaactgaccagaatcaaatctatgnnnnnnnnnnnnnnnnnnnnnnnntgcatatgttttacacactttttcaagaacacacgaatgtactgcatgcccttcatacaaagaggaagatagggttagacatatcgtattactatatctgaataataagaggatgatatagttaaagcccttcatcatgctcagaagtaaaagagagctgaaactcactgattcagaagtttggatcactgaaggctgcaacatggactgttcacttcagaaaagattcgacacttcaaatttatctacactgatcacacaaccttatttcgctggacaccaatctaatgacatatattttgacaaaatatgtagcagagaaagtactaatcattcataaattacatcatgacctataaaaacaccatgaacgttgcttaccacatagagcaacaatcgacagaaaaccaggcttgcactgttgtttccagcttcctacagattttcctgcaaaactatgaaactggtgaattttcaacaccaaacatggccaatgatatgtaatcatgaaaaatcggtataaatctaaaaggctaacctcaataaatgaaaatcttcattgatcatgatggataaaaaaacatgatcagagctactactatacataaattaaaaacaatactttttgattaaaaaaacagtactaattggtgcatccaactaacattaataggtaactcagtacaattagcccagcagccatttttcctagccacaacctttaccacaatgcattttctacaattggcctcatttttgttttgaaagcaataatgaggacagaaaacattgggagcacaatttaattttatgtctggaacaaattacgacctggaaaaatcagaaatgcatttgccgataaaaaaaagccagtgaagttgcagccaggtatttgccatgccgctgccatagcctagcactctataagtatatggccaacagaaattgtaaagatagcctagcactctgtaagtatatggccaacagaaattgtaaatatcaattaattcaacaagtatatgacagtcaatacttccattgtagcctaaaaacaaacatataagaaaagaatgcatcgacgattatattctctagcgtgttcagactttcgatatacatattgacaaggcctcacataaatttgaaagtgagtattaaactaagttcataagtgatcttaaaacaagtaaaagaagaccatttggagtgcgtcttctggaacccctgattgccaagctttgtagcatgattcttcaaaggagcaatcaacttcaaatgtctggtccaaaatttcccctcctgatattcataatacatagaacttgtgttcatcaagggataaacctagtgaattactgttgaaacacaggaaacaaattatctccagagcataaggccaatctcacagatagaggtacaaaaccttgattaagtctaacattctacagtgcggactcgatatgcacacatgacagtccatttctattttagagagaaatcaaacttcatgtaaattttcattgatgttgaaaatgaaaaataagcaccagtttacaataatgcacatagaatctatgttggcaagaaataaatcattgcaacggagaagaaaccaagcatcattattatttccatacaaaaaaagagttagagaaacatcagaaattcattgagtaggaccacatcaatatctttatatttgatgaataatatctttacattgttaatgaaagtacatcatatatattgtggtaaaagcagttctcaaatgatttctaaaaaaagaaaaagaaaagaaaagaaaagcatatagcaccctcaaactatcaccaacatgacacacttccgatgttcatggaagtataggcaaattatcatggggtgtgcaatataccagcaccctgaagcaccatacatagcccttgcacactctggaaacaattgatcccaataaatcccaaaaggatatgggtgaagtgattccacactaattaacagagttgtattgtataaaaaacaaacaataatcaatattgatgcagaagtacttaatagcaccaattgtggtatacatggttttgagatctgcagttaaattacagcagttacaccaattgagtttcacaaatgaaaacaacagacctagctacagtagtacagtgtacatctagtgtaaactaaaatgcaatcttaaaataaaatcatgtttaccttcaagccagggcagatggattgaaattcaatctttaagattcataaaaatattgcccctcaaataattcctagggtgacaaatacatactgtatacagaactaaaaaactggagtcattgcctcacatcttttttgagaaggttgaaccaacttaggagcaatttaagtacacaatattcattcaaactcattttcttttctgaatctatgaccaaaataaacatggtttgttgaaatttagtgatccagcaacgggaacaatatttatcatataaacgcaccttaatgaggacaaagcttgtgcctttcttatgagcttctcatatcaacctgccataccacaaaaaaattgccatacaaatgataaggccctgagcttatttattgtccaagacataagaaacaaagagtgatagctgatatgcatatatagtttagtatgaaactaaagaatgtagaacccaaaatttcctagcactggtgaggggataaatgtacaggatacttcaaattttatatcacgcatagaaaaacacaatattgataaagatactgaaaaatggcaagaacaggagaagttttatacgatctttaaatattgataaataatacatggttaattgaaagtactaagaatgaattaactcaacattctgatagtcctgatcagatttgtagccttatttagtaaattttaacttctttgctatgagcaagcattgcctggtggttaaagtcacagattgcacacccgtataaaaataaactgcaaaggagcagcttaaatacctcagttcatttggtaagtttactgtatgctatatacaagtgatctccaatatgggacctttcatgatatccaaacctaaacaattaaaaatcagaagcctcccagttagctcctagaaaccacagttcacaatagtacactgaaacaacacagaaaaagttgctctttttttcctaaagtaattatttagtaaaaacttgtaatgcttcttctttacacagtccacaataattggattgtcacatgctacagctaacaaattcaggggagtgtacatcttacaggacagagggtctacgggagcactattcattacatggtacagtcggcatgtaatataacagctgtaatgataatgaccttatgatagtaatgaaaaacagatgcatacttcaatgaaaaatcatgagcaagcaaaataatgaatagcactaagcatggttcctcaatttgtgctggccacaaatgaatatgtccataaaattcctcaatttctctctctcccacagtgaggatgataagcttcgcagcagtccctgaaagtgaattttatggcagaaaaggaaaaaaatcataatttgccctgaaagcaaatgcaaaaaagagccgatgtgtatattatcatgggtaaacatatatgactattcagctgaacccgttgtgtcctggaactagtcttgctgaaagattagctgaaagatggtagtgttggttatgggacctggcattcttcactaaaattccatttaaggttttataacagagtaagaaaactgatgttagacactatactgaaccgatcactgcatttggcaagctgtacaccgagccaaccaaatgaaattatccatgttggccatttcagttagcctttatgtacttgaacaatagcaacaagagctaatgatctactgtcacatgggatccaaaccgctaggcaattcaaccagtcttatcagaaagcttctctttatcatagattatacatgttagcaatttctgttgcatattctcaacttggacgcatgcatcacatgtcaccaacttgaaatgacgataaacaggtcttaccttcacaacagggcatatgaagaggggaatgggatcagtgcggcgtcgtgcgatctggcgcaaagaggaccaccgtggagaggcgacacgccacgtcaccgacggaggcaaacggatccagaagccagacgcctcgtcgattgcagactgccgctgcgcgcggagaaaggggagtcggcgatggaggccgccgccgcggagtggacgtagctgtgaggtgggtggcggagggaggccggcgcgaagaaggtggcggagagtcggcgaccacgggatggaggtggttgtgaggtgcgcgggggcgggagatcggcgaggcggagggacggcagcgtggctacggctcggccgcggtggaggcagcactggcggcgctttgtcgaaggagatcggcggcggcgtgtgagaaggagagaggattagggcgtggaggagagagagaggcgcggatcgggggatgcgccaagggacggaggaggcgagcgtgaggaaggcgtcacgggcggcggggttgggatcacacgcagaaaagtagccgttggattaagatgttaccgttaggtggctgagaatctgagacgtactccatattgtatactagggctgttttgcaagagaaattcccaaccccactccctcgttttctgcacacacgtttttcaaattgctaaatagtatatcttttataaaaggtttttatatgatagttgcttaaaaaattatattgatcctttttgaaaaaaaatacctaatacttaattaatcatgtgttaatggaccgctctgttttccgtaagaattgttccagttgggaactgggagcagcgaacacactcctaggccgtgtttagttcccttcaaacttccaaaaatgctgtcacatcaaatatttggacacatgcatggagcattaaatgtggatgaaaaaaacaattgcacaatttgcatgtaaattgcgagacgaatcttttgagtctaattacgccgtgatttgacaatgtggtgctatagtaaatatttgctaatgatatattaattagacttaatagattcgtctggcagtttacaggcggaatctgtaatttattttgttattagtctacgtttaatactttaaatgtgtcttcgtatgcttaaaaaaaaaattggccaaagaactaaacacgtccctagtactgcttaaccgttggcacgcttgtactccctccgtcccataaaaaaccaacctaataccggatgtgacacattctagtactatgaatctggacatacatttgtccagatttattatactagaatatgtcaaatcccgttctagattcgttttttcgggacagagggagtccttgagaaactatcatattataatgtttatttattcgcacaattatacaaagtgcatgtgtatataataaaagttattttcacccattacaaagaacaagcatctgttggttactcatccgtatctagaaaagaaaaaaccaatagaaatcatctccttttccgttggatgtttctggcctactccttcccttcttatcctcgtgcgtagagatggcaacagagaattcaccatcgggggtcacatccgtgtccccatccccgtggtgatcgaagcttatgggagaggtcaaagccatagccagtagccaacaagggagagaaacggtggggtggcagcggagatgggtctagaataggtccctagctacaggacacgcaggtcaccgcggaagacggggagtggagcaccatgcctgccccaccatccccgatggtgatgagttttgcaccattagattccccgtgaatggcaggtaccatccatccccattccttaggccttgttcggttaatccccttgagggagggattggaggggatttattccacacggactggggtgtggaattatttcccctcaatcccttccaatcattttcaatcccctccaaaccgaacaatgccttaatgtgtgatttcaccatggggaatcggtgatcgagtccccattgccatctctactcgtgcggcccatccggcatgcctccgtttcaggccgtggcctgcctcatgctgacaggtatggccaggatccacctgtcactcattccccaacatctagttgctctccctcccgagccggccacaatgcccacgtcgctgccaaacccgcgtgccctcgctacctccctcattgccacgtgctccacctcttcccccactcgtcccgcggaaaacagcatggattcgagcccccacaacctccgtgaagtctgaagcttcctcaccgccgtcgcgacggctcggcctataaaaagctccccatttccgctattgtccaccacctacggaacataaaaaaaggctggggtagagatgggacgggcagggaaggaagcagatggatagggttgggggtaggaggggaggggatagattcggttgtttttcggaaaagcccttgtgtttttcatatttacaacactacccctaagagcagaatgttctcttcttcgtgtcgcatttctgtaaaaattaggggtgttttctataaaacggaacatgatgttagtcggtgggaggacgtgcgcgctattccgtccaaacacgaggactttttttttgcataaacaccaccacgcggcatttactacgagaaaggttgtgcgtggcgtacatacaggacgagaccggcacaaccggtggaggaaacagcgaaaaaaaaatcatgtcacccaattgaggagcttctgcacctgcaaactatatgggacaactacagaggagccaaaaaaattccaaaaaaaaggagaaaaacgatagctttaggggtttaacatattaaagatttcatccaaattttgtaactaattcaaaacgattttactatatactaagcgattttggttggatggtagtagaagggtttttctaataggactaaagtaacagagataagcgattttgtttggatgaggaaaaaaaagatgtgttccatttaatcgaaatctcttaatatttttgggacggagagagtgtatgttgataaattttctcttcaaacttaacaaatcaaaaacagtgtaattgtaattttaaacaataataattggtaagaaacttttacctaattttaaaccatcagatttatttcaagatccatgcaaagttgtgaaaaatatcatagtacacaaggtgaggagatttggtctcgcagccttcactttaggaaaatagcatgttatccttggatatacaaattatattatagttacatataatttacagtataattacactatgattattttgtttacatctggtaaattttagggaaaaatttactataaaaattttatgtagctaatcttaattcaaaattcttggtgtaggtatgaaccgttctactatttctttttcttgggggtgtaatcctgtacgttgatttctatcggacggcgtagatagcatccgctggaaactttgccgctattaaccgagccgagctgcccattctcccgcggctgcgcttccggcttaaaccctagctctatggccgccgccgccgccgcctcctccatggcgaagcgcaagcaacgcaaggcggcgacggagcaggaggtagagaaccacgacgaggccactgtcgccgcggaggcggggcccgagaatgacgggcacacggcgcacgccgccgaagaggctgcggccgctgaggagggtgtcgagcgcgaaggaggaggcgagggcggcgcggagggggaggagggcccggacgctgcagccaggggaggtgaggagggcaaggaagaggaggagagggaggtgagctttgacgagcttggcttggacgagcaactgaagagggctttgaggaagaagggcttggacaaggccaccccgatccagagagaggccatcccgctcatcctggtgcgtgatttctggcatccatgctttgttttttttttgctttgttttgttgaattactggaaatattcgtcgttaatatccaattattagtgtttcaatgattgattactgcatttgtgatttaagccctctctccgttgtgagaagattaagcatggataatgtgatgccattgtgcaaattgttgtgccgtttgcatatttgggttgtctgctttgtctggtgaaccttttcgattagttttgctatatttctactgtttgtcaggggcagacatgctaagtttaagttatttagaaaaaaaactttcaaatctaattatagtataattgtaatataattctgatatagttacatttgcatgtttttttcccaaaaaacttgcgacgtttttttagcaattccagcagacattcaggttttcaataatttgtgcaactgacgaatagtgtaatactgtgatttcaggaagggaaggatgtggtcgctaaggccaagactggctccggaaagacctttgcttaccttctccctatgctgcatgagctattgaagttgtctgcagaagggcgtatccgaaaatctgctccaaatgttttcatccttgtgccaactcgcgagttatgccagcaggtatcactcatctacttgttatgagatgagatgatttttgtgggcagtttaatatttattattagctatgacgtatgagtagttcaatgatctatgtcaagttgaggattaattctgaattcataggctacataagaatggacatatgagtatatcttttaatttaatggcagaccctcatactagtcctttggtttattttttaatgtactgcattatatggtcataatccataacatctatgtgattgtttatttgaattgcttgtggtaggttcataatgaggcatcatctctccttgaattctgtacatccaaattgaaggttgtgcaagtgaatgcgagcatgtcagacaaagatattgtgagaagtctatcttattctgttgttattttctgtaaataatattcatgtttttcgtatgaatgctggcaaactaacttgtttcttactgttgtttgcagaaagttgcattgtctggcccccctaatatacttgttacaactcctgcttgtgttgcatcatgcatatcaaagggcattatccgtggatcatctatcaaagaatcactatcaatgatgattctagacgaggtgcagtttatttgccttttcatgatttattttagtttgatacatatcatcaatgggtaatttgataagattttatttccacaagggatgataattttctttatacataaaaaatatggctgtttaaactgtgtatgtttctacattttggctgtcgtgcccttcctcaagttaaacaaaatacttttgtgattattttaagtgagtatggagtttattttgtatgatcacataatgctgacattgacatgtgccgctgcaacagtgtgaaatttgctatggtgttgaaaatttcaagaacattttgacaactaatatgctgtcttactctcttagactgttgtatattcaaatttgacaccttttctgtgtaatattatactaagtttcttttgaaggaggtactaatccattaatggttagttctcaggctgacctcctcctatcctatcgttgtgaagatgacataaaagctctcgttccacatatcccaagaagctgccagtccatcctgatgtctgcaacgtcaaggtgaaatttggttccatcttccttccttttcttcaattgttcaattgttttgattttgcagttacacgatttggttgttctgagcatcaacatttcaatcaaatggatggaacctgtaatttaaataaccaaaaattgggatttttctgttttgaatttttaccatactattccagcatgtctgtcattgcatctgttgatgagattttgctagcagtcaacctggaggttgaatccccaatattgctgcccttgagttggtagaacactgttgtagtttgattgtccctccttgcccttgcttccatttagatttcatatatttggtctgatagtaacgttgacttctttttacagcgctgatattgagaaactgactaagctacttctgcacaacccttttattctgacccttacggaggttggtcatgcgaaggatgatttgatcccaaaaaatgtgcagcagttttgggcaagtactttttcctgcatttcagacaatcagcctttcagtcgtatcactgaaacatattaagatccctcttggatatccatagattcccaacaaacatttaaacaacctatggtttcatgttcctttctagtattttttctggtacaattctttagtggtgattatttttgccctgctgatttccccctaagctttcctgtagtagcttgtatatcatgtactcctattcaattttgtccacagatatcatgtgatgctaaggataagatgctttatatccttgtactcctgaagttggagcttattcagaagaaagttctcatatttgtaaactcaattgactcggcattcaaattaaggctgtttctggagaaggtaaaatggaaccactaccttacagtagtcaataattaaacacgtttgatgatttggtttcttaatttgttgtctgtaatttttttccattgttttatttcagtatgttaagtgcagtccaaaccttaattttaggccattgtctgattgctgtctgaacataaatcaaagtgaaaatgttgtgctagtctagaatacttggtacaagagtgtcgagtttttgaagactccatggtaaacagatagttatggggcagcatgtcaggatatgtttctgttgagtctgtagaatgaatctaagtgctagattattggacacttgaaaactttcacaaaatactgaatttggaacgttactttgtttaatcttaattgcatgtactggagtaagagtgtataaagtaccgtggactgaagttaaacaggccagtgccttgtctttgattgtcatattgggcatgttatggctcctcgctatgatatttgttacattatttctttgtgttgcttttttctggcagaattctttgtccaacaattttcttccttggttcttgcatcattttttaaaaataaatatgcttattgatgaataatttatccttatggtgtctatgttgtacttttacagtttgggataagatcttcagtgctaaatgctgaattaccacaaaattcacgcctccatatcattcaggtagcatatccacagtgcacgctcttattgctgctattgtgctttattattacataattgatgataattcccactgaatatatctttctctttcaaatgtttgttgaacaagtaaatctcttacctatgtttccatagtttttcatcttattttggattatcataatctttagggaaactgaatctggttcagttatatttagtttttaagcttaccaacatgtccacatcaaagaatttccagaacaaaaagtgagtgggctccaggaaatgtttaggctctagtgttctaaagaagtctgaaagaatatcttcttgcgttgtcctaccgatttaaactattatctttcttttaggcattcaatgctaggctatttgattatctgatagcaacggatgacaataagtctaaagaggagaggcaagccaataagggaaacaaaaaggattctagggtgtcacgcaagcagttgcagcaaactttagatgctgaattcggtgttgtcagaggaattgacttcaaaaatgtattcacggtaagttaatatattgatatatgcaagcatgccaccagatctcattgtggccagagggtaacttgagcatacaactgtttgacatactttgctatcattttgttttaaaatagtattttatcttgagcctgatggtaaattatttgttatttttatagttcccattcgaccttttgtttctgaaacaggtattcaggttgcaggattgatattcttttatatttggccttttctttaggtagttaattatgacatgcctccagatcctgctgggtatgttcacagagtaggaaggacagggagagcaaataaaactggtgcatccatatcgcttgtaagttcaccattttatgtggctcaataaaaaaaaatcatcgcagagatagctaacttgttttatagatcctatctggtatttatttattcctttggtttggtgttggaccttttcaggtttcaccaaaggagaatggcatttttgaagatattgaaaatatgttgaaagatgttgaaaatagagacaccagttgcatttcacctttcccattacttacaaaaaatgccgttgagtctttacgctatagagctcaagtatggagcatattacaatggataatctattcttttgtattaaaatatgttttcaattggtatttttgcctctattcaatatggtgttagaattgagcattagcattaaaagagaagttaggcatggagaatctctttgtttagtagtactagtatgagtggtaaactggtattccagccagaactccctattttcagagcggtttcttgctagtagatatattgttagttgtcaaaacataaacttttgaaaccaaagactggtccactttctgaaactctggctaggcattggtcgagatatattctatagtcaccactgactagtaaaaggacgaaagctcatctggtactatgtcacctctatccaactgtaggcagcaatggttttattttccatatatggctactgttatctatttatcgccaattccatgcgtcacaatgccccattttatgctttctcggttatttttaccaaattctcctctctttttggcctaatcctgttagtaaacatttaggtgttgtgcacgaatctctcttagcatcgtcgtgagactcttgttgtacagggtcactcccatctaacatgaaatatagccaaagatatttctacttttttttagtcttgggccctcatataccttgtgagggtgtcatctgttttctgtaatacaatgcatgatgtgccttttagcttaagagggttttcatgacctaagctgttgggctaatagtaatctggccatgttttaaccatattattgctcctggagtgcaacattatgttggctactgttcattttgcaactcatatgtttattgagtttatttgttcatgaatcttgataaatcgtactacttggtagctattttttgttctttcttttgttagaacatgcaagagcctcccatttcatcaagacatctggtagctaatgccaattgacacatttacaggatgttgccaggagtgtgacaacccgtgatataaaagaagcacgtcgccaagacataaagaatgaaatcctcaactctgagaagtaagaaagtggttgatcattaagcaaatgcacatgtcatggggataactgaatctcatgcaaaaaaaaaagggaacatgaatatagccttgcttgtttaatgtttagagcttcttagcaactttcttctacactatgggtgccatgtcatcttttccaaaaaaaaatcaaaacaaacatttctttttttacatagaaggaaacacacaagacatcaattgtttatttacttttcatacatttactagtcattttctgcctcatgcttttcttctaatagtgaagctatctcttgtcatcttaggttgaaggctcattttgatgagaatccgagagaccttggttagattcattttgttgagaacttttctactattgaacttgcctaaattaatgtgtgtactgaatctatttcttctttccagatttgctcaaacatgataagttattgagcaacaaggaaatccctgcacacctacgtgatgtccctgagtaccttattgatcccacaacaaaagaagcaagcaatgtagtcaaactttcaagggctgctatggatatcgataagccacggaggaggaaaagaatgggattcaagggaggatctggcagaagtagtgatccccttaagactttctctgctgaggtacatccattcattcaataactaagcaaaaattaggttgaaaagatattgcaagtttgcagcttacaaggtcatagaataatcatacttttatttaactgttacgaaccttttagctctactttatcggtggtgagatattgatgccatggatactagattctgtcacaatttgagagtgcagttaattacgaaaagtcacggttgaactgatttaagatattgtttgtttagctatcttttttcttaatatagttgcaaatgtgtttaaaaatatagttgcaaatggatgcatttttccagctacatatgaggtgaaatgtggtatgacaactctggaaaattaatgagcaaaatttcaaaaacacattgcatttggccaaagtaccacaaaaccttaatttcaagccacagctttagagacttcacataactattttaagcattgtcgtcacatccaaggggcaggtccaataaatcattccacaagcctgtttctttttgttgtgctattttgaaatttcatcatgactagcaagagatagggtgaaacgctttgaatacagtatgaggcggaaatgtgtataatcactcttccattcagtcactctaccacctagtcatgctggtgtttcgatttgtctgtcatggtaattatcctctatgtaaacaaacaaaaatgggataatcttgtgatgtcaggtgtgtgggtctgggcttcaggtcctatggaaacatggcagtgcttaaatgcagtggtttagtgaaatatgcaaatggaagtgctgttcgttgttccttgaaagcgtactatttgtggtaataaaatatttacaaaagtagcatgaattttttagatttactttggatatatttacataaattccatctcttttccatgacaattttaaaaagacgcacaacatagcagcctcaaattgaaccactatactttggatctatgaagcatcaaatatttctaagttcaaatgagcttttgttgattagagatatttgcaatcaatctattatatgtgattactgatcagttattccgtctggctgcaacatgatgcttccacgctattgactcttgttattctgatctcctgtttgcttctaggggaaatcacggaggcgagggaggaaggaaagagacggagaacaggatagaagaaagaggaagaaggtggaaagctaatcttttgtgaagcgttcactgccaagtgcgcacagttttgtaggtttctggtatctcgtcctgtaactttgtagcatctccagatatagggggataacaatgtcaagctttactgaatgctgcgtgtgctatgctatgcacaccattatatagacagacgagtagagagtttgtttagtttcagttcttctagaggacgtgcatattgccattcctctatttattcgaggaatatcagcagaaaactatgtttcaagatttttgttgtataaaaaattgcataaaaaggtgatgttttcaggttaagacggctcaagtaaactctagagagaacactgaagctctagaagaagaaaaccgctgtatagaactctattcagggctataattatattcaaattggaaaagaaaaacaaaataacgaccataggtgagttcatatacagttgactgcagattaatgaaggtcagttgccacttggtaacatactggcatgatcattcgaaggcgattaggagactagacgaggaaagccgttgacaaagcatgattaatatcttaacatcaacttttttgaatggataacatcaacttcttgctcttatttgagatagtactattctattccatttccgaaatgaaatcaagatcctatattgacgtcaacctgtgaccatcaattcagtgaaagtcaacccttgtttacggtcgatcaaatgtaaggtaatgtcgttctctagttcctacgaggatgaacctattcagacagattcaaaccatattcaggccgattcactcataaccgcagattcccatgatgaacatgatcaaacatattcaaacttatattcaggctaattcacactatcttcagtcttcacacataaccgcagattcccattcattggtagctgcaagttctcattccaaatagtgcgcaaatcatgaactttcgacagattcaattccttgaaaatttgtaccaaaagtccatcctactcgtttgcatgcttaagcccatcaatacttggtcccaatcttggagctcatgaacaatacaaggtttcccaatttccacaatctaaaatacagtagcgatttacagtggaatcagctattttgagctccaactgtacaaaatcttcagatgccacatgaaaaccatacactatggggagccaagatatggaaacaggcaacggcaacgaatggttagggggcctccatctatacaaaaattgatactgcgagcgctttatgattcaccaagcaaccgtgcaagctataccagctgctcatttttcaatcttcatggaacctgaagtgtgcaaaaaggaggaacatttccatgagtttgatatatcactagtactaaacataatttttgacaaattttggatcatatataccagaattgttggtgctgccctctgccattgcgccaccagggttgtagttcaagtgaggaatgttctgaagtccttcccacatggcaggtatctagattcaaggttcacatcaacccattgctatgattttgtttattcatgtgtgattttgttatcttaatatgtgacctgaagttacctggttaactgtggagatgtcctgaattgttgtcccctgcaaaacatctgcaggattggaaacattacacagcatttctggctgcatgattccttggttaaaatgagcaacgagggcacttgatcctgggtcgactccgtagaaagcaagatgtctatcttgtgaaagcatcatctgaaaataataatttctgtgaacaaaatttatctataacaaattcttaaaaatcagaatgatctgcagttgtcattacttgtttcgatagaatctgctcaatatcaaagctaagctcagggttgacagttgcgagtttcatcgacaaaaactgcaagttcagattgtgttagattacagagtgatattccaactgtccaagaaataactgaaccaccaccctaatagtacctcaacttgacgttgtagtgactgtacataattgattatctcatcaagcatgactgccttaccagtgatctgtgaggggacaacagtaagttgcacagcacaagatagtctcgaagattttcttgcagataaaagaagaaatttaccttactgcagcctgggacaagatcttgaagcagcttcatcctctcgcttatcttttttctcctcagctgaaaagagttccatcaactcaagaataagtaaaggaagatcacaaagcaaaactgaaccaggagcaagagtcaagagtactactcagaagcttactctttctgcaaggctgtggctattagtggcttggcctcgctttgcccggacatgaacataatcttctttagtaccatcaccatcagaagaatcttccttgctttgcattttggagcaactcttttggttgtcctcctccattgatatcctctcttgctgagatgaaacctctgtctgttgatcaccaacattctaaaccaacaatataatgcatttagctattgacataagagaagaaaccatccacatataattccacacacagattatataacaaagcccagaaagaaagcatacttgtatcctgctacttgctgatgggttcaacaaggcaatgtgatcatctattcctttccttctctttgcaccactgctatgatcatcactcagttggatattttgacagaatgtgcctgtgagagattatcgtcactattaggatttatctacaaaatcattaccttcaaaaacatctcaacaactgcacaatactaagttaagagctactaatacctcatcaactgcataatactaagctaagaactactaaccgttgggtgatctatagagtccctctctatcctctaacaccatggggtaagcttgaaatccaaatgcgccactgttataccccatcttctgatgcagtgcaacagaatcccagttcacctccaagaattctttgccactatttggaccaggacactgatcagattgctggcctgaatacatctccaactgttcaggaaacacctatctttccctgttccctgttcagcagtgcaaaatagagaagacatatgagaaattcagaactgcaacaagattgccccaacagaacatagaaagctaaagaacaccttgaaactaaacatagaaaactttgatcaagcctggaaaacccttccattcaaatgaacagctcaactagtaatcctcacacagtggtgaaatttaaaagcaaaccagtcccttcaagaaccactacatatcccctatctaaagataaaaagaaggccaaaagaaggatcaccatccaggaaaagttctgctgtaacagctggagatatgcttcagagccttaaggaacaaaccaaatctgccaccaaagaagaacacacagtccagaaagtgaaactttaaaccccagagcacacaaagggatgagagacacaggagaaatgaactccatcattaagcaaacagcacccactaacttattcttttggagcaaagtgatgagactggaggagagcctctgcgcttcctaaaagactcaaaatcaccaaagctaattggaaacagcaaaagcctaccaaatcttcaagaaataggcacgtaccacattaccaccgttgtaacttgaagaaaaagagtgtttgtttcactggatgtagagcttccagacaagttaagaaccaaccaagaagtgcgtctccttttggatatggctaggcagctagtcccaagaagctcaaaagagcacctaaaactgccccaaaattgaactaaaagaacctatttggatgatgaaatcatcaagatatcacactcaggggcacacagaaagatgaacgccccctcatggcctcacagaggatttgatcaccctataaaatctcaccattacctaggaaaatcacaaatgtgaagctaaagaaagaacactagtactgcatcagcaaagcttataaaaggaagcagagtgggcaagctactagttcagactgaacttggcgagggcgtgaggccatttgaatgcacagatagctggactaggatctgtgagacattactagggcgttgaagctttccgagagcagaaggaaggaaagcaacaacctttgactactccaccgtggtataaagatcttgaaaggaacagaagcaaaaatgttcaagacaataactgttcgaaaattacctgaccgcgagatcacatgaacccctgcaagagcccaccaccaatttcacctgcaaatggagacatgtgtatactgaaacaattcaagaacgcaaaaaaggaaaaaaaaaaaacagcagcttgatgatctcctccctttcaaaattctctctttttttaatctttctccgcagcatcttacctagtgctagtgcgcatttggacacagctcagttgtcttcttggccgcaatttgaccgcaggggagaatgaatggtgcggtgaaagattatatggacaagaagagggagcaaaagggcaagaagagagctgcaggctaatgtggtgtttgttacctgccactgaggtgaaatgattccttcttgccctctggcaaagggttgttaaccactgcaactgcccccctcctctctctctctctctctctctctctctctctcatctctctaatatttccaaaaccttagcgtaagctaacacctaatcaaaagttacaacagactagtgtaccagtagtagtagtttactgcttgctctactttagtacaaaaagaatagctgtagcaaggagaaaaataaagtagggagtgaaaaaaaaatagtagcatacagttctcacctgcccaacctttgcataccctcaatgtccagtgggccccagcttgggctgaagtagaatgtagataagtattgatgaagaggtgccctactgtgattttctttcacagtgttgtttataatattggctctgtagcagtagaaacactagtgcacaactgcaaagtttgaaataagagggaaattttgaccaagtagcaatagtagtaggttaggtgatcacataaactatatcagacagcaatgcttctactatgttccagtcaagaagattttacacaatgtttagtataccattttgcggccagatacaaatagctcctcaacagctcaaccatttttgcgctcaacttctaatgtcccagcaattgtttccatatgcactatgtttcttattctagactagatataatcttcagtccaattttaccctttattagtaacatgctcatgcattacaatggattcatatgaagttgcagtgcgcaggcctataagttgggatgggatctagcatattttatttttaaccaatagcttagtttttatttgtttcctctttgactgtcgtttgtttttcttttctcgccgacaagatatggttgtgtgtgcaatatgagcgggagggaggttgcaattgtagagatatttgttgttgtagcagcattatattaacccctttgcagtagcataaggtcttttggagagcttgagattccaagtaatagccgataaaaaaagttgattttcctagctttttattaggcttgtagtggattctgtggttactaattcttaaaacttggtgaaaacctggattgtttggggaagttagagaaattgtagctgccacaaactccctaaatagggcctaagatactaagaagtggctgacgagaatgtgaaaagcataaagttttccaacttctaaattctattttattttctaggttctattactacatattcttatattctactatgtgagaattaatgtgagaatttaggttgtttacaggagctgttagaagaagctgccgatgctgtaaactttctagataggaccatgtaatagtcttttagattaaactacggtggctttgtttataaggtgggggagggaaggtgcttctcttccacaccaagctgcaagctttgaatggaggggagatctctttctaactgaaaaattttagttcccacgcaaaaattttatatcatgtcacatcaaacgtttaaacacctacatgaagtattaaatactccctccgtcccaaaaaaaggcaaaccctggatttccgtgtccaactttgactgtccgtcttatatgaaatttttttataattcgtatttttatttttgttagatgataaaacatgattaatattttatgcgtgacttatctttttaatttttttcataattttttttaaataagacggacggtcaaacattgggcacggaaaccagggtttatcttttttaggacggagggagtatagactaaaaaaataactaattacaaagattgcgactaatttacgagacggatcttttaagcctaattgctcaatgatttgacaatgtggtgctatagtaaatatttactaatgacggattaattaggcttaataaattcatctcgcagtttacggacggatcctgtaattagtttttttattagtgtccgaacaccctatacgacaccctatataatacccgatgtgacacgctaaaactttacacccctaaatctatacagcccttgacatactgctatctatttctacacttggtcttttctctccttgccagcctaccttcagcttctctctctctctagttctacgccaggggtgagagggataggaaggaaaaacataaggaatcttgtaatcttttcaccttcttgtcctctacagtctgaaatgcaaggactggctggatatgggggatatggtcaaagaaaacactgtaaggcatcctgctgcttgcttgcttgctgaggtgtctccatctccacaagatctttcttttccctgctttctttatggatacaactagagcccccgaatttgacaaggagattgatgaatgacttcagcagcaacaaatcagcacagctctacaggaaaatgtttaatcagctaataaatcagcacagctctacagaaaaatgtttaatcagctagggcagtagcagcagatgggagagactcactgtcatgagttggggatgacttgggagtacagtatattaccctcacctagacacctaatttgcatcccaataagagaatctggggcttgtattagagcaggtacaatagcaggctattaaccagctgtaaacatattttaatacgataaacgatgagagagaaaagcagcgggctacatatctgtagccagctgcagcacgaacttcaagacgcaatgtgtatataacatgtgggaccatatattaatagtatagtaaacaattattgtataaattggctattgcattggctatagatgatttggagctaatagtgagctatactattaaacttgctcttatgtgtcggtgtgattggctgtttacatgcttgcagtaatctaagcaaagtatatacttaactacggttctgtacagattgactgtttttaatactggaagcattagctgttcctgatcgcctgttccattgatgttcttgcaaagcgatgagagtgaaagaatcatggttagaactactacaattgatttaataatggtttattatgggtgtattttgacgtgacactgagaatcgatcactccgtgccaaatccacagcacaacttttctgaagatttgagagctggaatggaacgactagtcattgtctagttttcacggttaccaagtgagctactagtgcactaggccttgtgacatcacgcttgtactgggtagagctcacaagttttgttgtttaatcgtttctcctgtacccaaggcgtaccgtccctctaacaaaatctctttctttttagagcagaatgcacacggaacagaggagtttagattagtcgctcgacttgattagataaatggaacttgtcacaatagagagtgcgaataagatggcaattggttttgttcggattgagataaggtgcaattggtactgcacctgcacaatgaagactatggcactatttagtttgcaccaaacttctttctaactcctaactttccatcgcatcacatcactttcaaaactttcctacacacataaactctcaactttttttcaaactaccaacttttcccaaatttctttccaatttcagaaagtaatttgagccgtccatattttaatctaacggttcacgttcgctgctatgggatgtacaaaacaatacttttcgctagagttaaatggtattatatcagtgtatagtgtattgatctggctgctttctcatcacggtggtgctaggacaactgcttaattaagttgtagttagactagtaactataccggatcctgactcttgagtaaaaaagcatccaatttttcaattgaaggcccagatcaaatgctacaatagttctatagtgaacaccatggatgaacaattacccatctaatttgactcttggatttgcatctaaaaccctaaggccttgttcggttaatctcttagaggggatttattccacatctattgtggtgtgaaattattcctacttaatcccctccaattctcttcaatcccctctaaaccaaacgaggcctaatgtgatctctcaataagttagtacaatcacactagaaactgcatggaaattagatccgcatcttaatactgctctattagtgcacttctgtccaatcatgcttaatgctaagtctagtgacgctgacctcccatgatttagtaaattctagtcaccttaggccgaaacgccagcgctaatatatattgcaccgatcagctagattgagatcaaatacggttccgtaaggactgcacgtgattttgatcggttcagatttaacgctatcagtatccaagctatggtaaaaagtgcagaattttttcggctgaataatatcttggatgatctaactgttggattttcatcggatggtcctagactgcaggtgaaccgaatcccctaaagctttataccttagcgtcgttgtggttaattagcgccgagttaactgtctacttctgcaattagtagttcttagcacaattcattctcggttttgtaagatcatcatttcgtcaaaatttctctacaacttacgaagtattaccgtaagagataatccggctataatcataaaagaatgggccggccaggtagctgtttgagctgaattagcatccaactcgaaggctccaagctcctcttggattacaaatcgatgaactgaatcagccagccactgaaaccacactctcctaattaagcacgcccagttaattacagggccgcatgtatacggtgaattgtatgatacggcaaggcacgcgtacagggcgcgtaatgatcatatcgtcgcctcccccgatcgatcgatcgcccggtgtgcgctcgctaatcaagtgtgcgcgcgatcgccgcgtcgagagctcgcgtgcatcaatgcctcccatgatggagacctcaccatgcaatggacgagaggatggagaccggccggccattttaattttgcatcagatcgattagtttagttaattaattcccgtggacaatcataatcatccggtcggctttattagcgcgcgaacaacagcacaaattaaagccaaggtttatgttggcgcaaaagttgattaatttattctgatctctgaattctgaatttggattttggaattcagaatgatttggtgttgggcacgaaaatgtacgattacttaggatcctggagagtggagagaccgattcctacggaggaaattaattatttaatgaacaacaaaccaggttaacagtagtaccgattaggcagtacaacaaacaccaaaaattaaccaagaccaaagtgcctcccctgctttaatactactactatatgggttacgtaaagttaacgaagagatcaatgtggtgtgcaggcaacagctagatctgctcgacattattaccactcctaagctacagtagtaagtactttcagaaagaggagtttgcatgcatgcccggacagatttctttggcagagaggatcacaaataaaagcacttcttgcaagttgcaaagtgtacattctgtactagttcattgtacaagcaggcagcagcttctgaaactgtgaaatccaacatctcaggttgctcacacaaggctcctctttttctttgagaggacagaggacactgccggatggtagcaatggtagcggcccaatgaatgttttgggccaaagagaaatatcctgagcaggccattaaatcgagctcgtactcagcctcaaagcccaatcagcccaaaattgtgcagcaagcccatgaaatcgagttcgttctcagcctgaaagcccaattagttcagtctccaggctcaatattgttcagaactagacccaatattgttcagtctccaggctcgccttgcacaagacttaaaaatgctttgggcctgcttgaaacaaagtattcacccagatatagaacaagtagttacacaaagtattttcagaacgtacgtacactcatctctgtaaacatgtataagtctaccctacttttataagcacctcctaaagatacaggtgccttattatcgacaggtacatcgtctataattgaaagaaataattaaccacaaacgcaaacactcatgtaaaatctaagactaaaactcgctcataaaatgtaattttgaatgcgtggtgtaaataatcagcgataataattcagtaaagtagccgaaaagaacaatataagatcttcaaatgcaaaattcgtagaggttagtaagtactagtaatacgtatgatttatgttgttatatacacatacgcgtcgaagcataaacagagtaatcgccctctagctacttgttcgcccactaaagcctactcgcgccgccatggatggagagatcgatcgaggcctcgaggggcgccttagatgccgccgcggaagaatggcgcgccgaggaagtcgctggagtaggtgccgccgccgttggggaagagcgtgaggaggcagacgacggcgagcacgagcccccacgcgtagcgctcgctccccagcggcgtgatctcgtcctgcgccgggatctcctcgccgccgcggacgaacgtcgcgaacagcccccacgccaggcacagcacgctcccgccgatgatggcgcccgcgccgagcgccaccgacgtcgcgaacgacagcaccgccgccgcgccgcgcccgaacagcgcctgcgcgatccgcccgccctccagcctcccgcacggcagcaggttcagcgacgtcaccacgatcccgagcagccccgcgaacgccagcgggtccaccggcacgccgacgccctccaccgcgttcggcagcacgttcccgagctcgtcggcgtacggcccgatcaccgcctgcacgaacgacagcagcgggttgttgtagaagaactccggccggacgaacagcgcgttcttgccgccgttcaggctgccgtcggagacgaacgcggagacggcgagcgccaccgaggtgaggtacgcgctcgccgcgcgcgccaccgggatgtcgaacagggccttcttgttcggcagcagcgactcgtagttgttcatcacgccgaggcaccccgtccagttggacggcaccaggaaagacgggctcagcttcacgccgtacctcgccgccgtcagcctcgtcgcgatctgccatggatcatcggccggattggtccaagaacacgccgagatcagcagcataagtgagcagagctcagcggcagatctttacctcggatacgccgaggatggagaggaagccggcgaagagagggagcacgtcggagacgtagtcgtcgaacgtcgcgccgggcttgaggaagaagccgctcatgatggcgatcgtcccgaacgtcgtgacggccagcgccacggcgctcaggtatccccacggcgtgctcagcttggtgatctccagctgcaggtcgatctctgccttcggctggaccatgcagacctgatcaatccaatcacaagaacacgccaagataaattgctttcaagtttcgacgatccataaatcaaagccacaacaacatcaatcacgagtgatcaaatgcaatcgataacattatgccacaagattataagttggtacctgttttgtgatgtcgtcgttcttctcctccatgaaccagagggtgacgtctgtgccggccgcctcggcgatcttcttctccagcttcggcctcacctcctccacgggcttcctcaggttgccgatgaagatgccgccgtcgccgaacctccggacgtccacggcgaagaacgtgtcgtagccgaagcagctcttgagctgcacacaccaatcgaccaaacgatcaaatcatatatttttttccctcatctactcatcttagcccaattgggaagaccgaagacgtacgtcaagacgccattgatataccttgttgaggtcaagcgccttgaaggtgttctcggcgagctcgagcctctccttctcgcgggcgagctggcccctagcgaggccgcggaggaggccggcgagcgggttggcgtcgggctcgcggtcgagctcgcggagcttccggtcggcgcgcttcttctccagcttgatggcggcctcgatggacgggttccccatgaacctcttgaactcctcgtccgacctccagtccacctcctgctgctcctcctcctccaactcctccttgctcttcttcacgccgccgccgtcggcgtctgcgacaccgttctctccttccacggcgtggtgcgacgccgtggcggcgtcgtcctgtccgccgccggcgtggtgcgactccgccgccggcgccgccttctcctcctgctgctgttgcaaggagcacctgacgaggaggcggctactgcttcgcctgagaggcctaggcttgcagtactggttcttggagaaaagactgaagcttcttcttgagcttgtactagttgcagtgttactgctgctgctactgctgaacaagagagaggtgacgagggaggacgacgccattggcgacgatcgagctagctagcttggtgtgtgtatgcttgcaagtgattgttctagctgttctttcttgcagatctgagaatggaagctcgtaggggagcttaaaaaggttcggaaatggagaggaggaggagggagagttctagaacgtcgagaaggcgcggggaggagtcgtgaagactgcgacggtgaggaggctgagctgctgatcgagtagcggcggaaggcgacgaaggagttgaggcctcggcttatccaactggcaagctgaactgcacggcacctgcacacttggcggcagcagctcgcttgctcgtgtagtagtcgtgtggcccctacattgacggactacttgccacgtttccattgtgggcttaaaaagagttgttctgaagttggctcccgcagtcctgctcgtcctgggaaattagaaaatatgtggtgaaaaatctaaaaactaccgttaaattaaaaaataaacgtataggattcattcacgtgatcacgagtttacttgtaacaaaattttactcgtgatgatgtgaacgaatcttgaacatttatttttcaatccaatgataatttttaagttttcaccacatatttttgctgctcgtcctagctccagcacaaaatatggagtataccaatttgagttcagtactatctccatttttagtactactacttgtcagtgttgagctcaatatgatactaaggccctgtttagatcccactccaaaattttacaccttatcacatcgaacgtttgaacacctgtatgaaatattaaatataggctaaaaaataactaattacacagattacgattaatttgcaagacgaatcttttgagcctaattactccatgattgacaatgtggtgctacaataaacaattgctaatgacggattaattaggcttaataaattcgtctcgcggtttactgatggattctgtaattagtttttttattagtgcccgaacaccccacgcaacaccatatataatattcgatgtgacacgccaaaactttacacccatgaatctaaacatcccctaagggctatattagaggtgcaggaaagtttacaaaatttcatcagaattagttcaattcccacgaaaatcccttgaaatttcacaattccatttctaaatacttatcagtattaaccgatactatttcaaacttaactataataacttttcattggattataatgaacaaaagttgtgtagttcttattttgagagggtaaaattccatcatactttggtaatatgatatattttaaatatttgtgaatttgttaatgaaaagagtggtaatggattgaactaaatagtgtccattgaatagttaactagtgagtagtgaccagtgaaacggggataaaaagaagtaccaacaatctggtacagtgtagaaaaagcgtgtgatgggtgaaatactggcaatcaaattcagtggctctaaggtgattttcctctccttttttttaaaaaaaatattgtaacgtggcaagaggcagagtttattacgagtagtaatcaaaatgattgggccatgctacacaagaaagagatgtcagtgatggatttagtagtacatcttcaagattaacatatgtaacagccttgtgccatcttgttacagaaagcgattatggatgtgcttccaactatgatctagccttctcatcttccctccaaaattgtacttacacgatagaaattagaacctagtgttggatggcaatcatcacctttacacaatatcagatatcaccaccttcgcaccagtgatgtgagcaactgtcaaaacaatagaagcagttagcgcttcttgcaagcagtttcttgagtaaacaattatcagtaagaatgcaaggaaaaaatggctttcgacagaaaccaagaaaccttatcacatgatcactttcagatttttttttaaaaaaaatgcaacagttcagctctcaccattttattaacttacgaattctggctacctcaatgagctcctccagtcatgcatgatgagtttggagccatgatgttacaacttacaaattgattacagtgagatatattcagaaagcaaactcccaagatatattcaggcaagtagccaacttatgaccaaagcaaactcccaatatatataaagaaacataagatccatgctcattgaaaaatttcaaataattgtttgatttcatcatttttgcagttatactgatgtgtgaggattgatagtattgttcggtggctgttagatgacactctatagggttagtcaataaaatgtagagtttctaatcatcgtgagtagcatggtatcatcaggtaataaggcgcaaaagtttaaatggttagatgtggttgtatgcattctttactagttgctccaaatggaaccatttacgtgacaacaaaagtataggcctagaacatcactcttcagcaaactagttgcaggtgtaaaaaaatatgccaataatttgaagaactttcttaacctcaaaaagctcaaaaggacttccccgcctgtagacatcatcttgctggctctgtccagtggaaaatagtagagaaaccagggcacgccatccagtcaacaaaacccaagtacttcccatggctaccaggataaaaggagttggtggaatatgaccagatgacagtgctcgaatggcgaggcccaactaaagaggagagagagaaaacagaataaacataagctatgaaacaccagaaaaaacattaacattaacattaactacatactcatagtcaataaactttagcaaacaatcacacgataaggcagatggacagctgttgtagagttcagaatagaaatagatccagatgctgaaaatactgtccaagatataatagaggaatatatcatcatttatgaagatataatagaggaatatatcatcatttatgaagatattatatactacgttacattcaagagagtatatcttggtagaacaccccaccctcgcacaagcacacatgtacacacagaagacattgtctgtattagtgtacgtaaaagtaggtgtcatgtagtttgcacgacaatctacgagcctatgatgtagcacatggaggatagaacggaaatggtttgggtactggtacaaggtggcatcagtcaattgtcaagcaaacagcatacagcttcattgtaacaaaagaatgggttccattagtccaagttataagtgaagacactcaaagataaaagttcgcaattcccacattatacagtttacttatgtgttgacccatgatagcaaaataacatcacaaattatatgtagatacaaacacattccaattagcagtcacatttgaatttcgaaacagaactgataattaccggtatcccaacagcccaggatttggccgcaacaactacagcgttccccacgccattgcgacctttcgcatcatccccgaatccgccaaggagataggcactgagcaaccatcctgcacaacaccccattctgtaagcaatccttcctccaaaaaatgataagcagggggagaaggctgtcacattttcctgaccagcaatgaagggatcggccgtcttgaacgtctccgcgtcaagaacaggcagcccatggctgaaccttcctatcgcggagaagacgaggaggcagagcacatcgccgctggccagaagccccagcttcctgcggaacgcaagtgcaccgctcagcgaaaccgaatcaaatcagcgagcacgaggaatggatcgaggtgcatcgggggagttattacgtacgcgtaggagacgagcttggactcggcggcggcgtcgccgggcttatcgaactggatgacgccctcgagggggacgccctcgtccgtaacgccgacgaggacggggtcctcggtggcggtggtggtggcgggggatccggaggggccctcccccgcggcggcgagggccccccgccgcgcgtcggcgccggagagcgcgaggcggcggcggcggcggtgcggaagaaggcgcgtggtggcgaagagcgggtacgggttggggacgctgctgctgccgctaccgccgtggcggccgggctgcttggagggcagccgccgcgcggagacggaaccattggcggcctggctcaccagcaacatctctccggtgggcggtggcggtgtcgccggaggcggcggcgggtggagatttttttgggggtggtggaatggaatggaattgggatggcggaggaggaaaggatttgggtgggtggtctaaaaatttgcatttcgcggtggtggtctaaaatggaaggaaacgaaagcgtggatggcgtcagcggtgtggacgagaagcggggggccccgatcgttggatgcggacttgccggtaacaactcacacaagtcacaacacaacacaactcacgagaccgtctacgtcggctcagctcctggcgtgggatgagctccgtccatttgtaagccgtgcgtccgttcattcgtgtccttgatatttaattaactagatgatgagaccccgcacattgctacagaaatttagtatgataacaataaaaaaataacgtataagatagctagataacatcagattaagtaaattaatatggtttatgataatttaaatttaaatagtatgtagaatggtgattcaaacgtaaaaagtaaggtggtatgactttatgaaagaagagaagtagggagatagtttggaccgtggattaatcatctaaagactaaaagcaattgatgtgatatgacttaattagaggaaaaaaggagaaagataatttagaccatagattaatcatttaagcactaactaagtgaggatgaactatataagtatatatgatatcataaaacataataaagatatacattgaaacattatgtgaattatgttggatgataatttaacaagtttgtatttgaaaagctcttaaattataaaaactctaaagatatagcatgtttgcatgatatttaaatgtgatgattgttagtggatgatgatgtggcatcttgttaattagtggatgatgatgtgatatcttcttagtggacgatgatgtggcatctttacatgttaagcttaaggagttagtaggggataactttatagtaagataggattcttgaaaaatgttagccttagagtgctctttggccgttggatcaggggtgtcttcaagctcaagacgaggagagcgttggattaggggtgtcttcaagctcaagacgaggagagtgaggaagcggggtacttaactacgatggcgactttccaataatggcggtaacaacggtgaactactcttcacaacggtgatggttggttgtgatggtaagttatagattagattttaggatgggaagggaagttaggaagagggggggagcttttccgggtttagagagatggtcatgtgagtggttggatcgacagtgagctatagcaacgggtgggtagtgaggcggcggggtggtgttggagttgtggtgatggaggataacaatgagggggctgtcagcggggcagagtggggtggcacaaaaggtcttgctttggaaaggtgagagtggggaggcagggaggagcccaatctaataggcttcgtcggcgccgtttatgccttccatccaacaaatgaggtcagaagtggagtggttgggtgagggaggtggcgtcgaacactcgaacgagtggacacagcacacggaagaaggtgagggaagaggttactcaacactatcttagctataaaaacaattgactgaatttttttatatatttttaggtgactgaactagacaattccttatttcttgttggacttcagaatcaattgtgaaggattagatattgtacaaatcgagaagaagaaatttaaccattcaaatttagaaaggagtcgtgcaagtgcacgacataattttaagatgcggtatagtttgtgtgctaattgacatcaacatgaaacctaggtatcaaaacctatatgtactagaccaaatcctgtattgtagcgatatcacacttagtacgtatcctttgtgtcaacatcagcatataaaagtatactacatattcaatgtatcacgtttcataggttttttttcccattttgaaagcatatcactaactaagcaccattgtcgaatcgtactcggcaattgaaagcaacatagtagatgttacagttgtaggtaactttgaatttatccggctagcagtgggtctgttcggaagaactggctgcagtagcagcagctacagtgccaatagtagccagccagcccgaatgtctacagaacaatgcaaactgctgcagccgaacggctaagctacgcagcgcagcatagacagctgcgaaaacgggctaccaaacaggcccagtaaatactagtccctctgtcccaaaatataagtatttttaatgtagtgacaagttaaatattttaaactttgactattaatagcaaaaaaagaaaaagattaatcatgtaaaattgatgttactatatttactattaaaccaactatcatgctccctccgtttctaaatatttgacgccgttgactttttaaaatatgtttgaccgtttatcttattcaaaaaatttaaataattattaattcttttcctattatttgattcattgttaaatatacttatatgtatgcatatagttttacatatttcacaaaagtttttgaataagacgaacggtcaaatatatgctaaaaatcaacagtgtcaaatatctagaaacggatgaagtaatatgcaacactttttatttaaaatatcttatttttataaatattatttgtccaaatagcatctcggagaacgtgtgagagtctaaaaatgcttatattttgagccggatggagtattagtaaatgcacatagagtggattggtttctgaggccaacaagagtttgtttcggtgaactgttttactggttaaaatatcccaatgttattcacatgggctgcatgttcatggcagtttcttattctcctggaagcaccaaacttgcatttggatgggtgggtggtagcctaaggatttgaccatctgagctccaatgcagttgttgcatcaaaccacccctattagtttttccccttgcgttcaaacatgacgtataccagatgtcatactttggaatttggatatctgaagcactcctcaagaaatataatttaccagctcgtaatctgcgcgttatcgcgggaaaaaaataattcaaataatatagtactacacaaacttaaaggttttgtatcatattgttcaacttataattttgtagaacaaattagaagttaggggcaagaaacataaacatgataccaacccactctaagtcgtactccgtataggcctagcattgcataaaagaatactccactaggctgaaacatagtcaatattgatacttgatagtaatagaaaatcgtaaggatgaataaaatattaatagaaacggatgtttggtttgcaattaaaataatttatgggacacacgtgaatcatacttgatatggatcgtgatttgatgatttaattgtaacaagcccgatacattaaacggatttcagaacagaattactaattagaaaatatggtcattttaaaacatgcaaatcaaaactaaagagtcaaagaccacacgagcccagcgcgggtaaagttcaggtatgctgtgaaggagccgtacttcaccagctttaatactacttannnnnnnnnnnnnnnnnnnnnnnnnnnnacacaaacttattgtacagtgtaagattctcttctataattagtacatttctatgaggaaaaggaaaagaactgctgagcttatggcatgagaaagtcctttggtctgcctacatccctcaagttttcaactgatatattacatatcaacagcatggtagatcagacgtacagacaaagagatactatccttgcagaagccagccttccaaaatcaagagatgcttttctgcatacaactttgggacacgaacagaacctgcacaaaggaaagcatagaacaccacgtgcagcttgttaacagagaaaagagcatgctgatggtaaatgagaattgacgatgaaagtactaagcatggcataacaacggaagtatattctaactttcttttatcgtccttttttgtgaacaggccaccaagttaacacgaagatgaaatttctattttgcaaaagaaaactcaagctactttatatactaagatgcaaaagaaaatgttcgggagaaaaaaaagatgcaaaaggaaagtctgtcctaccaggctatgaaaattctcatgggacattgattacacaatatcatgccgcaggggctttacaacagatgttgaggacatcatccagaggtgcatgatcaccagtgccctcatctttccttgcatatattaattctttccctctgaacacaaacattccaccctagcacacacaagtaatgtaagcatcaaagattcttcctaaaatcctaaagataagttcagatgatggtgaagaagcacagatgtgtgggcatatgatccaacctgttgtagaacactagccctatcatctggggtggcttcaattgtatagttcttcactgcctccttgagggagtcaaatcgtgaaaacacacttgccttcaaggaaatatgtaacatttttcatgacaagacagctatgcaagtgaaatcacaaaatttaatgatgcttacactggctggattgaagaatgtgcgaccaataccaaaatacaaacccaagagatcataggcctgaaggtgaaaaggctcaatgtaagttgtgcaatcagtaacagaagaattaaaatgttttttttatcaacaacaaaatgtccaatgcaaagataattgaacttcatgtgtattatgtccaaactgatgatgcttctgtctaattcagatatcaacatctatgtctggacagggaagaacaataaatacatcatatactgttcaggagaatttcagtatctgaagaccccaattgtaattgaatgcttacttatggaacaaatttgcatactattagtgcacttattatagttgaaaaaatattttaaaaaattaagagaaaaaaagagaggtttagaagatagaaaccactttctacagctgtagaaaccttccatttgtgaatgcaatctaacaccaaaagttttcctgctgtcagttgacatgaatactgcatctatgtgttctgatttcatccaatcaggcgcaacagagacaaaaatttaaaatattttctccaaagtagtaactacacattttatgggacaggtcctgttagtgcagttcaaacaatagaaaggcaaggacactttgcacatggggtactcttaagtaagaaagtgtgacctgtgaagatataaaacagattcataaataggtgggcacaagaatatgcaccttgcgctcaggatctgcgtagaggtagtccaatggaaatggtaactgcaatcagcattttttttggaaaaatgtcatttgggatggaaaaattttacgggcacaataaacaatgtcaaaaattgctttgctctgcaaatccattgtccagcaagttgtgagattagaggggcaaactagacaatcgacatgattgaccagcagctgtaatgatctattgcaataattcatagccaatttttttttcatattataacagataggaggttcaaaaggtcaaattccatagtttgaactagtaaatcaaggtttttcattatgaaagaactgttcatgatgtgtgtgttaaaagctgaagtataaattgaagaacactgcgtacacgctcagcaagaatacgggctttatctggagtgccaacaccaacggctattagcttgacaccagctgaatcaaatctctcttttgtatccctcaacacagaggccaactcccaactacaggaagcacaaataatgtccatgattagcacagaaaagaaattaaacaagtcagcaacaaattcttatgaatgaggtcataaatccgggaaacagatatccacgagaggagcaaatctttctcaccagcaagggcacccaaaatgccttagcagggcaacaacagccattccctgcacaacagagaagttctccagtttatttatgtactacatcgtgttcatacaaaactcctcatagtgaaataacaatgctccaatgttcagatagttttccagtcttcaaaaggactctaaatttgctcaagcagcaacccatcacatcttatattgtcaaaaatcatgtgtgcaaaattttgatcattcatgaaggaaaaatttcctagctcagatctccttgcagtttactagaaagtagatcgagctaattagggggagaccgacgagcatctctacctcgttctggtcccacaggtccctgaacagcacgggctcgccggtggccgcggagtagatggcgacgccaccgagggcatccccgatgcccgacccagcctccggggaagaggaaggcacggaaggggagcccgaggcggcggcggccggtgccgctggtgagccgcggagacggaagcacccacggcgaccggggatgaggagaccgtgccggggagcggcggctgggcgagcggacggcgggagggagacgcgcgggacggggagcgaggtggacgcggccgccgcggccatggctgcgtgagacgtggcgaaaccctagacgcgggagggagacggaggcgagcgagtggaccgttgcggtgtggaggtcgttgcggatggcggggggtgtaaccacgagtttccaggcgtatttctaaaatgggatatgagagatgagactgggatatggaaatggatgaatgactaggattaaatcagttatgaagaatagatgtgtatgatacaatattgtcttttgaagggtgggatattattttccaatcccatttgccaaacaaagatttagagaacacgcaatcagaacacaacaatttgcctttccttcctatagttcgggataacgtatcattaaatattagttaaaaattaaaaataaattaatatatattagtttttaaaacaaattttctgttgaacttaaaataaaaacgtacttgtgaaaagtagagaagtagaagttaagaacatgtagagcataccagttcttcgttaaattgtaagatagatacgtgcgatttttttcttcaagttcttttaacatgtactagtaacaagtacatgctctatgacccatattaaaagggattagttaaagatactccctccgtcccataatataaaggattttgagtttttatttgtactgtttgaccattcgtcttatttaaagaattttagaattattatttattttctttgtgacttactttattatccaaagtattttaagcacaactttttattttttatatttacacaaattttctgaataagacgagtggtcaaacattgcaatcaaaaactcaaaatcccttatattataggacggagggagtattagggataaaacattggatctcgtctttatctacgtattttacacgtgcgagcctgatacgtgtggtagaaggaggggatggaaggaacgcgactctgtttttaattgagtagagatatctaattgattaggtgtaactgtaccttatacatcagaagttcagagttcagactgtagtgtcatgtccattgggtagctaatccaatatcatgctaagtacataagcaaaccaacaatgcataattaatcgaacatctagtactgttgagtctaattgctctctgtttggcatgctgagcatttcatatatttacatacacatcttccgactgctagagacctcaagaagttcgattgcagcaagcgttgaggacatcatccagaggagcatgatcacccgtgcctttgtctttccatgagtacagcaactctttccctctgaacacaagcataccaccctgaacagaaaccagagtacgatgagcagcgaacgacagatcagaaccaagatgcaagagaaactctgaacttcaatacagagccacaaaggatttgtacatgcaaagcacagagttcaacaacctgctgcaagatacccgtcaggtctgctggtgtgcccttgagcgtgtagttcttggttaccttcttgatggaattaagccccgagtacatcttcgccttcatggacgtacatcacatgtttaatacttcaatgccactcgtgcaaatgttcagaattgcattgccacaagcttacagaattacactactagtactgaattttgatgcttacaggactgattaatgtccgacccagaccatggtaaagccccaatacgtcgtaagcctgaaaagatgagtatccatagtaaatacgtgcataagcataatacatcgtcaaaatccaatgcccgttagatttctcttcacgtaccttgcgctcggggtcagcgtacaagctatcaacagggaacggcagctgcagtgcgcaaaatctcagagaaagtcagtgaacagagtgaattgatcatgctaaatgccgtaataacagtaacaatgagcacgctggtacgctctctaaatctcaatttgatgttagagtcatatttgtattgtgttcggtttccctaattctcccccgattttatttctataagtcggttatagaaataaggatgtatcgtccctgtgtgtactcttgcttgggatcaatctattaccgcgttgactccaatacgctttcatttcaaagcaagcgtaaacgcttaccccatcggcgagaatgcgagctttgtcaggagtcccgacgccgatggcgatcagcttggccccggcagcgtcgaatttcgccatggattccttcagaacagaggccagctcccagcttcataaatcataatccatttgattgaccatggacaaaaatgttagtaattaacagccgagaaacacaagaaacggagcgaacatggaagcgtcggctccatctcctcaccagcagaagcacccgaagtgccggagcagcgccaccacggccaccccctacgcgcaacaacgacacaggactccgaaaactatcaccgattcttcgtgtttgagtgcgtgattccgagaaaaacagagatgaagatgacaactacctcggtggggtcccacaggtccctgagctgaacggcttcgccggtgccggcggcgagcacggacacgccgccgagagcgtcccacacgccgggggagccgccatcggggctaggcgacggggagacgggaggggaagcccctgccgccgcggagacggccgtcagcgagcgtcggcagcaaaggcgtcccccgcgcggccgggacgccgcagggaccacggccctgttcacgggcgacgctgtcgcgcgtgtagcggcgggcgcgccggcgagcgcggcgcgcgagagcgaggcgaccgtctccataggtacgacgaggccaaactctgagacgcgtactgatcgagggcgaggtgcagccgccggtgccaacgtgtggccttgagcgcgtggcgcggcgtcaagtggcagcggacgcgtgggttttcgtctaactgagtaactgggccgttcgttgggctggcggtgagttttcagtcgatttctccgtgaaaaggaataagttcactttaggtccctgcaccgcaacaccggatacaacgcacccccaatttacaaaaccgtgcaaaagagatcccttggcagttttagctaatgtgacatctacgtggctcctttgactaggtatttttttctacgaggcattaacgtggcgcttatgtggtagttcgatccaaaaaaaataacaaacactatgagacccacatgtcagttacacacacgaaataataaaaaatggtaggcctatgtggcccaatatgtcatcgtcactcatcacatcttctctctcctttctctctctccttcctcgcccggggataacaagggagacgagggtgtcgcagcctcctaaagagaggagaggggagagagatgaagaggggagatggggaaagagaaggaagaagatgggggtgagagttacattttttaatttagggcatgttcagattatatctaaaataaaccttaacaagttttggcaagatggcaatattgctaaaattttggtagaattttttttgtatttaccaattttggcaacaaactaaacgtagacattttttgacaacttcacaaaaagaatggaatggttgaaaatagcagtaatctgaacagctccttaattattcgatgaagttgatatgtggacccacaatttttatttttttccaaatcaaatttcacataagcgccacgttatatgaagacatagtcaaattagatatgtaggcgtcacgtcagctgaaaccgtcgtccaaatcatcttgggacttattttttaatggttttgactgttgagggacccgctgtatatggtttttcggttgaagaaagaaaatcgaattcgtagacaagttcagggacatcagatgaacttattccccatgaaaaccgcacgtaatcggcctttttttttctcacgtgaaaccgggccaatagcccacgtccacgctaacgccgaaacggccggattcgttgacgcgatagcacgttgcttcaaaaaaaaaaaaaaaaacactggaacttgcgagttgcgagtgctggaagcttgtcggttaatgcccttttgcccaccacattgttattaggggctactctctccgtttcaaaatgtttgacaccgttgactttttagcacatgtttgaccgttcgacttattaaaaaaatttataaaatatgtaaaactatatatgtacatgaaagtatatttaacaatgaatcaaatgatatgaaaagaataaataattacttaaattttttgaataagacgaatgatcatacacgtacttaaaaagtcaacggtgtcaaatattttaaaacggagggagtactaattagttagggttaatttagtattgcgttctcaaggtaggcgatggcgtaaactagtccatattgcgtgcgtggagaggctcgaaggtacattgagagatgttttgcgtgatggtgttacctaggaagatgtctccctaccccatcggtctatggctaattttgcttagccacggtaaccgtgctacactaccactaacacaaaatatttttataaatctgcctttgaggatcctagggctccctccaggttatatatgtgaaagggaaaggcaagttccaaacctgcacaatatactcctactccattcgtctctctcatcatctcatgcgttgcgtacgtgcatggccgtcagattggaagccaacggcagagatctccctagcaccgaccattccccttttgtacaagctgtaataagctgaccatcaaatcgctcttataactggcaatgctacggcatcagtaactccgtagtactaataatcacccaaggaatgtgaattgaattgccatcagctggcctggatggatgattaaccggagtagtacaggcaaagttttctccatcaacagtaggagcagtgcagtacacggtggggtcaattttataattggccacgcactcatggaagggtgtagtcaatttcactttggcacggtcacacaaatcccaaccaccgtggggaccatgcagcaggggaaggaggaagagaagaggaggaggaggagggtgtgtgtttgcacgcggccccatgtaaaaacaaaccaagattcccatcccctccctctcccatgtgagccaagccaaggcatgcatcatccctcggttaacgagaaaacggcctcccaaagtagggttagaaaggggttagttggagtaccacacggaggcacagatgagtataatcatctcctaattctagggtttgcgtggagctagctgatccaaaaggctggccaactgttgtgctgtgttttggtggagccgtttaatttgtgttgtggcactctggtttctgactcgcaatatttgttcacaaaggcaaatgtacaatgagcgaggagagaggtactgtgtaattctgtgaaacgtatagattagattcgagtcgaattttgcattgatccatacaggaaatatgaatggagaaaaagaaacatgtcataaatgtggcttgaatgaaattaagaaagttgatgcaaaaattagttcacacactataaatgcatattaaagaaactcaaacctttttttttactagagtgagccaagatcacatttggttactttgaaggacaaattagtactcctacatcataataaatcaaaaaattactccctccattccaaattgacctacatatttcataggtacaccaagaccaagaaaaactaatactatatttcctagaaaaaactcaatgcatgcaccatccccactatttcctagccaatagcaaataaagatattgcatgtgggttataagagtaagtttaatagtatagccaaccgccggctccaaattatctatagtcaacttaagagccaattcatacaatagttacctataaacatatactacataattaatagccggtcccacctaccatacacatgtaccttggagtctgtgctacagttagctacaaatctgtagcccgctgcccttctctctcatcttttatctcctcgaaatgtgtttatagctggcttatagcctgctattgtacctgctctaaatacatgtgtgcatggatgcatgcatcaatgttcatttactccaatgcacaaataacgaatagacctaataaatgagcacaaatatgtagatcatttaggaataaccttaaaaaaactatatgtagatcaatttggaatggaggaagtatctactagtagcatacaggagtacatagaattaagactgcatataatgaatgtactgctgatattaattttctgttttttaattacattgtatttgcagttctactgcgtcctggcagtttcactgtccaccataatgttgtgcatacagtactgtacaccacattttgagcatcctgggtttcctcagtatctatccccggtgggaaaaaaaattgattctggtcgtcctgtaagaaattctttacactgctgcttcatgcaaagatagctcaaagctagtagatatcttggaattcttccctcgcctagagtaaattaaggccgatatatcatgtactctgatgttattatccctgtagattaagatcggattagttgtggttggcatcttgatgtcttcctcggatggagtaaacaataagcccggcagcatccgttgggttccacccaatctcgctcgcaggacttctcttttgttatcttcttctcaagtcttgtcatatgcatcctagctcatttgtcattcctgtaaatatattctagtactattcgtgttaagatgatcggtggtattaatttggtgtaaagtatgtttcgcgtgaaacctctcaaaaactaaactaaccctaaagtatcaaaagaatcaacctgctggtaaattaaccgtctacacttactcgagatctgcagaattgtactatatggagatgtcctgtgcccaatagaggccaaggtggcccttcatgatagtgtataatttgtaaggttggtgcttgatcacgattggagagctgtaaaatgtttgagtgtaatgtcattttgtgttgatttagtcaaaccatactgtgactaaagcatgtcaagctagctgcgatgcacgtacttaagttgagccttggcacacaacacaaacttgggatttctcttcggatgcaattagtcgtcggatgtttagttttgtacagaaaacgctcccgttttaattaaaaatatacagttaactagtcgccaacctgtgtatttgcacgagctatatattgctgttgatattaattttaagtataaataaaaattaatcacgtgctaaaattgatcattgttttaaaattgtagtgccttaaattaaaagagagtccactacaattacaattcacaaattattatttttaatttaaatttgagttaaattaatacttcttcagtcccatataaatgcaacctaatacatatatgatatatcataggactataaatctgagtagtcagctatccaaatttatagtattataatatgttatatatgtactacgttacacttatattgagacatactagagtatttatgatgccacatctaatctttaccttaccacaaaatgtacagtgtattatgctatttctagcactaccattcgaattcgttgattaccaatagggttgcagtagtactagaatgttttgcttaaggctgagttcttttgttaaagtttctaactcaactcccttattttttacgagaatatttttcaaactaataaatggtgtgtgtttttttttcaaaaaaattctatacgatagttgctttaaaaaattatattaatctatttaaaaaactaatattaatcatgcgctaatgaatcacttcattctatgtataaaggacgagttcctaaccgcaaacaaagaactcagggtgtgtttagttttgggtacagtgtaaagtttttgaagtatacaaatacacatttgaagtattaaaagtagactaataacaaaataaattacagattctgcctgtaaactgcaagacgaatttattaagcctaaataatccatcattagcaaatatttactgtagcatcacattgtcaaatcatggtgtaattaggtttaaaagattcggctcgcaatttacgtgcaaactgtgtaattggtttttttccccatatttaatgcttttatgcatgtgttaaatatttgatgcgatgtttttgctaaaattttttggtatctaaaccatgcctcaatatgaaagacctgggagacacatcggtttaacagcacagaaaacaccaagctgccatttaattaagcctgatgctgctactcccaagctccaacagatgccagagcctgcccgctgcagctgccgctagcttctcttggaaatcttccctggcgtttctcgccgggcagctagctgctccatatagctcctgcatgcccagagctaagctgatcagtctttcgtcacgactgaaagcgtcgccagtcgttgtccgcgccttcgtagtactgcgtacgcacacatcaggttcaggggttcaggagcatgcatcgatagcatgcatgcacgatgcatccaattccatggctgccatggctggccatatcatctgccgctttgggtcttaattgcagccgcgcgcgcgttggcctctgtctcgccgactagcgtacgtaaccgtgcgtgcaaacaaacacaagaaaccaacgacatactagcagtacgtacgagtaccagttttcgccgtgcgtaacgtgcgatcgagacgacgacgcgatatcggcgtacgtcctcacaccggctatcgcgcgtataccgctactagtgctacggcggctggggccatcgtcgtgccagggtcgcagctggggagagcacggggcggacaaaaggcacgaacatgtgcatggggccgcgcgtgtgcgtcggaatgatggaaggcgagcggatcggggggattttttggcgcgggtaggcgtaagcctggccggccaggggggtcgcgggtgcgtccaaaccacacgcccagcccccaaggcgtaacgtacgtacgtccgcgacggtggcgccggccggccggcgcggtgcatggggagtggtctcgtcaccggatcagggtggattgcgtctaagccacgacggcgccgcggaaacccaggtaggagtaggtggctacgagtagcctcctggtacaaggctcgacatcgcacggtctttcacaaggctagctcatcccgtgtcctcttgcacgtatgcagcgcagggttaagttcaccttatcaattgagcgtcagatcctgatcctcggtggtacgatggttttcttcaaatttcaatagattttggtcaaaattattactccctccgtactttaatgtataatattgttgactttttaataaacgtttgaccttttgtcttattcaataaaattatgtaattatcatttattttattgtgacttaatttataatcaaatgttctttaagcatgacataagtatttttgtatttacataaaaaatttgaataagacgaatggttaaacgttggttaaaaagtcaacggtgtcatacattaaaatacggagggagtacttcctaatatgagttctcgaagaccttcaaaaacttcgtcaccggcatatgtactttcgtcgaactaaaattgacatttttcgctggctaagttctttagttgaggtttctcaattcacatctttcgttttcttcacacaagtttccaaaatgctaaacaatactttttttaaaagttataccctaaagttactttcaacagtcatattaatctatttctgatagaaaaagatagtacttaattaattacgctaataaattatttcgttttacgtgtgcgagggataaaaaaggcaatcacagccaaaaatgggaaactaggcactttggcggcgtgtaaaattgtcgcctattactacgtgtgtgaaactgtgaaatggaggaggagatgcaaagaggacccatgttgttgtaggggtactactaattaattttctgaaaacgactggagtcgctggtccgggttggcgagagcatggggacatccatcggccttacgccaagcatattttattccagtcgtaagcgcagatttgaccacgtcccagatcgatgtgaggtgaaggtatggtggtcgcttcaacaccacgctgctggcggatgcgtttgaataggaaacatccactccgtctgtacgtactactgtactccatctacttcggcatctgggaattctcctgttggaacgaaccgatcgaccgccacggagagagagttgaatcatcacgtggtgatcagtactccccgttcataaaaaatcaatatagaattaaagaggttatatcatttttaattctaagttaatttttatggaaccagaagagtagtggtataccttatcaaatccatctcacaattaaaagtcagtggtagaagtagcagcaagctagcaactgtgtacctactggatcgactgaccgagtatgcatatatacattatcaaaaagatgaattaaatttgaaatatattgttttattttcttagaaatatttgggattcaatttttttagcacagatatagatatcgcataatagatgcacgaaaataacgtgggctgacgacgacaacagtatcacatggtaacgatgcgtctcgcataaccaaactacgagaccgcgcggtcttgcatggccaaacatcaacaccgttttgaaaaatgattaattatcatgattaacgagaccgcttgtgacgtcacatccacatcattctcgcgtaatgtttgagcgaaattatattcgtgccaaataatttgaatctcaaatatgtttgagaaaaaaataaactaacattatattttcaaatttaattcgagcgtgccgggccggaaggagttgacaacttgacctcgctttcatacacgcgacagtcgcatactcctactcgcatacatacaaaatcaaaggtttttcaagggtacgcatgtagtcgtctcttgctcctagtattgaccttttctacgacaatgttctgttgagggagagggagaggtcgagatatatagggtcccgtacgtaacgtaacgcaaaggggtcagaagttggcaacccaagcagccgtaccataatgcgcaccgcccacattgatatgatgaccgagaagtggacaagtgaaggagggccgggtgacacgtacatcaccggtttcctacccacgcccatcgcattggaactcgcccgtctttataacacccatgcatcctactatgcatacggcaagggcaacgcaaggctaccgattcatcatgcccaaatcaagcttttacgaacgcaaaaaaaaaaaatcaatacacgggaaattcaatacagtagtactccactacacactactagtgctagtgtgctactactactattttccgtgtattgatattcaccggtaaagtcgcaagggaagagagaggcaagaggggcccggagtgccggacccggagaaagcatgaccagaaagcgacggagggggcaaaactgccatcctgtgctactgtaaaaatactcgtagtactcctcctacttctactagtcagatactaccttttgagtttttcttatattgtttgaccactcgtcttatttaaaaaatttgtgcaaatataaaaaagaaaaattatgcttaaaatactttaaataataaagcaagtcaaaaaaataaataataattctaaatttttttaaataaaacgagtgatcaaatagtacaaacaaaaaatcaaaattccttatattatgtggggagggagtactactactggagaagtagatcgctgatgccaatccagtactagtaactggtccatcacactccatccaactcgcggctggttgcgacgatgcggcggctggttgtgacgatgcggtggagtgtgcgggcagtagtagagatggggtgtccgcggatgggacgggacgccgcgcggcagcggcgagaggcgacgcgatggcgggcaggtgggcgcgctttatccatgtcggccacgaggaagccgaccccgtctccgtcacatctcatatctcttgtcaatgcatatgtaatccatcctttcataatgttttctggagtggggaaatttcattaatgttttctgggacggggaaaattcgccatgcttggaccgtactagctatacatgcagcctaaaatcattagactatgctagcgctatagtagtgcgtgttatccggcgtagataaaacaaactgcgtccgctctttacagcagtagtatgaatcgtgaatttgtgattaggcgtaaaaattttaaagtatacatacgtatatttaacgtattaaacataaactaataataaaacaaattacatatttagcctgtaaactgcgagacgaatctattaagcctaattaatttgtcattagtaaatatttactgtaacaccacattgttaaatcatggcgtaattaggcttaaaagattcatctcgcaatttagatgcaaactgtacaattggtattttttcacatttaatgattcatgtatgtgtccaagcatttgatatgatggaatttttggaagtttgaaggaaactaaacatagccttagagtcgtcttttaggtgcaactcatactttgacttgtgatcagatcgactggttccattaatggaatattgttcatattcctgctagtttgatgggaggagttgttacttcaagaagaaaaaagaagatagtagtagttagttttcgtgtttgatgggagcttacaattggatttcataaagaaaacagtgcattgtgataatctattttgctttcctactttcttagactactacagtataatactccgcactacttttgtgatttaaatcacacccataaatgttaatggacaataaaactagacgtatggtactcgatacgagagaaataaatgaaagctcgtaatgtttaagttgatcaaagatgtaacacattaccaacgccctaaaacattttttttaaaaaaataaacaaacaaaccaataaccgacaacaccaaaaaaaaccttaatcagacaacactacattcaacattcgcacatgaaccaatggaacacctaaagataaacattcaaacaacatcgtgtatgacattgtaaaagatctattacaacacaaaaacacatgcattataacatctagcgataggaggcccccgcctntttgcctccccccccccccccgcccccgcccaacaggtcctcctcgctccttcctcatcaccgttgcatgcacgattctcgcccgacgcgcacatcatcatacgcattactgcactgcagctcatcacatttttaacagttgacctgatccatagcttcactataatagaccaaaaaggatgagggggagggaagatgtggaggagagagaacaaacaaaagggatggaatggaagggttcgtgtgtgcgtaaatgaacatgttgctcgtgagttcatgtgagggaattataacatctgattatttatcgtatgttggacatccaattataagtgttatcaatttatcattaataaatactaccttcgttatagaataattacatttctaggagattagaaacacgttagcagcaatacaaataacgacaataaccatgtttaatgaccacactgcatacacattctatatgtaaacttgattaaaaaggaaggttaggagatgaggatggaaagatggggagctaggaaacaatatatctttatctaataatctgttggatttcatacccttttagaaatgtaggggttgctcagattgatgccatttttaaccatattatttttcagtaaagttgttaaaaagtgtttatgtttagtttgttaccaaatttgataaatacataagaaatcctgccaaaatttggtaagttttattttggctactccctttgtcccataatataagggattttgagtttttgcttgcattgtttgatcgtccgtcttattaaaaaaattgtgcaaatataaaaaacaactttaagttgtgcttaaagtactttggataataaaataagtcacaaaaaataaataataattctaaatttttttgaataagacgagtggccaaacagtaaaaaaaactcaaaatcccttatattatgggacggagggagtacaatctgaacaggcccataatcgttttggataaaatttaaattatagagatacaattaatctagaagatgtatatcagttcatgcatgagtactgtacaacaaatagcgtgtactacttcgtatttgtaactgtcataaataacatagccgtctcaaaataagttttttacccatccaatacatactaataataaaaaatctagaacctctactttatcaaatctaaatgtaattgtttttaaaattattttatagtttcacaaactccaatacaattattactttaaaagtaaatttattttcagaaatgaaagaagcaaaaatgaattaattaccccacagaggaagtaatagaaagttagagtaggagttcctacgaaagtttgagaaaaataaatgttgaaaatcagcccccgaagggattgacgtggtatgttctgccgcatccatgtctcgtacagtatactctcgttgtagcggacatcaaatcaaggatacaaagatttgccctcgtgttcgtcctacgcttttttttttctttccaagaatctcccgatccatttaaattttcgcgtcacgtccatgcactgatgcgttggcggtggaagggagtttaaaatagggaagcatgcatccttatccggccgagaagaaaaggttttgatgatcgatcgatgatggatcgatgccacctgtacgactgtacgtgctcacgttcgtgttccctatcttttctacgcctggaagccggaatggccccgattccgcgatgctacgccgacacgacgccaatcatcgctgcgtgcgtccgtgacccttcccggcggcattgtagtccggatagcacgatatgtgcccgcgccgctctcacttttcgatcggcgtcggtaaaatatactaccccctcgtaccacagtataatagattttaaatttttatttaaactgtttgaccactcgtcttattaaaaaaatttttagaattattatttattttttaacttactttattatctagagtactttaagcacaactttttgttttaaatatttgcataaattttttgaataagacgagtggtcaaacaattcaaccaataacttaaaattctttatattatgagacggagggagtataaaacaagtctcgatcctcggtagacggttagatgtgttacgtgaggtactacctccgtccaaaaaaattacatttctagctccaaggctttgtcccataaaaattgtatttctagccatgtggggcctagcaaaattgattcatctagataaatttccttaagttctcttagccttccatcccacgatatatggttgtaatttaagtatgctaattatatgggttaattctctcaaacttccttttaatcatttgtatatatggaatatgtgcatgcagtggttcattaaataaggtcattgtggtcatttttcaatactactgttttgtcctaaattagctagaaatataatttttatgggaggagggagtatacatcaacgtacggtgagccagattgatcccgcacaccacacaatcttttggtcaagttaaaagaaattacaaagtaaatttaaattttcaacaaaatttgaataattttggtggagagtcaacgggttttaaatatttttttctcaaaaaccacatacctcggtttttagctccgaaatagtttaggtgtatttggttggtgggatataccggataagactaatcagtcattttgttgtagggatgtctggttgatgagcaaaaataggatatggctaccagatagagaatattctatgtagatgctggatatctagctctgggcaaattggcgggatcacgcggtctagaagtgggacgagtcgcgcgactgggtatgagtgcattttccctgccatctgttttatcacggcattttggccaccatctctttcttccattcttgcggcagcacaaggagcaactctcgagggcgccccgcggcacggggcgacacttgataacgctcagtggagcgctgcggtgtaaggggatatgttactatttatggtgagtgacatgtaaaccccaccactctcgagcccatatgttagccaccaagtcagtggaaagttatatcagataatctcgctctgggcatagcacagatagtgtaaagggtgtcgcaggggcggcgtccgagtgtccaacagtttggcggtgaggtagtgatgtcctgctacatcaacattgatttagatatattcgtgtgttcttgctttttttctgtattcgttcaaatctgacgaccgacgaggtagtgacagccgactgcacccctctggactatactctcaaattcttagcatgcatgtgttgttatttttgatgtattagttcagatatgatgttccttacccattgtatggcttttgatttgggtgtctgcaaggtggcatttgtgttcttatcatttgtaaataaatagtggataaaattaatttacacctggagaaatattactcacaaaacatgcaagtcaaggtgagagatagtttatcgactggggtatcaatgcagatcatccatcctagcaaacaaaaaaatatatcatcccattcaacctatcaaacatcaaaaaaaaaaagaaaagaaaagaaagaattactatatccataaaaatatagatggacatgtcctcggtgaactctggttggacctctccctctcttgtggtggcgcaccaccacctccagctgccccggcatatatgctcctcccatgtcctccaatcaacggcgggacgtacgttgattacgttcgttcgatcgcctgcgcgtttcatcaaaaaggcccggccctacatgtacacagcgggctagctagccgctttcgcaacgagtaggtcggtcctcactgtttgctgttgatcgacgtgcaatgatccgatgcgacgatgatacaccgattctcgatcgacaagggcaaaaggagctatagcttatacagcactgttccgtgtgtggtaaatgagctagctaccacaatctgctggcgatgcaccggcacagttaatgtgatatatataatctcgtgcgtctcttatgccattcccaacccaataactaggatgacgtccatagtattaaataagctaccacctaggataaaaaataatgtggcaagtgaataaatgagaaaagagaagaaaaccatatcttgcatgagacatgatttctacacaacatccaagacatcatgtgagataaggagcattacatttaggtatagaataatagtgtttattttggaagaatagtgtctattactagtttcttaataatatggagtttatggaaactatttctaatgttttgagtttggaatgccttaatttgtttcgttgggtggtgagatcaaacgatgattaattcgttccgagatgggcgcgtacggcggcgaacatgcgtgttgccggatcggggacatgcgtatgaatgtaccagcaaacaactatccgcttgccacttctacacggtagatatatgtatgcagggcgtttgcacacgcattgggtcatcatcgatcgatcggccggctaaattgctgtagccacagctatatagctacctttcttccgatgattttcgagtcgagtacaaaacagctagcgacgaccgagatgtggtggtggtacgtacgagccactaattgccaaccactattggcgaactaacctgtcgtccgtcctcactcgcttcaattttttcctaccctaattattgaaccatcgcgatagctacgattggcacgtacggtgttaggtctctctagctacgatctgcctcatttttgccaacacggctctgtgataaatctgtatgcttgttacagctgcaccagaaagtccaaagcgtaccttctacgtctcggtggtacataatcgtttggaaagaagttcaccgaactaaatcaagcaaaatttttcaatatttcacaggaaatggttgagatatgtatgtgcatcattggaaggattgcgatgcccgaggcctctggtcataggcgcatatacacatcgtctgcaacactacatgtattcactaatatataagggctattcagattgtaaccagaataaaccttaccaaaattttagtaaattaataatataatattactaacatttttacaagatttcttatatatttactaaaatttgaaaagaaactaaatgtatgtactacatctttgataactttactttaaaaaatagtatggtttaaaatgacattactgtaaacagtctcatagactttgatcatctattttgatgcgcatgtagtatattacgggcctgttcactttgatgaaaaaaaaaccttacccaattttggcaaattgtcaaaattttagcaggatttcttatatagttactaaaatttgacagtaaactaaatgtagcctttttttttgacaactttaccaaaatttggtaagattgaaaatgacatcaaagtgaacaggccctactacgataatgttgctacaatatgcgtgtgcacgtatatggtgtaaaacggagtaacaagtgcgtgcacgcgcgtgcgactactgttacgggagtacacaccgatttcatgagacaacgggctagaacgacgactcgaaggggccgcgtttcaattcgttcgaattgaaagtcccaagtcgcttccagtaggtactactagtagctcacacagtagtcaataatgctactcatggacctcacaatgcttcgatcattcatttacttcgctggggatattcaaacgcgattttggttcacattttacaagttacacttcacatttaccagatgagggctaaatctagctagcacttgtgtaacgctagctagcagctttatttcgttggcttgtgcgtgtgagagagagagagagagaggagagagagagtaaaagaaatgcagagagtagatggattggctttaatcgtttgtgtgcgcagaggacgacaatgtttgattactccctctaaaactatgtgtagtaaaggttagaaaaatataaatctagaaggtaagaaaaaggcagaataataatcaaggagattgaacaaactttacgataaaaacgatcgatcaagtcgatgaagaagtgagacttttcggggagggagagaaatgatcggccgctctgctgcttcgatttgattgttactcggcacgttttccccctagctaccatgcatgatcggaatcatccgatcgagagattgtgagaaagcgatggagagatgtttgttctacactcgatggaagaaaagcttcagggaccgcaagaaaaagcaggttttggagcgcataattggccggacagccagcccaaaagatcaattaattagagtttgtctgtgtatttttgcatcatccatagccttgaaaacaaagggggttgatcgatcgatgtaggggtccatccttgaacacatttgctgcttgatcttgatagctgcgcgtgaggatgcaacagtgatattgctctgctacagtaagggatatctatcttttcctgttactactactcctaccttttttcgagcttttctttgatcgatgaaacgtgttgcaggaaggaaacctggtctctcatgcatgcatgagtagctagtggagtaattgaccattgacacgcccaaatgatgtttgactagagattaaattaactagtgaaagaggagggtgatgcatggaccgtttttatatgggtggccaaatgtcaacgtatataggacttgcgagctgatgcttttgttgatgtcaacatacagagaactttcttaaatatggcaggtacgtataagtataattaactccaattgatgaaatattttatagcacttattttgttgatgtaaatgagagaggaaagagacataggagctggtctcggccctcttatttaattatctgcttaatgaattaatggattattaataggcacacttttcaaactcataaacaatatttttttaaaaagattatggatatgattttttgaaaaattttattttttatttatttgtactctcaaatttattatcacacatcattcatttattcagccattgaaaaagaacacctcatgtgaagaataaaaaataaatgtaatattaattaaataccatcatatctctcttgtatttgtatataatataaattctaacagtagccatctcaaccattttacttgccttaaaaaatgcatagggaatatccagtgttaaccatcaaatacgtaaaagcatgtgaaattcctggtcatctaaattttatccttttcctctcctaagtaaagttgagtttggacttgagatgtagtcgtagcgtggtagtgtagtttatggttataccaatcacttagtaattttatcatggatttggaaaacttttaggtctggttttatttgttttatttgtttgatatttttaatatatattatctcctctaattgtacaataaggatctttcaggccaagtaattagccttttgtgaagaccataatgcaaacctattccagatttgtaccacaaacaacttgggaccattttattccctcctacaaagcctacctaattaatctatgcgtaaccttaaagttaactctaaacaagtacaatgccacccatatatacatggatcgatcgatctcattgctaatataagctaataagcattatgagaggccccccctagcttgctagaatcttaccatttctttgaccaagatcacgaccgcccaaaaagaaagagctccgtgacaaagctcgattaggcagaggttaattaactatagctatacttatacatttttttcgctattaagaaactaagccgctcgtgatggcttgggggaaggcacgtgagggagccgtgctcttggaccacgcatattgctacttgatggttttgtaatgccctaagtacatcgaggagggctaaacaaatgggcagtagtaaattaatttggatgggaaagggggacatttcaaacaactggcatatgtttgcacgagtatttattttggaagatagtgccattgtgtacgtttttaatgccaagggtgacgattatgtcatgctactggttttttaattccatctgatgttttacctcacggtaataatatagcatagtacttttactccatatatattatatactcttatcaataatacatcatctcttttaaaatataaacatttttaagtgcttattcacctattctccatcataatcaatcgtaactatcttttatttagttttttatctagttttatttaaccaatcataattgtttgtcacctcaaacttatcgaaaaatggttatggagtatgtattgtgttaggggtaaaaataacggagagtaaaaagacaaaaaaaaatcgaaatgccttgggaaaaaaataacaatattatcccatcattgtagaatgatagaggcagtaactctcgtgcgatgagagtgaatatatctgcagtagaaatgggcgttaggtagcccgccaaacacagcgggattaccgttaattgagctgatctagcacggtttacccctactgtttgggtgaacattctctctcgcgtgcagcttgcagcgagcgaacggaggtgatatggtgatatacaaaagctcttctttttacggccttgatttaccgagtctttactgagtccgggcaaaagaaggcaaagatcgagaggttggagaaattgagaacgcacgcaacgtaccggaggcgaaaagcggacagcgtacgggcgtggaaaccgttcggtgttccgatcgggtccctgcaggtccatccctgtcacaccttggcgcccggcaagctaggttctgtaaattaagggcagtttttaacaacggccacttctacttaaaatcttcatcaagaaagatggttcagattcaaacttagattgaaatcaactatagtcgtaaaggttagaaaaataaatagtaaccataagctagaaaacccaatctttataaataaatactgaggctgcattctttgctgagagtttacaactccccactctcgctttccacgcatatgtttttcaaactgctttctatatgaaagttgcttaaaaaaatcatattgatccatttttgaaaaaaattagctattaattaatcacacattaatgcaaacatcgttttgcatgccggggaggaggggttcctaaccctttctcccgaacacagcctaattgtttcttaaaattttaagctcatgacctaaatataggagtttagaaatatgggctctggcggtaaagctgcagttgaaatatatgaagcaactttatatatatatatatatatatatatatatatatatatatatagcactaaatgacaacctgcacaagagactccaatcaggtaggtatataactatatttatctatataactctttatctcaccaaatctacctgcgaccacatgcggttgcatatttttatctttgtctcatgcataaaatgtcaccaacacaaaatgactgttaaacagactcacctttagaacaagacttttgtagagggcatagagatcagtgtggggtcgtgcgatctttatcaaagaggaccaccctagaaaggcgtgacgccatctacacaaccgcggcaaacgtgtccaaaagacagactccttcacacatatacactcnctctgacagagagaaaaggcgagttagatttgtgggtcctcgcgcgcgactggccaacctaacatgattgttgctgaaggaggccggaactgataaagtgggtgggagcgcgcgctcacgtatagatgtagatatatagatttcgggggggtacatcccttgggca

SEQ ID NO: 17259 - DNA, 13313 bp, Oryza sativa
atgcggaatgacttgcttgatggtacagtagttcatcataaatatttttaaaaattaagttttaaaatttaactttttagctatacggttcagacatcaaccagctgagctgcctcgtgatttcctttccttttctttttctttttcttgaaaacatactaattccactacaccgcactattttgtcaaacccttcgtcatagagcatttaggtctttttcggaacgcagaaattttagaggttttttttaacataaaacagtttaactcctccaagattcccgtgcaaaatcttccaaactgaatggcccttcaagttatatatttcctctaaactgcacattaaccttgtttgagatccaggactcgtccgctttgctcgtgtggtctagcgtgctaatcttcaaccatgattgatactcctgcgatcttagcctacggtatttcaggtgcatgtgcgcaacaaatatatatacacagatatggaccgatcgatccatgcatacgtgcgtctcgcgtggctgcgattccatggcctaatatcttaattagcgcaggaagatagtactactacttacttaccagctaattgcctaatttccacgcccagtgagcggctggagctaagcacgcagctagtagctaacaaactcatatatcaatcaaaactgaatctaacacaaatatacactaacatatactccatagtgcaatgataagagatgtgtgattctaactccaaggtaccataccgttcccaatacattcacattttcttcttaattttttttagagacgtctctttctccaaatttcattttctaaaactgaatctaacaccaattataagctctagataagtgatatgaagctatcggcatatcacacagtgtcactatgctacgtacctgccgttcaatgtgtagggaggagaacgatcgaacccaccaaatgttggtgttagttgctcttgttgctattgtcaactaccggttacatctatcagttcatctcttgcacaaacacaacgcttgtcctggttgatctataggacaaaatggtggtttcggcttagctattccagtagtactttcttctcggaaagataatgtcttttgaatcttctgggtaggaatcataatccttcttataaatgttgttgaatctagtagcatttggagcaactttacaatgcaaagataccggcaccctacattaaaggtaaaaaaaaaaatcccccagacaaataaatcttaccagctacagtaccacttactactgccacagctatacagtaagatctctccttaccatcaattttgccggtggttagagcagtaaaatgactcggttaaaaaaaatatggagcagtagcagtaaaaatcttcaaacaagtttccctttttacccctgggtgttgtactactagtacttggggcttgtggctagcctttgcccccaaaaggaaaaccatcccggtttcccgaacacgagccgcccgcgacgacgacgcatccgccattccaccggcgacgcgacgcgacgcgagagcacgcgcgcgctcgcgcggggcgccaccacaacccgcacagtgagagagggggggatgcggtcgcttgctccggtagctgcggctgcggcggatgagcgggggagcaggagggggcagtggtaggaggtggggatggacctgggtggcggggtgggggtggtgatggcggcggtggacgggggtggcggcggggagctcggtgggggagggttgctcggatctaggctgatgaagcacgggaggggcaatgcgggggaccaggagcacgaatggaggccgccggcgaagcaggcgaggggcggggacgcgtcctccgccgcggccgccgtggcggccgcggcggcggtgtccgaggcggtcaaggtggcggcgccgttcctgctcggggcgtcatgtagccccggccatggcggggagcagatgctcagcttctcgtcctccgcctcgtcgtgctcctccggcggcggtggcgccgccgtggccgctgcggcggcggctggcggggcgatgccgctgtactatggcacgcctgcttcttgctcaggtgaggatggtgcaaaaatcttttcgtttcctttatttttttcttctttctgttctgctcgtctgattcgatttggtgattgaaaagctttctgctccttttcaagtattattgctgtttgattcatctctctttgttatagatttattttccattttttatgctacttctctgcctttttattcgttgctatgcatcatgcttgatccttgctcacactgggatgggatggagctgatttagttttagtttttgtttttttcccacttggttcttttactattgtggtttagattcggatttgcatcttgtattttttttgtttcatatttctcatttttttgtctccttttgactagatcactgactgcgaatagctcacttcctctgaaatagaccagtttattatctttagcatagatgagtgtgagtataaactagttcttgattttttcttgatactggagtataagtttcctgttcttttcagtgacatccacaaacgctttcttgtcctcatcggtgcggatcgggcgtattctctttcgtcataccttttgccgaaactaaaggagaaagcacatatatggatgagaaaagtcgtgatctttagcattatatcactactatttctactacgtttttctcactagggaagaaagaaaggttaaagtaggaaaaataaaaacatgcaagaaaggtttcaagtaaacaatgcggcaaacgcgaatcaagctttgctgcaacggatcgaacatgtggttggttggtgactttttatgcacacgccacctacaaatccgtgctgcttctgatccttgcagccactttgcttcagatttttgtgtcttttgcttgcccctatctatgttatatcttgcacaaggatcgtgtttaggaaacacatgcatctggatggtggtcgtcgtctcgtcttctataaagtacatgtgtgttttggctgtgccttgttggcttgcactgcctagcttgttgctcatctccttggtgtatctggctgcaggattgagctcagtgagcttgagcagcagcatgcagggtgcaatggccagggtgaggggtcccttcacgccgtctcagtggatcgagctggagcaccaggcgctgatatacaagtacttggctgcgaatagccctgtaccacacagcctcctcatccccatcaggaggagcctcacatcgccctactcacctgcctactttggctcaagcacatgtaagccaagaaatgggaaaggaagcagatcaaccgaatgctttcttggctttagttcctttcatcatggactgatatttatgataaaagctgttccattccctgatcttggttgcattgcccttggttgggtttttgctttgcagtgggatggggatctttccagctgggctactccggcagcgcggatccggagcccggccggtgccgccggacggacggcaagaaatggcggtgctcgagggatgcggtcgccgaccagaagtactgtgagcgacacatgaaccggggacgccaccgttcaagaaagcatgtggaaggccagcctggccatgccgcgaaagcgatgcccgcggcggtggcagcagccgctgcctctgctacccagcctagtgctccggccgcccacagtggcggagctgttgctggcctcgctatcaaccatcagcaccagcaaatgaagaactacgctgccaacactgccaatccttgctctctgcaatatagcaggtagaatgttggcagcactttcaagctccaaatattgcttttagtcaatcatgtagccaatgcttaagctcaagacgtcaagtttcgcttttgccattttgcatggatattccatttccgtacatatttgcctgccggcatccaccaaataataaagatagaaggtaatttagttacctagtttatttagctaccatgattggagatgagccccaaagataagctattaatcatttaccagcaattaaacaagtccattatttacattgctcatctatgtactctggtagccctaaaggtacttgttttgtgagtagagtggccgttgaagaactgccatactaaaggaacaactgctatatgctgtattaactacttcactaatgaatcacttgttgatcaaacttctacagggatctggcaaacaagcataatgagagtgaacaagtgcaagactcagacagtctctcgatgctgacttccattagcacgagaaatacgggcagcctgtttccgttctcaaaacaacataatccttttgaagtgtccaactcaaggccagattttggcctagtatcacctgattcactgatgagttctcctcatagctccttggagaacgtcaatttgctcacttcgcagagtctgaatgaacaacagagttcagtttcccttcaacactttgtggactggccaaggacacctgcacaaggagctctcgcatggcctgatgctgaagacatgcaagctcagagaagccagctctcaatatctgctccaatggcgtcttctgacctgtcatcagcctcaacatctcccatccatgagaagctgatgttgtcaccacttaaactgagccgtgaatatagtcctattggtctcggttttgcagcaaatagagatgaggttaaccagggagaagcaaactggatgcctatgttccgtgattctttgatgggcggaccattgggagaggttttaaccaagaataacaacatggaagcaaggaattgcctatcggagtctctgaatcttttaaatgatggctgggattcaagctcagggtttgattcatccccagttggtgttctgcagaagaccacctttggatcagtatccagtagcaccggaagcagtcctagactggagaatcatagtgtttatgatggcaacagtaacctgcgggatgatctcggttcagttgttgtaaatcatccgagcatccgcctggtgtgagcttcttgatcaacaaaaaatgcaacaagatgacaggcatgaggaaacgattcaatcagtcttcaccttgttacatatcgttatgacgtcttcaagtgtgagcatttacctcggtgctttgtcattcagactaatcttgtgtttttggtatttctgctctgttatttttcctttgctttgtaaccttcaccttggatcttgacgtgatatgacgtgtggtatggatggatttggtactccattgtggcatatcatcttaaaatatcccatgctgtgacgtcataatcgcggatgaatgtaatccgatccttgtcttgctttctggtagtattcaatggattgtttgtgagctgatataagtattcctcttgacttcttgatgcttgttggtaattttagttggtccatgcggcattcgtgtagtgtttcactggtatttcgtgtacggactgttctgtttgtctcccaattattggaccatatattcggtgtatactagttttgcatagtacttctactttgtttgcagtcactaaactagacaaatgagaactatagttaggtcagtttggacgaggcaattggggtttttttttttttttggggggggggggggtccttgcgattaaatctgtgcaaaattctgaccaaatagtttagcattgctttttggagcctgagggcggtctttcttttcccactattattgacagagtggactagtggtctaatccagttctgattgtactcccaaccaacagcctcaccagaatacaatgatacaaatttcaggaccattcaccaccagccttttcttcctcttttaacagctgccaagccctgcaaaaagagaccagcctccctctagcttgtgtaactacccaatgttcatcactgcatgcatgcatccatggccagcctctactccaccacaggcagcaagcaagcactgtgtggttttctcccttttgatgatttgctctacagtagcctacagtagaatgattcatcatcagcagcaatagcagctagctaggcttgcagttgcactggtgtgcaagatgagagccctgatgccatttgccacctgctttttatgcacccagaagactcaaaagcgatccatgcattgcataccacacacatggatggatagatgatagtagtgttcttcctccaggaatgggctgacctgggtgactccttgattgctcacctgctagacatgtcaatatttttatttttttttcattttcttgtgcttattttactttgtttctcatgcctattctgattatttgaaggagaatgttcactgctggatgcaaattactggttttgtttggaggcacagaaagggaaaatttttgacacagaggggtttccccgtttttcctgcctgcccgtcacgtgtgctcgctagcttgtgtttggacaaaagtcgcgcgcgtgcaatacattactgaaaagcaatgcactcgtgtgtactagcagtacaggtaaagaatgcttccgtgtttatactatccgaatgttttcgtacttgccccagcattagtgtgagcttagccgcactatcaggtacaggttcacaccactgccttgtgtcttccagaaaacgcagtactagtactacgcatgagtcacagtgcggctgcatttcacggacgttcttgtgttcacgagaccgactgcaaacgccattcagaaaacgacctgaaccgacgccgaaatcgccgagccgatcacgcaacgcaacgcatgccaaagcagtagtcgatcgagccgagtcgatcgctcgcgttgtgtgtggcgttgcagagtacgtgtgcgcgctgcaccacgtagcgatctcacgggcggagcagtgggcatcggagtgaagaggcgcgaaaggaacagcaacgacacgtccacgcctccttgctcacatgccaaggtaaagattacgtgccaaggtcggccacggtcgcacgagagctgagtacttgatcgtcgcgtataaaaaacctcgacggcgttagtaaaaaacttaactcgtcgatcgatcgatcggagtgagccggtgaaacgggagaagaacacgagatgagccggaggagcggcgtggcgacgagccgccggaccaggcgggccgccgagcaggaggtgcagccgccgccgctgtttgccgcgaacccgatcttcctgtgcgaggacgacggctcggcggggcggctgatcaaaccgggcggcggcgtacgcggctacgggccgggctcgctgcacgcgctcgtgcgaggccgcggccgcggccgcgacgtggcggcggacgacgacgacgacgacggtggcaacaagatgctgccgttgccgctgccaccgtgcagggcccaccgcgaggggcgtggtgggacccgggttcccacggcgtggcacgttgggcccacgatcgtggtgggcccgcatggcgcggtggtgaggatccgtgcgccgccgccgcctcagcagcatgacccgttcctggccgcctacgtggcgtgcaccaagggccgcgccggcgccggcaacaagaagaagaagaagaaagccaaggcggccgcgcgcggcgggtgcggcatgtggaacgggtgggcgtcgggcgcgaggtacgcacgggtgatgtcgtgcaggcacggcggtgccgtaaccgtgctgcagggcgccactcctcttcccgccgtcgccggctatgccgagtcgccggcgcaccccacgctggacctgtcccgcctgccggcggtgctgccggggaggagacgggtgcacaactgaggacagatcgtgtactcgtacgtggccggtgcatgtgtacattgatactactgccatgacgtcgtgtgcaaagaattaagaaagtagtagtccatatttgcccaaatattgtcagtccaaaaatataatgggccgtatcagccctaaaagtaaaattttagcccaaacagtagtatgggccgggtcacaattgtcaaagctttacaacgcaataaaatctggatgtcaatgtcatatcatatgaagaccgagtcaaattagccacgtatgcgccacgacagctaaaatcaccgtccaaacatattgcaccgttttagacagttgagggacctgttgtatctgattttttggttcaaggaggagaatgttaagttaagggatctcagatgaacttattccataaaatctcgtttatgattcgttgggccacggattgcgtagggcgcaaagtgcaccgccgccgctacatccgagggtgcttcgtgccttcgtctgctcgcttcatctgctgggcggtggctcggctgctccggctccggctccggggagaatccggcgtgagcgattggggagtgggcctgcctcgacggcgttgaagcgggaccgccgggatgtcgccagccgccaccttctcggcgctgctccgcgggctgccgccgccgcggggccggcgcctcctcgtcgccgccgccgcgcgagcgcacagcacggccggcgggagccgcgcgcgcggtggcctgccccgtttccattccccgacgctcccttcgtccaaggcaagcgcgcgcttcattcattgtcccctgctcggctgctcgacacgtccatctgggtcggcgtggtcatttcgtcgagcacctcgtgctcaataggttcagcatgtcgtaagctttcttggtagttggtagactatgaccactagagaaatgttcgtccccgttgtcgtgggaagacattgtctgtcgtgtagactgtagagtgtagagcgctgttccttcacttaccccataggcattttgccgatcaggtggtgtgcgtgggttttctgcgtgatgttccattccttaatatcagctgtatgcctgtatctaatataggtatttcctttcagggtgaagaggttcgaatccaaggagacgaattctggcacatgacaagagtcttgcgccttggcataaatgacaggtctgtcttattgctctgcatgagtgtaaatttgctgcggtgaattccagcttcaattcatcaatgctagattatttagtagaaattctatccaccgctgatcctaagagtccgaagtttggaaataatttgattgctgcatatgttcatatgataagccatatgtgtaaaattttcagcttttacttcgaggcaccaaatttatttatttattatgagtctgattactatttgtgtacatattgaaactttatatgaaaacttggaagggttgaactatttgatggcgcgggtggtttggttgaaggatctatacaaaaagttgacaaaggcggttcagatgtgaagttgcttgaggatgctagactcattgctcctgatggcattcaatggcatgtttatgctgcatttggtgagtcccataaattatgcgcacttactgtgaatacagggtagttttcttctccatagcttaccattttataattccattccccagggacattgaaaggtggacgtgcagattggcttgtagagaaatgtactgtatgttatgtacaattttgggtgtcttgtctcttcacaatctacttctaaacattattttactctttctctgtttaggagcttggagcttgtagtgttacacctcttcttacagagcgatgccatacaatagcagaaaatagagttgacagattgcaaaggcttgtgttagctgcagttaaacaatgtatgtgtctctgttggcaccaagatttcagagcaaaatgaactgaaataaattgacagcattactcttgtttctttaggccagagaatacatggaatgttgctgaatcccccaattcagatagctgaccttcagcctgttgtaagtgttcacatatgctttattatctttgcacataacattgtaactttgttacctagttcatgcattggatagtaagagttttgtatggatccagtaacttgcttttttataaagtgggcaagcatgatattgacctttgttgagcaaatgttctaggtcaaagcgcaataatctttagtactgcattgtggagtgaatggtcatgatgcattgtgcagtgaaaattttgttaagaataaaacataggaataaaattttaatgtatgtactagaatgtagaactaccagagtcattattgcatcttcttttacaccacgatgtgtgattgacaaagtcatattattgtgttatctatcatcaggtatcacagtcaaagctcgctttcgtagcttcagcagaatcacctcctcttttaagcactttgccgaagtcctgcaatgaagaaagtgggcttttgattgttggaccagaaggaggtaagtctaactatagattagattcatgtctaattattaaaataataagatcattggttagggtaaacatgtgattttcagtattcttgtttcttgcttgtatcaaatgtgcacttcacgattttgatgtgatattagttgtctgtgctttatgaagtgaatgctttatgtagggccaaaagaaaaacacacacaataatgtcaaagatatgttcttgcagtagcataatgaacagtagtaaatttatactggtatttattaatgcagttcagtagtgggattacatcgagtttccttaagcatgctagattttaaaacacaaaatataattttgaggattgaactatgcgaataattaatggcttttgaatttggcccgaaaaatctggggtccaaaataaaccaatgtcagtagtattatttcactggaactaatatgctttgttttctcaacctccatttcatcagatttcacggaagaggaggtaaacgttttgaaagcatcaggcgctgttcctgtaggtcttggtccatgcagactacgagttgagacagccacaatttcactgctatctgcgctcatgctgtggtcagatgctcatcgccaggaaacactgaaatgcaggtagtcaatgtagagctgtcacccatgtgctactttatactcgcattatgtccaaaccttttgaggtgatatcctcttaagcaagacattttaaggtgattttctttttgcctttgaaatgtttttcaaaacctagttgggcttatcaaggagcaaaatcaaagagaatcgttccactggatctaagtgagcatctctgtaacagcatgacaattatggactggtcagtggtactaacaaaatcaggcaaaacgttatggaaaagaaacaaagtcgtcaatttgttgatattataggtcatagttgcatcccgttggttagtcgtatgttgtctcgctcgcatgaatgtgacctcgcagcatatttggttagtacaccagcagcagccacccttttcgaagacgatcatagaataaaaatgatgatgaattatggccttgatctcgcagcgtattggtcgaatgtggctgagacagctagaaagttttgtcatgttgtgatggtacactgagacacacgaccatcagtccagataagttgcatatgctacatattccgttcgcggagacgcgaagctgttcaaacagattcgcaagtattttttaagctaggaactcgtttttttgcataatttgcccgtggttttatcactttgtcatgtgccatgtggatgtggaacagtggaagtgcttttgaattttgctgcatataaacaaagaggtaatcatacgcaaaaatacaccttcgcgctcatactgtttcggtagcatactagcatgtgttatgctttttcatggtcattcgatctttcgaatttgtaggtgagtcgtttttaaacttgtattttgtgtagtgatatataatagtgtataatgttattttttttcttcgtaattatttaaatgacatagaaaacaaacaaatttgctacatatttatccataaatttttttcttaaaaatttgacagatgtaattacagtacaatcgtaatgtaattaacttgcatgtaactttaatgtaattttgaaccgttatatttgtttcaagatttgtgcaaatgaggaagggaaaaagtcacagcacgcacacagtgagaggattcgttcccacaacctccatttcaccgaaatactacatccgtcctaaaatataagcatttttttttaccctgacacgatctgtaagatgctactttaaccaacaatatctataaaagtaagatgttttaaataaatatagttacatattatgatagtttgtttaataataaatctagtagcattgattttacatgattggtctttttttattttcttgctattaatagtccaagttgaaaatatttgacttgtcaatgtgctaaaaatgcttatattttaggatggaaggagtagcatgttacatggagatttttgaacgttacatacaagttactccatctgtcccaaaatataaacatttttagcatgtgacaagtcaaacatttttaactttgactattaatagcaaaaaaaaaaattaatcatgtcaaattaatattactagatttatcattaaacaaactatcataatattgtagttatatagatattgttggtcaaagtagcatctcgaagaccgtgtcagagtccataaatgtttatattctaggacggagggagtatattgtagttatatggaagttatagtgtagttacatcacgattatactataattatattgtcaaatttttttaaaaaaatttatctataaatgtatagatgatctaaaaacaaaataatttccctcgcggacaaaatgacttgcccataaatactgggaagagaagaaacccgcacgctgcatcttcacacacagacacatccacgttccccacgcacgcgcgcgcaaacagtcgcgtttcggcgtgctgacgtcgccgtgcgccgctgcagccaccgcccaccgcacggcgcacacgccacggttgcgcggatgtctctggccgccgccaccaaacgtcccgtgcaccacccacgcgcggcgccgcccccatccctcgcttgcccacgcacgcacgcacgcacgggcgtcacgcccaccgcaccggcgcgcacgtctcaccgctttctcgttgcgaccgcagccgtacgttgcccgttgggcctttgtcccccgcggcgccacgtttaccgcgtcagtcaactcgcgcacaaacttgcaggttaaccgcctccgcgccgcgttgcggccatcgcacgtacgtacgcgcgtacagagagatccgcgtcatg

SEQ ID NO: 17260 - DNA, 745 bp, Oryza sativa
  unsure (1)..(745): unsure at all n locations
cctcgaagggtaccgngantgnataaanncanccnngagtncangnacatngagactgtcattgatggagacaagggggagaatgcccaggtgcaggtctcagtctagcaggacaaccgtgactttgttatccacaatggcacaggcaccatcctatccagcctgagctttgatctagagcaacaaagcacctacacctttcaactgaaggcagtggattgtggcgtcccacctcactcagcttacgttggtgtcaccatcaatgtgctggacgagaatgacaacgcaccctatatcactgccccttctaacacctctcacaagctgctgaccccccaaacacgtcttggtgagacggtcaaccaggtggcagccgaggacttttactctggtgtcaatgccgagctgatctacagcattgcaagtggcaacccttatggactcttccagattgggtcacattcaggtgccatcaccctggagaaagagattgagcggcgccaccatgggctacaccgcctggtggtgaaagtcattgaccgcggcaagcccccacgctatggcacagccttggtccatctttatgtcaattagactctggccaaccgcacgcttctggagaccctcctgggccacagcctggacacgccgcttgatattgacatttctggggatccaaaatattaacgctccaagcaccgtggcaacaatctcttttgtgtggtggcttatgtcgttgccctct

SEQ ID NO: 17261 - DNA, 12411 bp, Oryza sativa
aaataaattgaaaacaccaaaaaaaaaaacttgatatcataggtagtagcagaaagacttgatattttgataattcgtggattaaaacgatcattgaattcatctgcaatataatgtattcaagcaaaagagaagtgtaagaatttgtaaccatgcaaaatgaaatgggattttttcgcaggcacaacgatccttttgctctgctactactgatatgctttgacattaacatccaacaatctagtggagaaacaaagatgaatttgcattgtttggctgacacagaacgggtgccgatggagccacggaggagcggtcgatgcagcatcgccggaggtggcagtggcagtggcggtacgtactccctcggcgatggccttgctggcggcgcgctgcacgtcgggcagctggtggtcggagtctggagtggagacgacgggggcgagcgggacgtggagcagccaggcagagttggcgaagtcgaggctggcggaggccccgcacagggcgagcatggcggcgtcgtgcgcgcgcggtctccttgacggtgtcgaacgtgccaacccagagacgctcaccgcgcgcggctgcccgggaggccgggacacgcaccttgcacacccaccggcccgcgcacccacgccgccgaacccccggggaacactgggtgcctcgtctcctggaacttggtccgcgccgccggccgcttcgacgacgacggcgtcgccgtcacggaggaggtcatcaattggctggtggcggcggtgttcttctccatggcgcgtgcgacgtctcaagcagttggttggtgttggcggcggcgacaacgggggcgagggcgtccgcgcgtacctcctccgcctccccgccggccacagccgcgcgccgccatcaccgacggcagtgacttgatggcgtcgtcgtcgagtcgatctcagtgatgatggccacagccgcgcgctgacatcgccaaccgcacgagagggatgggaaggccggcgagctcgcgccgccctaagcccgcgcgccgccaccctccagccgtgcatgccgccgcctgtgcgagagcagagagcgagagggagtaaaggggaaagatagcatgtgcttacgtggacacctaacatgtagggtccacgtgggtcccacgctgactcagccgtcacctgggacaaaactggggacagaaccgctgaagaacctagtttgcactggttttgtacgttaagggatacgttgtatccgattttgcggtcaggggacaattttgtaattcgatgacaagttgagggaccttcggtgtactttttccattgttttttttttgtcttttttaagggtctggtttcactgtttcaggcagccttgaatgaagtttatttgttacaagctctgtttcaaaatataacaaattctagcatttaaagtttatcttaaaatataacaacttcttctcctacgttcttttctcgatcaatcacaaacttctaccattcaaattctctatctacatactattctcaatcagtaataacttttcatcaccatttaatttcactaacatttttaatacatgtgtctaatgttagaatcattatatttatttttgagcggaggtcgcagtggataattattattcgttttgcatgtgcaaactgcaaagccctctagttttggcatgtctccaatccatgtattgatatattatggaaaatgcagtttgtaaatttaaataatgtgatttagtgatctaattttagtctcgaatgtcaacaaaatgtctttgtcgtcctaattatcctactctatttcatactaaagtttaaattaatttttggagctagagacatcaactcgaaataaaaagaaaatccttgtagtttacattttttttcaataggtgttttatatatgattctaaaggaaagatagacgagggcaatgtagaatcataatatgccatggattgtctgtggtaggtaacgtttcatttacgtcatgaaattttttaatttatatcatgttttgaaatctatgatgttgacatgacggaaattcattcatcacctattgtacatcttctttgaagaaaatatttgttttctgtcattgagcttgtgatgacccttctatcatcattgagcttatgactcttattttcatcactatcgaacctaagaaacatcatcttggcctataagggcaatatagtatcattttggactatgctcaattgtaagctcggctagaggtaagcctagtccatctgaaacatagcaattgacacactgttgacatgttaagggccatgtagtgagcaatctacgtatggctaagtccaattgcaagtccggttagatttaggtctgacccatataaggcatagcattttatacactacttcaatccaattcgttaatccatttgcagtagtatcaaatactcctgcaaatggcttaacgaataggctcaagcattttatataaaggttataggccagttaacatctaataaatcctagtggacatctaatacaatggccaacctagccacacgtcctagcaggtttactaacaaaaaaaaacattataagttcactgaccaaaacagaaccggttcagtaacatcagcatgttgaccatacatgcctttggtagcaaaataaacaggtccaatacatcattgaccaaattgagccacaactcactgaccaaaacaaagtcatgtccagatcacaatcttattattaatatatggaaattacttggaaaaagttcgtgttttggggggtaagtttccagcatatatgaactttcttgtgtatgtattgccaaaattaatgtactctgattaggatccccataacctattgtatgtacaatattatggtttccattcattttgtttgttttgcaaggctgtatccctaaaggaagggctggaatgaacatgtgtatcattaaagatttcaatcaacaggtagcttgccaatcccagtagatttgcgcagaccgggatattttattccattatctaaaaaaataaaaataaagtaaagatgggctgagatgctcaatgaagataacggaacgcaatacatgttgtattgtatttatattgcattcacataaaaataaagtaaaataattaatacataagaacatccaagatatagaatagggtacatatttccagagctgcctaaccctagccggttacaggatggccagagcaccggccaaccgcgcattgcatcacatgctgcagggaaaatcgacaaaagtttgaccgtgtgcctgtgtacaatacggcgtcgacattggcactgccatagtcaccggtgtggcaaatgggtcgagcgtcaagcgacaagcaatgaagacgaacagcagggctcaggcaaaagggcacgtaatcataaaattagaagatgaaatgacgatcggttgcatcatatttgacttggagcactttatttatttatttatttattttatgaattgttttattgcctagcaggcgatggataatgtgagtggccaatactaactacaacggaaatacatatttgttttaatattatagagacacttttttaaatgccttgtagaggcattttcaaaaatttctcataagtaccttagagtgaattgtctctgtagaggcattttataagatgtctttatgtcttgtggcatttttatagagatattcttttgtctacaagagtgtagaggtattttctagagacattaaattataccacaaccatattaaccaatgtaaaaaaagagataaaaatattttcccttgctattaacaatccttgtgtttataacctcttgggtaaatcatttttatcttccatacactaaccaactcaatttcatgttatatttaaacatttgtgccttatgttatttatatctattacttagtatatattaacattataaaaagtgattctatagagcttaaaatgcctcaaaaaataattttacataacatgcagtttttataagtgccaaaagaatgactctataagataaaattaaataaaatatactgaaaatatcttgatttcaaagtaccaaaagttttctaggcacaaagtgccactaaaaatataactacactataaaactcctgattttaaaggcaattcaaaaagtgtctctacaaaagtgtctctctatgggggttttgttgtagtgactaggagggagttgtcgtaactttgccaaccgaccaaccctgtccaatgggtatatatgtccacctgtgccagattggcacactacatggatacattaacatgaagttaaacctgatagtcagcaaattaaagtgtctaactggtgtttgtctaccggcagttcatttttttaaggcttcaaagaacagatggccggtatttttttattcttgtgttctaaaggagtacttgctaagaaacccacaaccggaatagaaaccagacatatttaaggtccaccccacatggcagacacaccttttatcttatattgcaactttgcaaataatcaaatacatgttttacacttattaaaaaaatcacacccaaaaaatctctctatacatatttgtgaattgtgcgatggctcgaatggagctaacgtagattccttttgtccttattgatcaagaccagcaactatccttctcctcgaagcaatcaatgtttcaatctcgttccttgttgcatctccattaccagatctccgtagagtcgcaatttgcctatcgatgcttctcacctgtatagtacaaataaattaaattcatgtaatcgtgagaaagtatttctcaaagtttaatctcaaacaatattttaaataaatacgccatataattaaaaaataacggttttggtagagtgggatttattctcagtgttatttcttgctaatatatagacgacaagactttacaagtgcacaacatagtgttcaacatatttgtttttcttgatctttgtcacaaaatagattgaaattaaagtaaaatgatctagctgacctttcgatatggccagcgtaatacgccatgtttacgacagatgcctttgagagcagtggcacatatatccagctttttagcagccttggcgatgggtagttcaaagtagggggcaatgtcgctaagctgaagctgcttagttttctccctctagaatagatcaaatttagttaataacagtacacatatagaatagtaatgcttaattagaagtattttttatgtttttcatggttctgatcgattgtgtagataactggaatttcttatagtaacttttggtgttttgccgtacctccatagtgtgttgacaagaggtacacagattaatacacataataaaaaaaaatattatgccacctctcagtaccttctcaatcccctactcatcctagctactcattttcttagagcatatcatatcttgatatactttattctcgaatagatgaaatgcatcttaatattttttttacggggaaaatgcatcttaatataactgtagtaaaacttccaaatcttaaattattaataattaatgtaaaagtgttaacatacatattggggtatatgtgaaaatgatatgagtggatttgccataaaaaacacttttattcttacgtttaaatactcttttatgaatatatagcttgaaaatgtgacgatgaaaaatgtctattaattgaagactgtgttgatatccaatatgtcgtagatatacagcatcatttttttctttttgtttccctcaaattttgataaccattatttcttcagttacccagttaagtaatagagtgaaaagagtatcattagatctatcatggaaagaaaagtactttaagaatgcctaatatatgtttgtctatctgcacaaatatttgtagagaaaagatgagtagttcaataaattaaaagtgtcaactctatcatatatttaaaggcaaaatttgctacaggacatccgagaaatatgtaattagctatgagacatcgtaaagacgcgactttgcctgtggacactccaaaagtatggtaatttgctgtaagacactagatgtattaaaatataatattcacccaattgatgattgagaaataacataaaatgacagttttgccctattcttattctccgttctctctcggtcttcttcgacgctcctctcacactactacaggattgattttcttggacgccacccccattttgtttccatgcggtccgtaagttagaccgcacggaaaagtggggcgagcgaagccaggttctcgcccgcacacgaaaatcaattttcgtgtgcgggtcacttaacaggcccgcacacgaaaataaccctattttcgcatgcgggcctcctaatccacccgcacggaaaaatagcgtccctcccatcctattcaaaataatttaacttccttctcttccccccggccccttctctcctctctctctcccttatcttctcacattccttctcctccactcattttcctctctctctcaccttcttcttgtgcctacttctccacaggatggacggcggtgagctcggcggcggcggcggcggcgcaggcggcacgggcagcccgtggctcctcccctcccctcccctccccggcgagtgcgcgggcggtggatccggcgggcaggcgggtgacgacgggcggctgcggctcctccccggcagcgacgggagtgcccgtccctgcccggatccgacggccagccgccctccctccgccatggatccagcgcaggagaccggcgggagcggcggggacgacctgatctagggttttctgtttttttctgaaattttatttttttcgattttttgtttttgcatgcgggcaatataagcacccgtttcgcgtgcggttgcgccaccgcacacaaaaatagcgattttcgcagacgaattgctctagacgggccgaagttccgcacgtgaaaatccaaatcgactgcactggaaaactatgtgtgtagtagtgtcatgtccgcaccctgctaccagtgaaatcgcaagccacgcccgccgccacggagagtcctccctgacacggtggaaggagagcacgctgaggagctagctggacgtaccacgcagatgcggcgcgcctggcgccagcactcgcgccaagtcgccagtcgccatagggcgcgaacgcgacgtcgcgcgcggccgtagcgcgcgaaggcgcccagttcacgtgcctgcataaactcctcgatcggccgcggatgccgtcgtccgagtcggagcagcagctagcatcaggccgtgcgccgtggcgagggaccggagcatgcggcatgcagcgcgccaagtaggtggaggcgaccgagcagcagcaggagtccccgcgcggcaacgtgcagcaaagcgtttgtttgcttggttgtagccgcgcgcgacagcaggctcgatggatggctggggcagcacgtagctgacacgtacgtttgttacgttatagcctagcaactccggccagcaaatgggagcaagtgaactacgtactccatccatttcataggcaactgagaagcatccaaagaaaaccgaggaagggagaaaattgttattttatatcgtttctctctcatcaattgaatagatattatattttaatgcgtctagtgttctgcaacaaattatcattcttttttaagtgtctttaggtaaattcacgattttacgatgtcccacagctaattatatatttttttaagtgttctatagcaaattttgccatatttaaaagatagatcggaggtactatattatacgtacctggattgcaagtgcactcctggtagcgagatggaagcgttgttggacgtgatgactggtatgacttgcttgggaaggccctgcaaatacacaaatgtaccaaacatgcatgatggggttagccatggcaaagctagctaggtaattcaactccagaactgaattttaatcgattcatgaacgattatttagcaatgtgctccctccgctccattttagaagatgctttgactttttttttctaaatcaaacttattttaattcgataaaatttatagaaaaatatatcaacatttttcaacaccaaactaacatactatcaatttccagggtttgatttttattacactacttccaatcggttgcttgaaagaacagtaattggaagccaaaacttttttagggtggaaaccaaaagaggttattgtgcccaaagtttgttatattattgtactttgcgtgaaatatatgtgatgtacggcatgaattgaattaaaactcaattgcacaaattatagaaaattatttttttgctaacatgaaaattgaaaagttattaaaacaaatagaattaggttcaatagaactaatctagtgttataagagttactacattttcctataaatttgataaattttaacataggaaaaagttaaatcaacttacaatacaaatatataatataactagctaaatgtctgtgcttaatttgctatggataaaagaaaaatcacaatattttctaaaataaataaaacacattttccataaaaatatgttatccacattttttggaaaatgtggctaccaacattaattttatatgcgactatccatttagatttagttatttataatattaagaagtgcaaggagtaataactaaaaattgtaataggagtagatggtatgacagattcactatcattggagctagcctttaaatttttgaaggagtatagattaagatcacgatcgaaattgcactacgtacatgtgcagaatgcaacctgatgctggcggctggatagcagtagtgtctaggacgacgagtcgacgatcaccactgccattgttgttagttgttgctgcttgatctgctgccacaaggcaacgtgatgattctagcattggcaggacggcagcattgtggacgacgagttgaccatgatcaccattgccattagttctttcttctgctgctgctgctgctgatgacgatgctcttctatgtgcgtcgtcgtcgccgacatggctgctgcaaggcgccatggtggtgcagagggcgtcgtggaacgccgacagcgagtcctgcacgacggcgaagccgccgccggctcgccggagtgcgtactccgtcaggtactgcttcacccagtcgtagccccgccctctgaaactgcgattcattggatggatatatatagtggattaatcaatcgatcagcttgcatcaaatcacttgcatatactacctccgttttaattagatgataccattgactttcgaatacacttaaatttgatcatttgtcttatttaaaaaatgtacattggtatcatttatttcattgtgagttgttttatcactaaaagtattataagcatgatttatatcttaacatttgcacaaaaaatttaaataagacgaatggttaaacgtgtttaaaagttaatgaagccatctattcaaaaaatggagagagtataagatttaatcaggacaagaaatctagagaaaataatgtcattttaggtattactttgagttaatcaatttactcgggtgatgatcttacttgatgatggagtgatgtgccagcgccggagccggggccgaggcgctgacacggtacacgtccagtattgcatggtagaactcaccactagcgacgccgccatgaatgcaaagcttcgtgatctccaaccctagaagttcataataagaacaaccagattaaagcgaagtatctcgactaatgtttggtacatatcattagcattttttttaatattaattaatgctcatcccattatttggcattatttgttttcatccatgatcaacatcgagaagatttaatgtgatgtaccattggaatgcactacttctcttagcacttggcaaccactgcaatagtcctcctgcggcggcgccagcgccggagcggcggacgacgacgtcgacgcgccaccgtactcgccgtcgattttagagcagttattaccaaacgcggtcgaccagtccacaagatcgtcgacgaaggaaccaggcttattaatccggccgccgccggctccgtccacgctcatgtgcaccggcgctggcgccggcggagcgccgtcgtcgtcgacgtctccaaggacggagagatcgagcagttctaacacgtcgaagttgtccaggagcggcgacgggaagaagtcgagttccaagtgctccccacctccatcggcggcgccgttgccgccgtcgcccgccatagccgccggcgaccagcctgacggccgcttcgatcaccttacgaattcgatcaagggcggccggaacggcggcgcgccgtgcgcgagggagcggagtggagatagagatttgagggggcgcgagggcgggagtgaaatggcgggagatgtgtgtagagatgagaaggggtgcgacgcggtggagtttttttttagcggttctgacagttatttttgtcggcggctatcacccgttaacggagatccttactgtctagtatgcgctattctttttttttttgactttgtattaggactgataaagtagggacattctattttttttctttgtattggtttgtgtgagatgggtgaaaaataaacttactttgggatggaggaagtaacaaatatcaccaaagtcacaggaaaaattacacatatactttaaataatatacacctatgtgtagtgttaacctcaaattcattttattttaacttagagaaacaatattacttatagttttaatagtatcaatctatcaatgtttttttattgatgttctctatgtatgaatttaaaaattggattttacaggtagatgtaatactattgaaagtacatgtacaatattttctaaaattttatgatattgttgttgtatttgctagttagtgtgtacggtatcacaaagatttgtgtgtataggatactttttggacatacactcaacatgtgtgtttattgaagtgagtgtatgtatgtcgtgagtgcttacgatttattttgttatccatgtccactgaaaacacaaatatatattcccacaatccccagaattcccggaatggctcacacatttcacatctattcacgtataattcacaatcacataaattccaagcctaagtaatttgcaagtccaatgaagaattggatgtctcacacttagtaatccaaatgataccaacatacacaacacatacataggcatcaaaaattgttttgcacaaaatatataaacaaatttcacttaatcaacagtttttacacaaacatttaaaattgtgcccctatcttgaacggatggtgccttttggattgatgagttcatccagcacaaaggcagcggctattcctactctaatgttatagaagttgtcttgagaaatattcttaattgttgcttgtaatagaggcatcaagttagaattataggcgcatcatgttagtacgaggaaattttttggcatgatatagatgaatgcctatcatggttatggataccacatacccaatagtaatcgactaagctcggtgagcccaccatataccaagtcttatacggaaccataccttgtatatagaaggaattccgaataaggaatgacacacagaattctacatagaaacgacaggaactacttggattgtatccatattggtctccctagttcaacttagatatggggacatctattggtataaatacaagacccctaggaggagaggaaaaagacatagacacacaagccagaacaaaccaatacaccgccaggcatcgacatcagagataagcttagacagacccaatatggtgcctgcggaggccaacaagagggatctagtgtcatatctgatctcgatgagttcgtactcgaggaggaagactaacctgtcgtcgactacgtgttggttatctatgccgccaagtcgacgacaactagataggttatttcaaatattgtacttgtgcgattctgatgaatatagagcaaaaccggctttagccaacaggagtagggctattacctatcagataaggggcccgaatctgtataaaaatccttatctccatctctgtacctcaatctcgaatataccctagtaccaacgatctccataccatgcaaataccgttgttgcgacctcagacgtcgacaatgcctttgtgacgagaaattggacattgtgccactgccaaaagagggtttcgctcaaatgctactacgcaaattggtttcgttaaaaagctactcccaaccgatgcccaacccgttgttttgcgatattcggcatttcacatgatttccaccttttttt

SEQ ID NO: 17262 - DNA, 5767 bp, Oryza sativa
  unsure (1)..(5767): unsure at all n locations
ggtgaccggagcaactaggttcagtggtagagagaggaggaagggagagaagacgggaaagagagccgaaggaggaggtcctggtagtggaggcaacgagccctttcgccaaatcatccgaggagcaatccgccgccgccgcccgagaagaaagaagttgagccagccgtaggggaggcgctaaccgccgatgctgccgccgacaactccccacccgcggccattgtcagctcctagccccgtggccgccgttgaggaggagagcggcgccgcgggagctcctggccatgtagtgtgatgccttcgcagtgtccctgtccacgcagcttgggccgccgacgaggaggaggatagcggcgccgaagtgcgaaaaatggtggaaattctgtgaaatggcgaatatggctaaacaacggtttggcatcattgggagtggctttttaacgaatctaattcacggagtggcatttgagcgaaacccttttggcagtggcacaatgtctaatttctcctttgtgacatgccgctggcctctattataatggatcgttcacgatgcccagttgtgtactagtcgagtgacaatcggacaattaccattttttaaaaggaaagttgggtttaattacaattttaatcggatggaatattgaaagattaaattgtgattgatttggaaaaccttttttcatgtgtattctttaccagtacgtcttatataacaactcgaattttatggcaaacagtcgagtatgaaatgtgtaaaaacccagactttttttttttacagaattcgatttgaacgtagctataccgagatgatgatttctgagcttgaaaaaaaaggatttgtaaaatgagaactaaaagaaattgagaattttctcagagtacaattaaaacttgtaaaccaggaaaaatttaatgttattaattcgaaccagaaacctgattaaaaaattaggaatttagagagaagggaggaccttcgttactgggccgaagcccctatctaaagtgagggaccttcacatcctctgccaatggcccatgctacagcactgtgccgttgagcaatcttagcccttcttttctaatcaacgttatagataaataatagatttttattttgttcttcccgttgaatttcatttctatcatttccttcctcccacgagaaagagctgactctttctctaaacttcccacaaaaattaaaatagcgattaattagttgaacgcaacatatacaaaactagaagatttttttttagctcttgcaacctgtctacatgaattcattcttgatttccgtatgaaagaaagcaagacagagatcaaaagggggaagaaacaagcccatacgtatccagttatccacgatgaaattggtaattaacaccgtaaactggaatactcccttcattgtaaattgatttacatatttattaggtacaccaatatcaagaaaatctaataactctctcatactatatttactctagcaacaaactcgatgcatgcaccattcccactattttctagccaataacaaatcaagatattgcatgtgggttataaatatttgtgtgcatggatgcatgcattaatgtccatttactccaatgcacaaataacgaatagactcaatgaataaatacaaatatgtagataatttaggaataacctaaaaaaactatatgtagatcaatttggaatggagggagtaaaagagtacatgactgcagacattacaacagcttgatagcttggagacataaagatgcatgagaaggatttgagcttcttttgcataaacttaatcttgtccgttcgttccgaaagagcagccatgattaccccaacggcactagcgccatagcatggaccaacggcagaggatgcgaacccccaaagtgaagcccgtccctccgggcacagattgttatggtccttgtggcccaacttccccaaacattacatttgataattacgtttaaatctttgtaaatttgcaaatatattccattttggacacgcaagatcggtctctatatatcatccgcactgatttataaaagtataattatataaatatactagatgaaaccctgcgcattgcagcgggaatttagtatgataacaataaaaaaaataaataacatgtaaaatagctagataacatcagattaagtaaattaatgtggtttatgataatttaaatttaaatagtatatagaatggtgattaaaatgtaaaaagtaaggtggcatgactttatagaagaagaaaagtagagagatagtttggaccgtagattaatcatctaaaagctaaaaacaactgatgtgatatgacttaattagaggaaaaaaggagaaagataattcggaccaaaatcatttaagcactaagtgaggatgaacaatataagtatataggatatcataaaaacataaaaagatatacattgaaacattatgtaaattatattggatgataatttaacatgtttgtatttgaaaatatcttaaattataaaaactataaagatatagcatgtttgcatgatgtttaaatgtgatgattgttagtgaatgatgatgtggcatcttgttaattagtggatgatgatgtggcatcttgttagtgaatgatgatttatcatttttgcatgttaagcttaaggagttagttagaggaaaaaaaggagaaagataatttgaaccatagattaatcatttaagcactaactaagtgaggatgaactatataaatatgtaggatattataaaacatagtaaagatatacattgaaacattatgtgaattatgtgggatgataatttaacatgcttgtattttaaaagctcttaaattataaaaactataaaattatagataatataacatgtttgcatgatgtttaaatgtgatgattgttagtggatgatgatgtggcatcttgttaattactccctccagtttgggtttatttgtcgtttcggacgtgatttcaaaaaccaagaagtcgttaggtagggttgttatttcctatttcgtccctattaaatacagttatgtgtagcatgcaaacaagcaactactactactctctcagttgggttagtgcattcatcttggtgtgttgggtcctgagttcgattcttgctctagacacataccccattgatttttgtcttggcgattatgcatggcaccatgcatgcatgcatgcagcccatgcagcttcagtgcagatagcacgcgaggcggcgagggcatacgaaaattaaaccagccaattttattcaatctgtgcttatgcgcgcgtttttccgccaaaagttttcgtttctgcttatttgccacgctaatttgccgcgcgctgcgcgtgtatttatactgtatacacccgtacttgtagacacaccaaaatatacgagtccacatcaagcaggttgaatagagaaatggatctgaatatggagccacagaatgacgacaattttactgatgagatggaatacggtatgaagcattgtcttttttcttcttttggcgcataccagcttctctgccgtgtacctacatgttcttggcactctaggtgatttaaacttggatgatggacttgatttcaatttggaagatttgattgatttcaacttggaaccacacacagaagatgttgatggtaactagtcttttctttcatcttatatccgtagagtattcttctttgcatcacacctacatgttcttgtatggtaactagatgatgtcattctggatgctgaatctgatgtcaatttggaagctgagattgagtttaacatggaaggtgggattgatttgaacttggaaccacccttcactacaagaaaatatacaattagctaccgtatatttagttaccaagaagtttggtgcctagatattaatcaatagtaaccaacatgctaataccttggttgctgtagttgtcagcacgttacttaagttaaacagtaccaattacctctacagttaccaagttactggccagtacttggtcactagtcacatgacaacatatagcaaccaaggcatgtacctgatatttgaatatgtggagtactggagtgcaaaacacacttcctcttgatccccatccagaaacaaatcgagaggcaagggcaaggtctgcggctggcggcggcaccgtcgacggagttttgcggggacgacgacgccgncgncgncgacgctcggtggaggagtccttcgcggcccctgtgctagcgcccaggaatcggtggtctctgcgacggcagcgcccgagggatcgctggtggtttagctacaacgtcgtcggggcaagcagttgattcattgcaggcagcaggaggagtctccactttgattcaaggtaagtggttaaattctcctgatattctatgtttgcacacaaacaatttgtttaactggatgtgtcttgaacctgatctataacccaaatgaatcctgatctataacccaaatgaatgtttgtaggcactattattcaatggtttttgtgtgagatttgatctgctataacatgagtgtgacttacaaatctggttgactgcactaatttgattagcacacagtatttctaagctataaagaggggaaaataactaggttaaagacacatgacttccacctgcttttgcagcgaatacttccaattggaattcgagggtatttgcagaaagacatttgtgatgcactattacagttaggtagcttttttcgtcaactatgctctaagtcattgaagcttgatgtgctggaaaagttagaagaacaaataatatttgtgttgtgtaaattgaaaatgatttttccacctgcattttttgatattgtggtacacttagcagtctatttaccacaacaaccaagacttagtggacctgtacagtatagatgaatgtttttttattgaaaggtatgtgttgattaggatccttctctttgttctataattttgtcgttgtactgtagtaagtgtatattattggtatgtaggttccttggtactttgaaaggcatggtgagcaatagggcacatccagagggttcaatcgcggaagcctatattatgaaggagtgctcaacattttgctctatgtatctcaatggaattgagacaaggttcaatagggaagagagaaactatgatggagagaggcaattcgctgatcgctactcaatattttcatctagattccgtgcttttggtcacaaggatgacgtaatcctaacacaagatcaatataattccctgtgttggtacgtgctcaataattgtgaagaactgcaagggttcctatagtaagtaaaataaaatgatatttcagtaatagttacaaataattacatagttacttgtactaatatatcacatgtcgcaacaacattttagtgagcatgaggacgttttagaggcacaaggcgtgggaaatatagcaaatagacagcaacaagagtttgctacatggctgcgccaaagagtaagctcacacttggcttcacataaactatatgtccattgtttgcattagctaacatgcattatttttggcaattaggttatagatttgcgcaaggatggttcatcccaagtatctgattgtttatatgcccttgcaattggaccatacaaaaaattacataaatactctggatgtattattggtggagttagatttttaacaaaggagcgggaggaaggtcg

SEQ ID NO: 17263 - DNA, 4319 bp, Oryza sativa
ttgcagaaccgggactaaaaggtgttacgaactgtgaagacgctttctccagcagtggatgtttcaaataagcccaaaatacctccacagacagaaggggtctttttttttttgaacattgacagaaggggttgatgactaattgatcctacactcctattacaggtttctcttcttttttgtgtgttgtatttgtgcattttttaactgtttcaaggtggttacacacaaattttcatacctttaagaatcccacagtaattaaagccaatcagttgccatcccatctaactctctataattatggtctcatttgggcagtttttagaaaatatattgcagactattggaatggagcagagaaacaattaacaaacttgatctatattaggtatagagacaaattcgattgataatcgttgaaagagagaaaacactttcatagaccatggccatgcacaaccgacaacagattgctagcaaagatttggttaaaggttcaataactaaaggggagctctatggttaaaactacagagtacattgaattctatcgtttagtatcttgcaactatggccattaagtcaaggcaggaaattaatgtactaaatggtcatgcatgcagtacataaattagttgatttggagtacgcaagtcatccggcaaaaatttctgcagcgcaaaagtaccaaagtgtacttgtaattatatcatttaatttaccaaagtgtaccctagaccccaagacaactgccagctaagatataattttcgcttacagcaaaataaagacaaccgcaagtgaaaacattttttggattttaaaaaaataaaaatcgtgctcctcaacgccatcgtcggcgggacgaggaggtcgacaaggaggtgggtcgccaattccagatatgcttcccctgtgccatcgccgagtgttggtatttcttaactatattactagaaatataaattcctagcaatagcgctagaaatggtcctgatatatatatggttacagaaggaatccgcaagcgcacgaatatacgattatagcattttacccgagtattttaaggtatcgtattatttaatcccaaaagaagattgtaagagagaactatcactactggagaagtgctcatctctcccggttcgcaaccccctttacccccgggtagcgaaccgggagggagaatccgggactaaagatggcggcctttagtcccggttcaaatacctgggagtaaatctccatctttagtcccggttggtgacaccaaccgggactaaagatggctgagccacgtggtatatataggttcaccgagtttaaacgtgtacatgaccagagctgtttcgataggtgcgtcctctagcaactgctccatacttagtcccgtatctttcaagaagttgcatatctctagttgtgccggttctacgactaacggttcaacctcttgtcacggctgttgccccagctgagggacttcctttccgcatttcactactgaaggcttggctttaagagccttcctcaatgttcgatcatagtcagaaactttgaccggtttgcccggttcggccatcttaataaagtgatcctgaacctctggggctatagggatcttcttttccggactacgtggcttcaactgctccctaactttcgctctaacggcttcatcgagctcctctggagtcaagtcgtacgcccttttcttgagagcggggagccgtggctcgtcagatctggctttcttcttcgcccttgatggtgcgggttcatatgggcgggaccttgacggtgtagacttggcagcaggtgcacgcggaggagtagttgcccgcgggcccgacggtgcagacttggcagctggtgcacgcggaggagatggtggtgcaggggaaggagccggaggagactgacgaggcggtgatggcggaggagactgtgcttgcggcggggaaggaggagcgggtggccgttcttgcccaggaaacacgatgtacttcttacgccagagtatgatggcgtgggctgtgtctccaagtttcttctccccgtctcctccggggatgtcaagctcgagatcctcgtaggttcgttccaccagctctatctcgaccttcgcatatccatgtggaatgggcctgcaatggtatgtactcgaagggtctgtgggtatggccatgcctgacgcgaccttcacaagaaatatagttcattaattactaatcaacatatatatgtaacaaatttcgcatttcgcataccttgatagacaagttcctgaatggagtatgcatatcgcagggtgttcgctacgtgacatcatcaacggggaagtgggttgcttcgtgagctgccactgcctcaatgccctctgatccaacttggcccgttgatgcgcagctgctgcggttgcccgaggggctcaccatgacgggcgcttgtgtttccattccgcgctgctcagccaggcgttggtccacttgtcttgtcacctcctcttgcatccttgcctcgtaggtggacaccctgtactcaagatcgacgatcttagactctgtatccctcttgctcctcatccgactcctatacgtgtggatgtcctctttgaatccatatttccaaggaatgacgccttttcctcgcgttcgtcctggatgctcaggattctgtagtgcaagggtgagctcgtccttttctctgtcgggctggaaagtcccctgcgtagaggcttcaattgcatccgcaagtcggcgtgctgcatctcgaatctcatcgccgaatatgagggagccatcgcctggattgagcgatccaccgtgtgcatagaaccagttcctcgatcgctcaggccaattagccgtggtcggctcgataccccttgctatcaactcagcttccaacttgtcccacttggggattgcctttccatatccgcctgacccaagccggtgatggtatttcttcttagctgcattggctttgttcttttctatctgtgcttgcccttgcgctccagtcttgtatgccacaaacgcatcccagtgatccctaagcttgttatgcacgttgaaatcaggtgtcaagcccttgaggatgtatctcttgtacagatctgatttgtagctctggaatagttctgccattttcttcagggtccattctttgcatctaggacgatctgcctcagggatcgtgaatgtctccagcatggtggtccacaacatgtccttctctgtgtcagagagaaagctatcttcatcccctcgtgacctagttcgacgccagtacactatgctgatggggacgttgtctctcacgacccaaccacaatgattcacaaactttcgtcctatacccgccagggctactggttcgccgtctggggcaatctcagtaacgatgtgccttccctcaagcttcttcgcgggacctattttcccgcgtggcctcttctgtccggccgacggttgactatcagtcccctcctcggtcccctcctggttagcctcctggttaccctcatcgttgccctcctcgttcaggtattggttgggatcctcgttcccctcatcatccacccagtactgactgctgccctctgcgatcgtgtctaacaggaattgttcgtcatcgcggtctgccatttgtgcgtgcaaagaaaaaaagacagtgaggtcatggacatcaacatgtacagctcatacgtctaaaccctacaagtatacatgtataattcgctaagtcgttgttctcgttaagtcgttaagtcgctaagtcgtcgttctcgctaagtcgctaactcgctaagtcgctaagtcgttgtccgtcaaagtcgctaagtcgtcgttcgtgaaagtcgctaagtcactaagtcgtcgttcgtgaaagtcgctaagtcgtcattcgtgaaagtcgctaagtcgttgtctgtcaaagtcgctaagtcgtcattcatgaaagtcgtttagtcactaagacgtcgttctcgctaagtcgctaagtcgtcgttcgtgaaagtcgttaagtcgctaagtcgctaagacgtcgttctcgctaagtcgctaagtcgttcgtgaaagtcgttaagtcgctaagtcgtcgttcgtgaaagtcgttaagtcgtttagtcgctaagacgtcgttctcgctaagtcgctaagtcgctaagtcgtcgttcgtgaaagtcgttaagtcgctaagtcgctaagacgtcgttctcgctaagtcgctaggtcgctaagtcatcgttcgctaaaacgttctcgttcaaacgttccaccgtggagtcggcggtggagtcggcg

SEQ ID NO: 17264 - DNA, 19266 bp, Oryza sativa
  unsure (1)..(19266): unsure at all n locations
cgggacaaaagatgttttcccgctattccaaaatttgtattggtcccggatactgttaataaccgggactaaagatgtgtacacaaaaccgatttatggtcttcttaaattgtcttacaagtcgaaataaataccaataaatccaatataattagcacatggccgatttataaataaatagaaataaacaggatatacctaagtaaatggtctcaaagtataaataaatagaaataatcatttataattaacataaggccaatttaattatattcaaagtgtaaatatatagaaattatcatttataattaagatatggcctacttaattgttttcaaagtggaaataaataccagtaatcagttataaataacatattgcctaattaattgtattcaaagtgtaaataaatggaagtaaccatttataaatatcatatggttgaaaaatagtaatacattacaaattaagcagttgagaataatatattgatccaaattgttcgactttcaatacaatacaaataatttacatcttccatcaaacaatctaggtcactgtcttcctcacgtagtttctcctcactattgttccttcgctatgatcgttgcgtgagtacggcgtgtcctcctttgatagtatgatgctcgggtcaaccgtcactgcaaacggaggttgctcctcaaacagatcgtaattttcgtcagtcttatcctcgactccaacgattttcctcttgcctgggagaatgtaacaccccgattttcgttcgggattaaaaatcattaaataatgcattttgtagaaatttaataaaagttaaagcaatttaatcaagtgaaatattgagggaattaaaaatttcctttaaaaatcattggccgagaatattttgtaatattctttgtgccctaaatattctctgaaattttcccgtgaattttcggagctcaataagtaattataataatacaaagttcatttaatcaatttaaataaaaagaaaagaaattaaaatctccctttctttgtctttgggccgccccagcccaattcccttcccctcccgcgggccgcgccctctctctccctctcccggccggccttcctcccctctcttgggccgtcggcccgtttcccctctccctcgcgaagtctgttttacgtcccccttccaactctccctccctctctccccgataggtgggacccgtggaccccacctgtcatccccttcctccagctccaactgccgccatggccgcccgagccgccccacgacgccggcgttttcgcccaccttctccaccccgcgcgcgcgcgctcgtccgtgggacctcgccgcccacgtccgcgccgttttcccccacctctcccctccaaaaccgccacccacaccccacgatgccgcccacgccaccggcggttgccgccccgactccgcctctcccgggctcggtccagcctcccctcccctataaaaacattccccgcacctccctctccattttcccctctctcccgagccctcccgtgcacgaaaaccaccccgccaccgtcgcaccttccgccgccgctcgccgacgacccttcagccggtcgccacagccgctcccaccaccgcctttccgcgcgaccgccaccagcggtttcgccgcgtcgtgccgcaccccggcatccgctccatttcccctccccgcctccgaagcacagtcgccacgcgcaccacctctttccactgccgccgccgactccagtcgccgcttggcgccgctcctagccaccccaagtcgcgctgttgccgccgctcgcttcgtagcgccgagcagcacctcggccgccgcttttcatggccgggatcctgccggaacacggttcccctcgcgccggtgagcatccgcgcccgttctcacctccgaccagcgattcatgccgctgggagccctctctccccctcctaacctctctcccatccttcctaggtcctttcggccgccgtccgccggttcccgctcgcggaacgccgccgggccgccgttctgccttcgtcccgaggagcaccgacgccgagctcccccgtctttccccgcccctcgtcgccacgtctttggtgagctactcctcttcctctttgcctccctcctctgtctcccgtgcgcgctgccgcgcctgtggccgccgccggcgaccaccgggccgtgcgcggccaccgttaggtcggccggccggcttgccgccgccccgcttgcctgggccgcccggatccccttgccgcgcctcactgccgctttctcacatgcaccggccgtcgccgcaggaggccgcgccgccgcgagccgtcgctcagccgggccggcctgagccgtgcccgtgctcagccgcgccaccccgtggtcccggtccacggtggaccgattcccttgacccgctgacgtgtggggtccgcctgtcagcgccggcctctttgatgacgtcagcgcttaagctttttcctttgagaaaataaataattattgcgcaataatttggtttaattatagaaatccattaaaatggctcaaaacttctaaaattcgtatctaattcattcgaactccgattgagccattcaacttgtaaaattcatctaaaattgagctctacatgtttgtttagtttttatgtacttttttcttggtttttattagagtttttcctcgttttgcgtgccagcgtgtagaatccgtcgtttcggaagtccgtggtcgcgaggaaaagagttcggaagatcaaagtgaagaagcaaggcaagtcacacattccccttgagcatgttgatcccaatttacaaaagttttactgtttgcaaataaatatgcatgttttgctaattacatgggatcagggtttacctatctgctcgcttgtgccatatttacttgatatatgtcctttgtcaacattgggtaataaatcgactagctcatgttacttatgtgacctagctagaactatatgcttagccatacttaattaccactagctcagttgatgggataattacagtattagaccttttagtatcagaatgagctgcgtgctcgagacatctggccatgcttcatggtcataattatccaactaaaatgtgactgaaaggtgggctgtgggtgcatggttttgctagtcgcacccatggcaattatggaccggttcacgggaaaccctggaagaatttttcgtacttaccacaagccagcgtgggcaacggctgggcttgtagtgtagctttcctctagccgacgcatccaggcaagggtgggcgtgatggagcggggtgggccctgcgacggcctctgtcgcttccggattcacttaggcacgagaggggactgcccgctgccttgcgaggagtgggggtgaaacctgaggtgtggtgtgcttggctagagagggttatgcgaagggtcctgtcacggcctctttccagtatgtcgtggtggcatgtcggcgcacggaaacgtgtcgtggggctgtgtcttgtgggtacagttgtacacctctgatcagagtaaaactattcaaatagccgtgcccgcggttatgggcggtcgaccagattcaccgtgattagtcccaccttaatgaatcgactcaatgcactgtagttcaggtgggttggttgggcctgttcaatgtggtgtagcgttgatcagtggagattcaatattaccttaattactcaacagttttagtgttttgctcaataaaatgttttacaactgcctttatgcaaatagccacaaaccgtccttgtgtccccttgcacgtctgcattgttggtgaggcttgctgagtacggtggttgtactcagtcttgctattattcccccttttcagaagtgtagtgcttctgagctgaagacgaggttagaagaccaaggctcagaccccagttgagttttgcctgtggagtggagctgaagccccgctaggatcgtctttttctgctgctgctgcttttgtttcggtgtgaggactaagtgcctcttctgtaagtattttacgctttatttacgtttggaactgtatattacttgtcgttttgtgtacactggctggtcctggacagggatttaatacacaaaaaggtctgaaaatttgggctaaatttctgggtgtgacagagaacaacatggcgtcttggctcatcgggccctttccccttctttggtttgctatccatgtccttcacgtaaaaaacttgcgttacatcattggctagaacgaatggttcatctgagtatcctaccttgtttaggtcaaccattgtcatcccgctgtcatcaatcgttatgcctccaccagtcagcctaacccattggcaccgaaacagagggaccttcaggggtccatactctagttcccaaatgttgtcgatgacaccgtaatacgtgctagttggaccatcgtgtcctatggcattgatacgaacaccactgttctggttcgtgctctttttgtcttgggctcttgtgtaaaaagtgtatccattgatttcataaccttggaatgtagttaccgagctggagggtcccctagccaagaaggctagttgtcggtcaatcgtctcgttacccaggaggtgttctcgcagccaagcggggaagtatcaatatgatggcgtgtaatccaggcttcggacttgccactgttttctgagcgaacaattgcaaggtgctcatcgatgtaaggagcaaccaacgaagattgttgcaaaaccgtgaaatgtgctttacggaataaatcgttgtctacagtcataattgctctccttccaagtgtgccctttccccgtagtctcccctcatggattgattcgggtaccccgattggctcgaggtcttcaataaaatctacgcagaactcaatgacctcctttggtcaataccccttcgtgatgctttgcttccgacgagaacggttacgaacgtacttctttagagcgcccatgtacctctcgaaaggaaacatgttgtgtangtacacaggaccgagaataccaatctcttttacaaggtggctcagaagatgcgttattatattgaagaatgacggtggaaagatcaactcaaagctgacaaggcattgcaccacgtcatgctgaagggcggctaaactttctagatcgatgactttctgtgaaattgcgttcatgaaagcacaaagcttcgttattgttgcctgcacattatcaggaaggataccacgaattataacaggaagcagctgtgtcataagcacgtgacagtcatgagactttaggtttgtgaacttcttatccttcgtgcttattattctctttacattagaggagtatccggacggtaccttgatgctctctaggcattgaaacatactctccttctcttccttgcttagggtgtagctcgccggacttaagtaatagcttcatttctcgttcggttccggatgaaggccctcgcgctgttccatatgcttgagatcattgcgtgcttcgagtgtatctttggacttcccatatacacctaagaagcccagcaggtttatgcaaaggttcttagtgaggtgcatcacgttgattgcgtggcgaacgtccaagacctcccaatagggtagctcccaaaaaatagagtttttcttccacatcgccgcgtgaccatcttcgctctctataggttggctgctaggctcctttccaaatactactttcagatccttcaccatttcgaacactgctttcccgttgcgatgtttaggcttagtacgatggtctgccttctgttcaaagtgcttgccttttttccgtacagggtggtttgcagcaaggaatcgacgatggcccatgtacacaaccttcctgcaatgcttcagataagtactttcagtttcatccaaacagtgagtgcaagcgttgtaccccttgtttgattgtccggataggttactaagcgcaggccaatcgttaattgtaacgaatagcaacgctcgtaggttaattgctcctgcttgtcctcatcccacacggggacgccctctttcctccacagcactttcaaatcttcaaccaatggtcttaggtacacatcaatgtcgttatcaggttgcttcgggccttgaataataatcggcatcatgatgtacttccgcttcatgcatagccaagggggaagattgtagatgcacatggtgactggccaggtgctatggccactgctcatctctccaaacggattcattccatccgtgcttaaaccgaacctcatgtttcgtgcatcctcgccgaagtctttaaatgttctgtcgatatttcgccactgcgactcgtcagcggggtgtctcagcatcccatcctgtttacgttcttctgcgtgccaccgcatcattctagcatgtgatttgttcttgaaaaaccgcttcagccttggtattatagggaaataccatatcaccttagcaggaattctcttcttcaaaggctgtccgtcaacttcacctagatcatttcgtcttattttgtatcgtagtgctttgcaaacagggcatgcttctaggttttggtactcaccgcgatacaggatacagtcgttcggacatgcgtgaatcttctgtacttccagacctagagggcagactgtcttcttagcttcgtacgtactttcgggcaattcgttccccttcggaagaatgttcttaacgagtttcaataactcgccgaatgccttgtcacttacaccatttttagccttccattgcaagaattctaggatggtactcaactttttgtagcccttctcgcaacctgggtacaacgctgttttgtggtccgctaacatgcgctctagtttctgcacctccttttcactttcgcagtcctcctgtaagacccgcaatatttgaccaagttcatcagcaccgtcattcccttcaacatccagctccgcctcgcccattgtgttttcttcaaatccgccatactgagccaagtccggaatgttctcatcttctacttcatcttcttccattgcaaccccaacctctccgtgcgaggtccaacaattgtagctacgcatgaacccccactgaaacaggtgggcatgaatagttcgtgtggtggaatactccttctggtttttgcacttgtcgcatggacagcttataaaaccgttacgcttgttatcattggccccacccaaaaaataatgcacgccatcaataaactctttcgaccgccgatccgcgtacatccattgccgatccatctatatgaaatacatataaatcgtaattatacaaaatccaagatttacaaggtaattacataataatacaataattgaattaattattcatacaattaatcattattattaaattcattgtacatatttttcatgttttaattacattataaacaaatatttaatatgtttttcttattttaatattaaattagcttagttttataatttcatacaaaattatatgtaattattcaaacaagtatttataatcttctttattccctacacacactttctctctcatcatcttccatcacattttctagagggaaaaatatgtaaaaaaaatagctccaaatgtagatggtaagcaaaacaaagagtaggatgaagttgctaaccatttgaagacctcaaatttatatattaccaccaaaaaaatttgcttaaaattttgacagcacctccctccctcaaagcttaattttgaagcaatggctcgggcgggaggaggaagaaggggtatataaagctatgcaactttagtcccggttggtgttaccaaccaggcataaagatctcaaatcactttagtcccggtttgtattaccaaccaggactaaagatatgatctttagtcccggttgactaaagatcccaagccccccgacagaggtctgacatgccctgtcaggaggcgaaccgggactaaagatgatctttagttccggttggtaccgggactaaaaatcccttcgtcccgttgaggtaataaaccgggactaataagccactttagtcccggttcgttttggaaccgggactattgtggaaattggccgaccctccaaagacctcttctccagtagtgtatgctaatagtgtccacttgtatgatcagggtataagtagggattaatatatttataagagtagagtgatatagcaaagaactcatatctctcaaaaatcaatcctacgctatgcagaagaagaaatagaaaaaaaaaatcaattcctatactagaagtatacactcaatgctagtttacatctgctagtatacaactatgtagccaatacccctaatagtgccctcctggtgtttcgagagaccacctcaggttgccgcgttccttatgacaacctgtcatggccgtccaaccggggctaaatatagaagagtaccttccccatgaaagtttcttaggaatatatactatctcggaggaatacccatactgagctatcaccatcagtggcccacctcgactggcctgtagcatatatgcctagatatgatgcttaataatctagacaccatgtcttcattattaaatactactctatatcccccgagatgacatagagcaaccgagcattcggacactaaaaccacaccattgcacatctgtggtaggctaactacacaactgtaccgatacagatataaagtaaagccaatactcagataaactaaagtactgagagtatataaataataaaatttcattgcttccgaaagccttacaaaagtataaataaaagctactacagccatacccaaattcctctgaagactccgagagctattctattatactccacttagcactagaatactaaactaaagtatagagagaaatgctgagcttgcttgagtgtgtgttgagatgaattgagctcctccttatatagccttccaataacggttatggtagttggaattgtcggaaatgcctcgcaactgtcattgagaatgcatcacaagcgtacgcgtggaggaccgagctgaggcggcgctgccagggttcggctgaacccctgcccagcagacctccaaactttccagggtcactgacaggtgggtctctatgacagttgtgacagttatggtggttttcgggacggttacagctaacatgtgggcccatcttatccttaagcttgcttaggagtgaaatgtgcacgagaaacttgtatgtacgtataggatacgttgccatgtttctaatatatccatgatgttggagatgggatgatgtttcagaaaagcgtaaaatgccttcactgacagaaggggttgatgactaattggtcctgctacaggtttctcttctcttttgagtgttgtctccttgcacatactccctctattccataaaaaaacgaatctaggattgtatatgacatattctagtataacgaatctggacagaggtatgcccagattcatagctcctgaggaggtagctgagtctagcctgggaggccagagaaggaagaagatgcctaggcctgatatggaggaaaaatgaatttggatcttttgtgtgtttatgcagaccttaatcagatttttatcgatcatgtaatggtctgtatttgggcaagaacttttgtgtcatatcagttaaatgttccacttatgtacattttgaatatttgggatgctcctttattacagactggttgtgctagttctgtttattccagtctcttctatcaagtttatcatgaataactttaaatcttggaatgtgctctgttggaatattcgaggaatgaatgctgaatccaagttgctctctctgaggcagaaaattgaagatagtggttgccaggtttgttgcattcaagaaactaaaaaagaccactttgatttatctgatatcaggaaatttgcccctaagaatttagatagtttttattttgccccctccagtggagcttcaggacgtattctgattatttggtcctctcgagtttttgtggggacagtgatagaggttaacctcttttcagttaccattgattttacctcaaggcactctgcccagaaatggacccttacatgtgtatatggcccttgtagttcccctaaaagagcaaattttgtttcttggttcagaagtgtgcaaattgctgaccaccaaaattggattttcttgggggattttaatttctatagatatgtgcaagacagaaataaagatggtgcagatatgaatgacattttcatctttaatgatatcattagcatccttggccttctggaaatccctcttaaaggcagaaaattcacctggagtaatatgcagcagaatcctcttcttgagagattagattgggttttcacttcagtctcttggatagtggattatccaaacacattagtgatgcctttaaccagaaacatccctgatcatgttccatgtgtagtgaaaattgacacaaaaatccccaaatcccctattttcagatttgaaaattattgggcagagatggatgtgttttttatattgttcaggcagtttggtctttagatcctggtttcgatgatcttgccaagtgcatttctttcaaattgaaagtgcttaggaaaaagctccttgcttggagtaagaatctgtcaaagttgatgggattgctaaaaaactgcaacaaagtggtggactttctggatttagtcgaagaaaacagaatgctatcagtctatgagtggaatttcagagaaacagttaaggtacagattttgaaattattggaattgaggaacatctattggaaaaaaaggtgcaccaatagatggatgatgttgggggaggaaaatacaaaattctttcagtcaatagccactgaaaggttcagaatcaacactatctcacaaatgcttgatcatgatggacagattatacatcttcatgagcagaaggcttctttgtttcatcacagctttaagaacaggatgggtgtttctaattccccacagatggcttttgacttggactctctttttggcagacatatagatttgaacagcttggttgacatgttttcaactcaggaaattgatagtctcatctccattattccagctgacaaagcaccagggccggatggtttcaatggttttttcatgaaaaaatgttagcatatcatagctcaggactattatagactggcagctcattttcatgctggaaatgttgatttggaaatccttaatagctctttcataaccctggttccaaagaaaccctccccagagactgttaatgatttcagacccatttctcttatgggtataagtctaaaaatcttaactaaattgctagccgacagacttcaaggggtaatttttaaactagtgtgtgataaccaatatggtttcatcaaaggaaaaaccatacaggattgtcttgtctggtcttttgaatatattcaccaatgttagcagtcaaaatgagaaatcgtcctcttgaagttagactttgaaaaagcctttgataccattgagcattctgcaattctttcagttatgcagcatatgggttttcctccaaaatggattgagtgggtacagatggttttctctactgcttcttctgctgtgttattgaatggggtgccagggaattctttcaaatgcagaagaggagtcagacaaggggatcctctctcacctctgctttttgtgttgggggcagagctgttgcaaagaataatcaacaaagcttttcatcaaggccttctgtcaaaaccaattgatgaaagcagtggggatggtttcccaatcattcagtatgctgatgacaccttgatattgttaaaagcatctcagaaagaagtcttctatttcaaggctattttgaatatgtttgctcaatccacaggcctcaaggtaaactataataaatcaactctgtacccacttaatatgcctcaggacaaagttgtcttactatctagcattttgggatgtaagatcggttctcttccattcacttatttggggttacctttgggaaccaccaggcctagagtggtagactttgctccgttggtagacagggttgaaaggaggctgacatcaagctccatttgtttacctcaaggaggaagattaactttgatcaactcagtcttgtcttctatcccaacctactacatgtcctcagtgcagctaccagttacagtcatcaaggccattgacacagctcgtaagaattgtttgtggagagggaataaccattcttctacaaggaaatctctagctttctgggatagggtttgcatgcctaaggagaaaggaggcttaggagtgatcaatctgagagttcaaaacacagcccttcttctaaagcatatggtcaagttctataatggtgctgatttaccatgggtgaaattaatctcacaatcatattatgattctaaagttccacacttgatgatgaataagggttcattttggtggagggacatcacatctcttgcagacatatttagggggatagcaaaatgcgaaatcaggacaggaagaacttcccttttctggaatgatctatggaatgatgattttaagtgcactagctaccccaatctctttgctgtgactatgtataagtctgactcagtaaaggccatgtgttcaagacccctagaagactcatttgcccttcccctatcagatgaggcttattcggaattcttgcatcttcaggagggacagtttgactttacaatcagggatgggggatgcttggaattttatctggggctcagataagtacacagctaagaaattctataagctaaattattctgcattgcaaccccctagacccatgatttggctatggaaaacaaaatgtgtcatgaagatcaaagtctttgcctggctaatgttctgtgataggctcaatacaagagatatgctggatagaagacattgtgccaaagaagatgatgatctcacgtgtgttttgtgcaatgcgaactacagagagacaaggcttcacctcttcttcttatgtcctttcagcatcaggtgttggcaatacctaggaattgagtggaataataatttggagtttttccaaatgatctccctagcaagaatcaaacttgctcagaagggtttcttggaaattttctttttggcagcttggcacatctagaagcaaaggaatggcttcatatttcagaacattcagccctccttccaggcatggagatctctttttgtcaaagaagttcttctgcatatgtgcagaatgaatgatcctttaaagcaaactgtttttaattgggtacaagccttatagtctttctgtgtgacccacttgtaatctctgtaaccttgtaaatattttctttatttataaaattacactgatgggcaaagccctggcagttttcttgataaaaaaaagatgtgtcacatctagtactatgttgattttttatgggacggtggcaatatataagtgatgttcacactcacacatatatatgttttcaatatttgtgcatgttttaactatttcaaggtggttacacacaaattttcatacctataagaaacccacagtaattaaagccaatcagttgccatcccatatctaactctctataattatggtctcatttgggcattttttagaaaatatatatgcagactattggcatggagcagaaacaatcgacaaacttgatctatattaggtatagagacaaattcgatgataactcgttgaaagagagaaaacacattcatagaccatggccatgtacaaccgacaacatattactagcaaagatttggtaaaaggttcaataactataggggagctctatggttaaaactacagagtacattgaattatgtcgtctatcttgcaactatggtcattaagtcaagggaggaaattaatgtactaaatggtcatgcaataaatatatttctgcagctcaaaagtaccaaagtgtgtacacatgtaaatatatcaaatatatatcatatgctcaactgctcgtgagtctgtgagagagcaatgaatcgagctaggcaacaagatatcaacagctccagatgaacaaaacagacaacgccatacagaaagttgtacacacattttcagttttgtgtcaaatttgtcgccgagtgcgggcaaaagaacttataaagattattctttctgtattcgtaatttgacattgcttgtgatggctcttcgaaagcacattttcctcctacttttggtagtactccctccatacttacaaaagaagttgttttggacagcgacacggtctccaaaacactactttgacttcttatttctataaaaatatttattaaaaagtgatatatgtatacttttatgaaagtatttttcaagacaaatctattcatgtaatattcagaaaacctagacaacggtatcctgttggaacgggatatccttctatgagacagtacctgatacctgatacctgttatggtactgactgcatgttacccgatacctatgatacttgttacccgatatatgtgatacctaggacctaatacctgtacctgtgatactcgtgcaagagaatagttactatgtctatcccgttgcaacgggatccagttttgtagcagccctctataatgttttacattttcaaactcaataacttaagagttattcatgatttatatttccaatatttgacttaaacattgtcctaaacgactttctttacgagtacggagggagaacatggtagttagatgaagcatatatatatcttgctcagagatcgatgaattaggtcatgtccaacgggcgtacccctagcctcccaagtctgatatgggctaaaaaggcggtgaggaccatgcgtgcgcctggatcaatctacagactacaggcaccgtgcatccccgcgcgagacgccactctgagttgcgttgcgttgcgttgagcaggatagggcgcctgtgcagctctcacttggtgcagctttaaattagaccgggcccatttaaggatattgtatccattagggaaataaggtctttttgtatggcctaggcccacatagcaaacgggggtatggcctgcgttggccatagccttacacccatggtctttacatttgggatatatggaacatataaaaataaaaataaaagcagtgtggaacaaagtccaaatataaaataaactaagcaagcaagaaagaaaacacaaaatacaagctaagggtttgcaagagagagaaggttaggaacttctcttctgcgcacgtaaaacaaaatggctctttaacgcataattaattaagtattacatatatatagaaaaacttgaaatacaaatttgcgtgtttttaaaaaacaactttcttataggtttgtttttcttttaaaacgttgtttagtggttcagaacgcagtgtggattccctcaaaaaaaatccctaaaaaaaaaagaacgcagcgtggaaaacgagtaggcagaagtgaggaaacatgtactccctccgtactcgtaaagaaagtcgttttgcacagcgacatggtcttcaaaacacaactttgatttcttgtttctataaaaatatttattaaaaagtgatatatgtatacttttataaaattatttttcaagacaaatctattcatataatttttacatttttaaactcaacaacttgagagttattcatgatttatattcctaaaatttgacttaaccattgtcctaaacgacttcctttatgagtatggagggagtagtatacaacgcaccctagattataccctattgctatttcgtcatccaaagtgaaaaagtcatcagcacgcgttcgacttcaaacttttacgcaaccctcctgctacacgaagtagtccaagagggtcccgtaattgtataaaagtggagacacaaagtttaggggtgagactctctttcactattcaatcctccaatcaactgtacaatgagtagccccctcctctctttatatagtgcaatccaatatatagaaagttcggtgatgggcccaataagtgtatttgggccaggccttcatgggccaagcccaaagtttcttaacactcccccttgggcactcaccgcgtgatgtccatgcctcattaaaactccataaaaacccagtgggaaaaaattggagaaagagtacatagcatacgcatgtatgtcgcacagattgcctcattaaaaaccttgataagaaactgcaggaaaacttatcaaagggaacaagagtacaatccatccaaattcttgtatcgattttcttaatcggttttgggtacttgattcttcagttcaagcttttgttgatagactggcagaattctccccctgaattctgtatctctttaagtgtgaaccatcaaaactcgttgcacatatcttttcaaaagatagttcgagtgatgcttcaatggttaaatcttacatgatttttccataacttatagagtttgtatagtctattagtgctggtgcgacacacatatcatttatcttcttgataatgattttggggtttggacaaagctcgaaccatgttacttgctagaaatggtgaactatatccaaggaacctatgtattttcacattctgatatactatggttcacttcttcatgtgttgtaggttttcgggcctaagcaacataggtttctacctattttatctcaaactcgttcggagggagtgagctttctttctttatgcgatgatatgcggatcatcaacttggtttgggacttgatgcttgtatgcgagtgccctaatccaaaatttctttaaccattcattgtcaactatagaccatctttgcgggttgatcttttagttgattttcaacttcaggttgactgccaatgatttgctgtatgaagagaacattgcccatagcaggtctcataccaattcctattggttgtatgtgacacttatgcgagtatccatggatctattctttggcatgggcatgatcctttcattttaccggcgttggtgtgcactccaactgctggttttcttcctcaatagaaagatgtggtatgcctattctgaggttccataccatttgccagctctgaactggctcccactcaaattctggggttacttttagtgactatgagcttgagagttcctttttgtcccgttttcaccagacgtctccggttactttagggatttaaggagccgaagttcttgtcccattatttttctcgaggcctctggacaagatgaggtatacctttgcattcttcggtatttcatcctcctccggtgcattatattcgggtaatgcaactgagtcatgctctccgaatcacaaaagtgatagacagttatccaattcttatgtgtgcttttcatactttcattcacacgtgcttgattaaatgtgcatccatcctttcatttgaccattttccctgacatttatcattttaagggttatttctccccctaaatgactggaaataatccttcttattgtcaaggagtttaggctacgttcgtacctctgttaaaaatttccaatttttctgagggagcccttacggtcgtggagtatgtacatgtgtcaagtcaacaccagtattcttttaagtggacaacacatttcgaatagtccagatattgataattcgctgtctttggatctacgagtccattccagtggcgggaatttcaataacgatgaagtggacatttttagtcctattcttgtggacatccggtacttagtgctttttttaatatgctgatgccaacatgcatgatcttgcaggattggtttggtaagagcgtagtgtttattagacaaattgcagctttttcataagcgcaatatgtatcggatgatccattaaaaagggctaaatatgcatgtgaattcatgtggtatacgagaattcattacgatatacctttcaaggtatgtcgaaattcatgtggtggtcgatgtttggcacgcatccgatgttcgatggtatgcgcgaccagagtgaccacggggtatgtagccagtgcaactatggcgcatggtaggagttgcatgacgcgtgttgacgcggcataattcgtccagtccgccagcacaacggggttgctagttggtgcatagtacggcatgtagagcgcggcgctagtagcggccttagtgcgcgtcataatgctgtatgatgcacgccaatgtctggcgcaagtctggcgcgaggcgctcagtgcacgtgacaaatgtctcatcgctgcaatactacaggcgatgtggcattgtttgtgcaatattcatttgtaagatactaaattctaagaactgactatgaaatagtctactttagcctacatttcttagtgaggacgttgacctcgcatgcttaggtgatgagtatgcttctctcattttttagttcctaacagggaacttttgtgcgagagtttgcaattctcaagagatttgaggtgtaatcgcttttctacgggaaaaacaatatcctttacaatcattgcgtgcggttgtgaaggtagttcacgtctttgcatagaccgaacttgtctcatgtctctcaagattacactttgtggtgcttttgttccacaatgttcctcttcatcttaggctatacatattgtctatgagaataaagtaaaacatcactatgtcaggacaaggagtaaactttatcatagagcaaaatgcaacaaaatattggaaataaagtctagccatgcaaggcgaatcacgaaataaatgttatgctctcatagagcttacaaaaccattattcaaattgttcctaatgcaacttagttcatgaaataaagtaggggcatcaaatactcaaatggaatcaaccagagtatcgagctctgcaaagatatgcttctgtgtgacatccttttcatttgttgtgcctgctgcagctgcaggggcgtcaagtggagtagtggtgaagggagtggccgtagtgtgagcctcaaccatgtgtgcttctacggacgccttggccttcctgctggcctggtaagcgtcgacgacatgctggggctcctcgcagatacggctctagtggccccaaatgccacacttgtaacatgtctggtactgttggccatatggcttgtcattgcgaggtggcttggcttccttcttgcccttgcc

SEQ ID NO: 17265 - DNA, 3938 bp, Oryza sativa
accctcctgctacacgaagtaatccaagagggtcccgtaattatataaaagtagagactcaaagtttaggggtgagactctctttcactattcaatcatccgatcaactgtataatgagtagccccctcctctctttatatagtgcaatctaatatatggaaagtttggtgataggcccaataaatatatttaggccaggccttcatgggccaagcccaaagtttcttactcagaactaccagaaccctacgggcgcatagcgcgcacaactttctatattccagcacactggcggattaattcaccatccagcgacccggacgactgctcgggtattcagcggataatcaattgggttctataaatttagaaggattgaaatgaattttttatagtaaatagtagctacccgtcgtttctgattttttttagtcaaacatttttggatttgatgaagtttatataaaatttagcaacatccataccatcaaattaatttaattaaatataacattgaatatattgtggtaatatatatcttttgtcacaactacagaaatcataataagtaccagttgaaaatcccacgtagatgccgaatttcctagcgggcacatcacaggcggtactaatgaggaggacacaaatatgctggtttaactgacaccattgagatatacggtttgaaaaaaaaaagctggctcgactcgagttgagctgatgattgaaagccaccaaaaataaatcgaaaaattcaacaacaaaaaggagacaagttcacgatagagaatcaacgagttcatagatcaaaatcaaaatattcatcgataacttcacatcattgaatcaaacatcatcgacaagttcacatcaaataattcaaaaaccaaattaaataatgcaccaattacactggagaactctgcccgccgccatcgcgcattgaagaggaaggggaggctgccacaaaggagagaagggaggctgccgcccctgcataggggagaaggggatgtcgtgggcaggtgagggaaacaccgccgaggggagatgaggtggatgtcatcccgttgagccgcgctgctgaggggaggcgttggtggacgttgcctcctccgctcgctctgttgcctttccatcgagcccccaccgaggggaggcactctgaggaggcaaggccatggagaggtgagggaggtgccgccgaggggaggcgagatggatgccacctcctcccacttgctcagccatcgtcccttcaaaccgtgccaatagatgtggggatgtgggggagagattgagaaggagagagccggctaggtggagaggaggctgccttgcctgcttgccctgctagggagacggagctagccgccgcttgcaaaccggacttggacgggagagaggagatgggagagggagatggagacttgagagggagacaagagacaggaggataagaagagagcgaagagaccgagaagataaggacgagagtgaccctattcagttcggctccttcctagagtgttggttgtttaaaaaaccgatgctttttatcttgtataaggtgccggttgttattaaaatccatctatgtctgacaacacttattggtgctgcgtaatattaaaaaccgatacctatatcgtcacataggtgtctgttctcccaaacggtgctatatgagcacacgttcggacgagaaaaacattataggtggtggttttattttttcataagtttagttagacttaaaagagtaaaaaaaaatcaaaacaaattaaaatatgaaacaaagggagtttgctgggactttataatttgggtaaagttcaccagctgtctctcaactttacgtcgagtttgtataacatccctaatccccaatactagaaatcttcaccccttaactataaaaaaccgtgcaatttgggttccatgggatctctggtttcgctgcgtggcatcatagtccacaaaataaaaataaaaaaaatcatggagcccacatgtaagtgactaagaaaaaaagtgtggcccctcatttcttctttctctctttttttttctctcctctcttctgttttcttttttttttctcttctcttcagcaatcctaggagggtggcggcggcagaaaggggagagacgatcggcaagcccggccaagctccaccgctgcctctagcgcctcatgacaagaggagggagcgggggagaggggaggcggctggcgggagattggggaggggagaggcacaatcacggggatggcgaggcaatgggggacggggggcgcggtggggtgacggggatggcaaggggacaagggatgggcacatgccgggcgggcgtcacgacggtgacccagtgcgatggggacggcaaggcgagcggcttggtgatggggaacagggcgcggggcaagccggccgggcatcgcaaaccggcggtctccgtgggtgacgatatgctgctcgaggtggagcgacggtgtgacctggggtcacccatgtcactgactgcttccaccaccatttcatggccaccgtcgctgctgtcccctgacgtaccctatgagatcttgcgcggccgcatagcccatggctcgctgccgtcttcatagcctgcaccggtcgaacgcctgctgttacggctcgatgggggagacgacgacgctgccaccaaggatgcaccgagcgagcgctgacatgtgaacgtacgcgaaaccggggataaattgagtccatactgcttgggacctttttttgcacggtttgagataggtgaggggtagagatttttggtattactgattgggacctcagggacgacaggtgaacttattaattctttaaaatttctcgggatcgaccactgttccatcattactttgttgatcagatcatatgggtgttacgttttgttggaccacatttgttggcccgactatatttcatggcccaatctagcttcccgggcaaaatttatctgggctttgctggctctgttgatgggctatatatcttggcctatatattgatgaggaataagttcatctgaggtcccttaacttgtcaaccaatccgattttcgtccttcaaccagaaaaccggatacaacgagtccctcgactgtcaaaaccagtgcagatgaggtctctcggcggttttgatggcggttttggctgacgtggcgcctacgtggctaatttgacttagtcttcatctgatgtggcattgacgtggcgtttacgtggcaatttgatcctgaaaataataaaactcgtgggacccacatgtcagtctctcacacagaataataaaaaaatggtgggacccacgtgggccccacctgtcattgtcaatcctcttcttccttctctctccctatctcccctcttcatctctcccctctgctccctcctctcgtcggcggagtcgcggagataaaggacggcgtggggaggcgcggcctcctctactcccgcccccttgggcatacgccggcggctgccgcccctctcctcgtcgcgcgccgatgcgtcttagcagctcttgcctctctcctcgcgatctgttcgccggcatgctcattgcatcacacccacgagcgcggcctgcgacgggcgctgccggcatgctagctgcgaagacgccgtccgtggcggtggcagcggttcagagagatggtggatggagctgtggcaggactggaacgcctacaagaccaccaccaccactcgccactcgttgttcgctcgcccaccatggccatcgcgacggcgctccgcaagctctcgcccacgtaggcgccacgttagccaaaaccgccatcaaaaccgccgagggaccttatctgcactggttttgaaagttgagggactcgttgtatctggtttttcggtttttcggttgaaggacgaaaatcggat

SEQ ID NO: 17266 - DNA, 17918 bp, Oryza sativa
aaacttattcctattgatgatcgtcactgaaagatgtacgtacacgagaccgagcgcttgctcgggtgacaaagcgtcgctggtgggcacgctgggttcgacccttgtgctcgcccgggggatttttcccctctttccccggactgacttcggttggtcccggctagataataaggtatacatgtgcacgttttccgtgcattgaggtctagtgcctccaatcttattcctaacgtgtgttaggaacgcgtacgcatgtgtgtgcgtgtgtcgtggtgtgagtgcggtgtgtgtaagtgtgcgtacgcataataaattatgggattaattatgttggcttattaaacagatgcaaatgcatgcgcgagttttctattttctatagaaactcttcattaattgtagtacacgtacgtactccctccgtcataaaagagcgaatgagtttagacagaggtatgccacatttagtattagatgagttttttttaataggtggagggagtatataaaggcactgctacgttttaataaaataacatcattgacttttaattaacacaatggttgactattcatcatattcaaataatttatataaatattatttattttattgtgatgtattttatcattacataaactttaaatatgatttatactatagcacatttatactaatattttaataagacaaatgatcaaactcttttttttaagttaaggatgtcatttatcaaaaaattgaagtataatgtcatcgcgtagtgacgcaactttcgtcttcttgtggcaggaaaaagggttaattagatccatgtcactgtaactttgctaaattaaaaaaataccattactatttatcatatctgctacgtgtcattaaaaatttctaaaatttaaaccataccactccagtcaccttttccatcctcttgcctcacgccgtctctattccgtcctcatcccctaatctccatgactatgcgctgctcagccgcctccgcagccccaccaggcgcgacttcaccgctaccgccggcaacgcgcggctccgacgcctccacggccacgcgagcctagtccgcgagcctagtgccggacccacgcgtccgcgcctgccgccctccccctcgcttccgcgcgcgcatctgacgactcctccgcgaaccccgccaggccgggccacgaccgcgccgccctgtcctccgcgactgcgccccgccaagcacgacgcagccaagccaagctggcattggccatgctgtgagcattggccatgccgtgcaggagcactgggccgagccaatccggccacgccaagccgcgggagcgcctcgccaactccggggcgtgggcagcagccaaacaaaaacaagaagaaaaattaaaaagaagcaaacaacatcgctgcgacggcaaacaaggaagagccataagaagaagaagaagaagaagaagaagaaaggaaagctgcgacggccatgcccacggaagccgcaacgacgacgccgagcttgcccaccgtgcaacgcccgaacctccgagcagctagccctttggtccgcgccagccgcatgctcggccacgccgtcgacagagcttccatcttgctccgttcctccacagagcttccctcgccgcgacgacgcacgcccgttgctccgcgatggccgcatgcccggccatgttctcagcagcacctccaccgcaccctcgtcctccgcagcgctgccctcgccgggacggctgcatgcccgttgctctgcacgcgtcgaggggtggaggccggccgcgcgcggaagcggcggagccggctgagcagcgcatagccgtcgagatggacgattagggggatgaggacgggaacaacacggcgtgaggcaggagaacggaaatggtagccggagtggcatggttttaattttataaatttttagtggtatgaagcaaatatgacgaatagtggtggtatttttttaatttagtaaaattgcagtggcatggatccaattaaccccaggaaaaaaaacctgagaaaaaaaaagagtggttattgtacttaatttctgctcgagcagagcttacgcttctgcggcatgttttcagtcacataagtcgatgaagaaaaatattaatctccataaaattcaatgttggttacttaactagctagtatatatgtaacaaaagaaaatcactcttgtcaatcaactttcattagtacgaaaatctcaacaccacttattagtagctagctagggtcgagtcattacacttggtaactagctatatgtaattccaattgcccttctgaatagggctaacaccgatctagcactgggaaatactacaatcacaaacattaacacagaagcactactcatgcaccctagacacattttccattttgggaaagtgtcatctaataaccaccatatatatgtcctacaacattttatgacatatatatatatgtttctttttctctctttaatatataataactaattaatttgccttcagttgggaggctaattaacaattaatgttggatagatggctgccggacatggcagttggatgatggatgtagatcatgtcatgacctgtacctccggccgccgcagccgccctccctctggcagttgaagtaggcggcggcgacgggggagccgaggctgtagcaggcggcgaagtccctggtgttgaagttggagcgccaccccggcgcgtagatggactgccgcactgtctgccggaacacgatgaacaccaaccggtggatccccgctgtcggccgcgggctctcgtacgccaccacctccgtccctaaatatatatgcacatccattaatttatattacctcccttttttaatatacccgttggctattttacaaacgtttgatcattcgtcatattcaaattttaatatacctcagatgctagtatctcgatcgaggtacctgaattcttaagatggccgtaatatttctctaagtttaagccttttgagctagttcgattttttatggttggatactattagtttactcacctttactcgtatcgcctccttctggtacgtcagttaccaacctatacaatcaacaacaattaattaactctcagcctaagaatatagtaataacttctataaataaagttagggtaaccacaatgtgatataaaactattcctaggtagtaagcaataaaataactttattgcccaccaacgagcattgtagaaactgacgaggtaggtgcacgtacaggtaatggtgactaggtaggtgcacctacaggtgcctagagattggtctttttttcacttatgggctctaccttatattcatctgttacattcacacattatgatatatgtacagctacggcccactaatttctggccgcctattttattaccaactttgacaattgctgttataaaaagaacttatacagtagaaaaaaataaattattttagaaatgtgccaccagtagtcaagtgagcggtttgagtgaaatgagtgcgcgactatggatgacgatatattcctaatatttttttgtgcttggcatgagaagaaaacataggtgactcgcagtatatatagatgaaatggagagaagatagctagctctatctagctactagaggatagcatacttaccaatgaaggtattcccttttggaagggttgctggggctaggtgcatcagggtccaccattacctaagtaacaaatcatggtgtaaaaattgttaataaatccatgctatgactttcttttcataattttaggagcgactttttagacttgtttttgatcaattaaatgacacgtaagaaaggaccatatatatatgcattgtagttgacagttgactagcaaaactttgtctccagatgaaggtttgaagatgtgtaccatctatttttagttaaaacaaagttgaaaactaacatcccctgcattaagaaaacattatagtagcatatatgtatatactccctccatccaaaagtttaagacattttccttttatcagcaaaactaagggagaaattaacttatctccatataattaaaaaaaaattatatgcatgactgtttggtttcgatcaacaatttaattattcacacatatggacggtacaaatttgtcatttggcatcttttgcaaaacaagagaaataaaatatgctctagacttttggacaaattaaggaagagagtgcatatatatatatgttcaaatttgacatgcccgaaaatgcagctagctgtatgtgtttgtgtaaacgactcacgagcgtgtagagcgccctcccatcgcggcctccggtgatctggacggccggctcgccggcgacctgcgacggcctgagctccgacccgctcgtcatctcgcggtggttgtagaacagcctcagcagcgccgacgcgccgaagtggtccaccacgtcgccgacgatgctccccaccaccagcgggtccctcgacatgctcatcgccgccgccgccgctagctctacactcaatgccaccggcgatcgacgaggaagctagagctagatatactcaagttgtagtagtgcaatgtgatatgatgttaattggtggggtttgcagtgagtgtgttgtgttggtggagagggtgatatgtactcctatttatacccaggccacactggctttcttggctcatcctatgttgattttccatggaataatggaatatttctacatagatatagagatagatatagttagccagctagctatctatctatctatcttatatggttcaaagatgcgaatgcatccaatcataatttcaaagatcctggtatgaaccagaaataaaccaagcgagagatcatcttgtgatatcatgggacttgataataatcacatttgtttaatttatttaaagagtcgatttatgatcggatcggatggacaatgtgttgccaacaaggagtcggtttccgatccaacggtttgggtttcgacgcggcgttggaatattaggatggatgatatatatgcgattcctgatgatccttgatgagttcttggggaatctactttttgtaaagatcatctcaatcctttaggcttggatagcggctattataataagctacttcaataagttgtctgtttctttcagcttactcccaataatctggattataataattccaaactgaaagaaatagggcctaacgcatgtgtgtgtaaccatgcactcataaccaggggtttgcaatttcgaaacaggagtttttgctggtgggggccgaaagaatcgaaatcaccgaaatttcagtatttttttggccgatatttttggaaatttgatgactcttgaatgaatttgaataaacttcgaccaaattcaaaaaaaaaaccaaaaatttcggacgagatatgtgcttgccggtgaggagcgaaattaccgaaattttgaaaattttcccgatttcattccaaaattgcaatcactgctcgtaactccacgtactactatatataccaaatgaaattccatcatatagaaaaacagttatttttgcaaggaaatagtgaaatttctatacatataatactttggttctgatcaaaatggcaagtttgcctgttttatattaagaactgaaaaactgacaattttaaccaacatatttaattagcatatagaaaaatttaatgaaacatcggtatatatatggttattttcatgcatagatgcatgcacccaattaacaaaaccgaggtgcagtgcacctgaagaaaaaggagaagagttaaaagtggtaagatctgatgtgcattaaggagaaaggattgtgtatagctagagcgcacatgcatagcagatgtctaacctggtgtgtgatggaaaattaacaacttcaacaaaagttaagatctgttgccatgatcgatcactaagacatatacatacatatatgccaagaggccctgcacatatgcagcagatagccaagactcttacaccatcctatactgtaaagtgttgtgctttccggccgcctctagaagatatgagaatttgtgctcgtgacaaatataatgttgagctaggtagccaaagcaaaccaggaataatgggctccaatgctgtgctttctcttcttttcttcaaaaggaaaactatgttatgcatcatatcttttgattccttggccctagctacttttattcttgatcagttgtaatatgtatgatctccactattttggtacaatttttttaatgacacaatgcaaaggtgtgcttagcgcgtgtcaaactcatatgtcctatgatgtgacagaaacattatcaatgttctttatcactacctccatttataaagacttcatttatggctatgaagctaaaaatgaagtatttttggatgacataatattagttacttgggaaattaaaagaatttttacaagataaattaaaatcttggaacttccatgcatggtaacaatacttcatttttagccctgttaccgagttatttaggcacacggtagacttccgttccctggtagtgcctgctgaaattgtaagtactgcagttttcttgaaaaaatatttgtagttattccaatgatctatattatatattggcgtagcacaaaaataatatattattgaacctaataaagttgtgcttgagcgaaaagaaattctctaaactttaatttacttatggcttgcgacaagatatattagttatttttatatgtagttagagtattgtcatgattattccgtaattaaataacacctagattatttgaatttcaactacatactgtgcttaacgtacgcaagttcttgtttattattttgagatttaatttccgctgcatattatatccgaagcaattttgaatttcaagctttgattttaggatcaattttaggggtgttatttttgtcactttgcccagctctcttttcgtcatgctaaaaacacaagtaaaaatctaccaacaatattgctagcattaaattaaactttaaaatttaaaacctttttagttcagagccacctctcgatgtggtggactggcaaggtgtacatgcttatcactactacctccatcccaaaaatatagtgacctagaattggatgtgacacaacctctatttaaatacattgtactgggatgtgtacgatgtgtctcatccagtcctagtttgcaatattttgggatgaagggagtagctagctagcagtcccattgtcttttaagctgttactaaaatttgaatttcaagacttaaattttgagttgattttggatttttaatcatagtttatttttcaccattcgcttttaaatttctaaggacacatatatatttttttaacattttttttgccgataagccattatagcttataatgagccatttccagttagttttagaaaaacagaagagctaggtttccagtcctattgtctactcacactgtgcaagctaggtagatgtagagtgtgaactttgcaggctgttgtagagttatcaaatctgttagtaatatgccttagagacaatcttagagataattgtatcacgtaccatgttttataaatttacaataaagtgttcctgataagttattattgatcaatgaatatgatttatacatgagattatctgtatatatatatgttacaatttctaaatgatccttatcaaatgtgaaacaaatatgattataagattcaactcatgtattaattgatgatcatgtttactagactatggtatggagatactaaatcgataatgtggacacgtgttggagaatatattgttggatagacccattgacacactgtcaggattattataatgtgatatcagttagtcttaattaattaggtgttggtgttgaatccttgcacctaatattatcatggttcctaattgtaatggcttacactgggactggtaaatgctattccataactgcttagttataaaggtagtcttccaatttgttattaagcatgtagtgggatgtaaataatcatgaagggatttttccatcccatataatgggagagatatcttctgagtatctcgatgtaatagattatgaaactgtatagccatttcgagatgcctgaagtgctggttaggatttgaataatctaatacaagatcgagtaattgagacgatggcacaaatctagctttgagcttgatcaataccataaggtaaaaggtgtcatacccatttacgcactaaaggttaagttgatatgatctttatgtttactcggtgggtcaattcgtttggctaagggttattgttgacatgtggactgaaaatggattttcaaattgcaaccgaaaatacatgaacctaaggggctgtgcacttaatgggttaaaacaagacaactggatatagaaataatagtgtcttaattcggatagaactcataatgggccttggggactgattaaaggtcctatatgttcaggagcgaggggccacataggtaagagacacacatgcatgtaaaccctagccaccactcttaatcacgggagtcaaaaccctagttgcgtgcaggtgctaccacatccacgcacgacgttcctccctagacgtgtggatacaagtagaggctttgctaattgatgttggaatgcgaggcggcaaacacgcaaggaggagacactcgcacaagaaggagatgatcgggttgctaagattgactacttcctcttcaccgacgcatgctacatatgattggtctgcaatgcctcttgttctgctgttcagctcatctagtagtaacaatccatgatatgttactcgcatggttcttggtttatatggtacaaaattttttttttacgttatcatagcatatactcgtaacctatatcatccttcttgtttgtatgatctggacattatctatatatgaagtacaaaaacacatgcatgagtacaagtacttgtggatactggtgtgtgagtgcgaatataagtgcctaccttatctatattaccaatataaaggtacaacctacaacatcataaagctcaacatgcaaagatgtcacatcattatccattagtaattattgcatcttaaacctcatgcaaaacatgttatatcttctatattttaaagctttcaaatacaagcatgttacaaagggtttcatggaaatattcttccttgccttgtggcacatctggaagcagagaaatgggctcatttttcataatattatgccttcatttcaatcctggagatcctttttatgaatgaagttcttctgtatatgtgcagaatgaaggagcctctaaagcaaatagtttttgattggttacaaactctgtattattttggtgatttccttaattataaccatgtacatattttttattatttaatgaaattacactactaggcaaagtcctggtagtattcacagtaaaaaaatattatcccatataatttacataatatttcaagatatatctcttcatcattttatatagttcatccccatttagttaatattttctatcttctatcattaaaccatatcattttaattgtttatagcctttagatgattaatctatagttcgaattatttttctcattttcttaacccatgaagccacattaccttacttttatttttcaattatcaatctatataatatttaaattatcataaaaccacatcaattcaatggtttatagacttttcaatgattgataaaaaatacaaattcacatctagctacgttacacactattttttattattatcatattaaactttcgtagcaacgcacagggtttcatgtagggattaagatgaacacggccggatagtatcttggctttactaataagccatgtcatcaagtcaataattgagcaaactaattaagtatcaacgcttatcttttggagaagactaaatattttctttagctacttatataagtatctattaatctagctcctttagaaactatatgtgcgtcgatcttcttttatgcggatcatgcattattgcaatagcaagattattttagtcagatatactgatacagaggaatgagaatatatagtgctatatatatttgccaaaaggagtgagaatatatatgagtgagaggtagatgccagcatgacgtatagtcgatttgtttttcaatctgtgtattcatgacgtctagaggatttgcatatatgtgccaatgcagttattatatacttaaagtgcattatttgcgtttgcatttagtaagaccaataattgaccaaaccaacacacgcagatatggcggcccattacgaacgtttctttttcatggaaagagagacgggcatttgcaaaacggatatgtcttcacttaggccactaaataactactacatctgtcccaaattataccaagttttaatcatatactccctccgtcccaaaatatttgacaccgttgacttttaaaacatgtttgaccattcatcttattaaaataattaagtaattattaattcttttcctatcatttgattcattgttaaatataatactaccacgcactcaagtttttgaataatattcataaaattttttaaatgagacgaacggtaaaatatatttaactaattcaacggcgtcaaatattcagggaaggatggagtaggacatactggtttgtttcaaaatacaacaattctaaagtcataaaacaaatgatattccatatacgtaacgagaagttattatattttgggtcagagtagtactaattgattaattaaacataacactaattaactacctattaacttaagaaaaaaaaagtctaaactactttcgaggagacctcttcatgggcatataaaaattagtctaaactaccttctcgcctctatgccattggccaaactggccacattgactgcctaataggctgatactccctctgtactataaaaattcaaattttgcggataaatttgagcatagtatacgtcgagaaacatccacgggatttgagtttttatgagacaggatgtacgtgtgttgtctgccttcgcctccatccaactggccctagtgatgatgtgatcattgagtataggcatataactacaataaggaatacaaaatgttcctaagatgcacaatatttatgttagatttatgagatatttaactatttgccacacttatacgagtgacaataaaggatttaccactgaacctatatgtaacagacacatgaggtccacatgttatagactgcgagtggtaaatccttaattgccacatcttaaaagtgataaatagttaaatgcccctagatttataggttgtgtattcgagataactatatatcataataattgagtcgtatttcttaggattatatagccatgtataggattgtatttctaatatattcctctaattgaagatcctttgtattaatacatgattaccccgacgccccctcccctatcccacattgggtgaaaggtgtttcccctaatgcattctacatgaacccagataataataatgtacttcttcatgatcaacagaaccctcatcttgacttaattatgcgcatattatgctacgtgaaaggcaccctcaatactggcctccacatcggcatcggtccattcaatccttgactgcgtactctaatacggattgggcttgttgccttgattcatggtgctatattttcgtatcatgtgtcttcctcagtgatgatctagtttattggtcttccaagcgcaagacgatggtctcccactctggtgctaagacggaatatcgtgcgatggctcatgctgctgctgatcagtgttctcgactgcgctagctcctatatgaacttcatgttccgttcacttttgcaccagttgtctattacaacaactttaatgttgtttgtataacagccaacctagtgcatcatcctcacatgaactacatcaggattgatctcctttgaataaaattgttcttgcaatgttctctcatttgaattacagagatcatcgaccacacgtcacaattagtatggtatcgtttgtggtgtaacgattcgatggtgtcctagacttgttttagttggaagcacttcatcaacatcgcaatcaaccaaagtaggattatttatcctctttatcagaagattgggccacaagtgacaggtaattagttgtcttatctcggtaaaaaaattagccgtcttatcccccgccatgtcggttgccaccaccgccacgctagctatcgtctctggttcagtccgtcgacttggcctccgccgtgctgaccaccaccttggccatgttggctgccacctcctccacattggccatcgacttagccaccaaccctgatatcagtcccctcgtatacatgcgctctgccaagctaatcgcctctgcctccatttcaactgccccagctctcgtatacactattgttgctgctatcgccctcatcctccttgaagccctgcttcggcggcatggcgttggagaggtcgtcgttagttccccatttttcagtaggtgtggtggtggtggtggcgtaggcgagaggaaatccccatccgtggacacctcttggtgccccaactcactgctagtgatgatgtactgatattttcatgggaatcaatggctatctgaaacagagaagagagaagtgcggcgagaacagccttaagatcccggatcgcataggaaaataagcctatttttgcatgcggctccttaagtggcccatccgcgaaaatattttttttcacgtgagtctattaaggagctgtatgtgaaaacagagatcgaattttataggagccaccagttaattacggctcttcctgacgaacttaatgcatactccctctgtttcaaaatgtttgacaccgttgactttttagcatatgcttgaccgttcgtcttattaaaaaaaattgtaaaatatgtaaaactatatgtgtatatgaaagtatatttaaccatgaatcaaatgatatgaaaagaataaataattacttaaattttttgaataagacgaatggtcaaacacatacttaaaatgtcaacggtgttaaatattttgaaacggagggagtactatttttcttttgggcggctagtgtaattaagaggagacagtgaaaaccgtcttttaactagtgttgatgaataaaaaagattaagagtggccttcaaaagtctttgatacatttagttatgctgttttatttaagggtgatcgatacgtagtgagaaaataaagtactagcggtgctgatttattcctttagtcccagattcacccttcgcataattagcaatatggatacataagatagcttttgaattgacacatttaccaagggtaattaaccacgtgcttcttatatagctggaggcaattcaccaagttaattacctacagctggagacaattaacgtcgtagtgagtagtgacccttgcataaattaataatcctaatatggatccagtgtggtgggttgcacttttttcttttgtatcaagtactaaatccgccctttcattttctctataaattgatgatacgtgcatgcaatataattaatggtgatataattgagtttgtgaatatgaaagttggccaagatattgatcgatttaagaaattgatgatttgggatttggtactttatgtatatgcccattacatatactgggttgacacaatttgagtcagagatcgtgataactggacacgtgatggcagtccgatatgtacgtcgtcgtacttgttatcaaagagagacaatgtgctaataacgaacaggctcaagagggtattggttgagttttgtttttttttttttggttaggagtacttaactgtgtatatgcccattacatatactgggttgacacaatttgagtctatgatataggaagaaattgtgtttgaaatatggcttttgttttatttgttcataccgctacttaaaaaatgattttatttctaacgccacacttcttaattcgttggtggatgaaagaaaaaacgctagtgaaaatacaagagattcctagttagtgaccacttgtgaaaaatacattttcgcaagcggtcgtcttaatatgtccatttgcaaaaataactctatttttatgtgtaatctcttaagtggcactaaataacaccgcccgtaaaaagatttggctctcaattcccacgcatacaccttcctcatccgcttcctcctcgtccttcctcatcctaccccatagccacacacttctctcctccaccttccacaccagtggtggcatccactagcggcgggcggagcttgggcgaggctcataggttgtgtcaaagatcgggcgaggcgcgcaaacggcggcgacttggtttggcggcggatggaccagtggcagagctcgagcgaggcacgcatggtgactcatgtgggcggcagtccggccactgtaactcgcgtggtgatgagaatactaggtcctgatcttccgataggtattgataactctcgatttggtggaaacttgacacacacgatctggcttccgatcaacacgatctgaaccctgcaatcgtagcatcacatctcctctggttatcacccgtgtactaccgggttgacctcgctgagaaggctaatccctgcatacgaatcgaagaacacaagcaagaataagatatattgcaacacaattgcatataaatgattaagcactccaatttggggttccataaaccgaactagcggcgaaactgcaatggcagaaataatctaagcaaaacccaactctaaactatgaaagctactgaacaaatatgatttgggacgtcctagggttgccctaggacacacaccgcattggacttagcccacgacacaattacatggcccaataccaaatcagattcggactagatgatgtatgtggcttgttttgtagattcccgacagctcggtgagatttttgatgtgagaccaacaccatctcaaagtatactccataaactttccaacaagtgcttatgggccccgagattccttatagatcagtggctaagtccgtttgaagttgatgctgtcaggaggtccgaatccgaatccaaaacgtgtagaacttttctcttgttttttgtggaccaaaaatgatgtggtgacgtaggagtggacttggagaaggtcttggtttggtctccaatcaactttttttatcatccatgcattccttacactcgttcgcttttccttcatccacacaactacctctgcaaatgagaagatataaaactcatggtgtaataatgtttgttcaaatatataataagtaaatttaacattgaacatatcactactaggaaaacaacttttcatggtgtttgggaaaattttttcctggcggctacgagatgaaaccgctagtgcaaaaaatagaggggatggggggtggggggtcatgggctgtgacaaaaacctatcttccctagcaaccgccttaagctggccgctagcgaagatatggtatttttactagcggccctcttaacttgacgctagtgaaaacaccaatcttcgttggccgagtgacgatgtcggcctctagcgaaaatgaacctattttcgctggtggtaggaacagtattttgcagtattaaaatcccacctacccggtgctgcccacagaaacactcgctattttctcctcctctctccctccgctcctctttctctcctccttctcctccgtctccccctccctccccacaggcggcggcggcggctcaggcggcggcgctcaggcgggcagagctgcgatgctgcacggtggcggcgacgacggcgatgcttgggcgggccggagagctgcgatgcgaggcgggcgcaaccacggtggacgtgcgatgggaggcgggcgtgcggcaacggcgacacgaggtgggcgcaaccacggcggaccagctatggcaacgacgatgaccttgggccgcgggtcctcagccaggaggggctcgggcgcgggcgcggcatatacggccgccgtagggccgtgtgcggcgaatccaaccgtgggaggggcgcgtgcggcggattgggccgtggtgacccagctctccctcccctccctctctcagatccggtggtgaccttgccttcccctccccttcaggcgacgtcagctccctccagcctcgaggcggcgacgatgatggtgacagggggcggatccggtggtgcgatggttggagaccggcgacgtcctccctcccctttcatccctcttctccctctccctgatctggccgtagggagacggtggtggcagcaacctccatggtcgccggcaatgatgtttgcatgttgaaaatgctatgtgacaaatcgatgatatttggatcccgtgaaaaattgatgtttgcatgttcatgtttggatgttgatgtgaatatggattagacttgaatctgatcttgatgtggatttgaaaattgaaaatgcagcgggtttctgaatgtttttgctggcggttagagggtatgtggcatgtggttaattttattttttttcctcaaaatcaattatcgctggcggccggcatagcacaactgctagcaaaatttgattatcgctagcggtcctcataaggctgcagccagcgaagataattttcgctggccggctgtcttaagccggctgccagcgaagatacgtctttgctggcggctgacttaagacggccgccaacgaagatatgtctttgctggcagtcgataaccgccagcgaatattttgatcttcactggcctttgctttgtggcggcgccaaatgccgccagcgaagacccaaaatagccaccccaaaagatggttttcgtagtagtgtatgcatttttggttgatgaatactatataagttagtcatggtcatagttgtgtcctcatcatgtgggtatcggatttggcggtggcaattcgcgtgtgtgatggatccagcgctgatgactcacatgggcagcaaggcgcaagtggtagatctggggacggcaaccaagatccatcgccgacttctcccttctccaccatgacggtgttgcatgaatgcactgacaaccgtgctccgacgagacgtgtatcgtctgcctctttcttctttatatttgttcttcctgttctcttgcggatccatgttgtttgatccgtggatttaggaccatggaaatagttaaggagctagtgttgctgggggagcaggttttctgtaattgtttttaaaaagtgaagtatggtttagtaataaagttatcataaaactataggcttaacatcaatttaatgacaatacttggacgtttagaaatcaaccataacattagtgttaagaatttaaactccaaaatatatagtttttttataattttattattaaatctatacttatgcgatacttagccttaaacctgtaattttgtgataaatttattgtttaatctgtggttttgtgatacatcgccttaaatttatagttgtgtgataatttggtcaaaatacatgtagttctgtgaaatgtgctgacgctcatggtgtatgtttatatatgaaaaatgatgcaaaattttgaaagattagataatgaattcccaccatttttttattattctgtgtgagagactgacatgtgggtcccacgagttttattattttcaggatcaaattgccacgtaaacgccacgtcaatgccacatcagatgaagactaagtcaaattagccacgtaggcgccacgtcagccaaaa

SEQ ID NO: 17267 - DNA, 1994 bp, Oryza sativa
cacccataatgaaataaaatgagttgattccaatatactactatattctactcctcttggagtagtgtcatacactactacgaaaaccatctttcgtgggggccattttgtgtttccgctggcggaaatcgcagctgccagaaagcaaaggccagtgaaaatgtcgattttcgctagcggttatttaccgccagccaaaatgcatcttcgctagcggccgagaaaggaacgcccaccagcagagagatgtcttcactggcggtagccttaggacggccgccagcgaagacatgtctttgctggcggcggacataacgcagccgccagcaaagaagtatctccacttgcgttagccttaggtcggccgccagtgaagataattctttgctggcggctcacagtattttaggccacgtggcacgctaggaaaaatgaagtaaggcttctgtggatggacacgtggcccgacagcgaagatatggactgtcctagttctaacacgtggcccgccagtgaagatgcaatttttttaaaaaaattaaaacattattatatatactatttttccttttcttcgtgtgcgtatttcagagtcaggcatggttgatataactaattgagctatcgacagagtatgttctctttcgcgtattttagagccacgcattgaggatatatgaagcagaataatatacatatatataaatattcggaagcacctatatatatgtacattgacaaattaaattcgaccgacgacataacatttacaagtattttgaatgaattacaaaaccctagctatattatatgcctggtccagttagacagggattcgttctccggcagggctaagactccttcgttgtcgaaaaaccgcccaggctgatgtgcgcactcacggtggatgaagtagcacatgtccgcctgaatgttctgaatggatgtatcattgagctctctttcagacttggggaattttggaagctgcatcagatcatgacagaattaaggaaattaactattcacaataatacaagttagcgactaatttaacaagtgtgtattacttacctcgtcgtaattcgcacaatatttcccattaacccttaggaactcacaacagtaatatccgcatagtactgttcccaccggttgcttgtgatactttcaacatcaaaataattataaggtataaaaggttattacatggaaacacacaagcatttatgaaaattaagtagtactgtgtggcatccatatatatatgtacttaccggccacttattgcagacggatatgcgttctcttgagtttttgcgttgtccacctcgctggtaataccttttaaatgcactgtttcacggatataattaatttacgttcatcagaggttaaaacacgtcatgctaatatcttacttacagatcgataaatcttagaaattcctgataggtgttgctatctttgtcgagagaatccaagatgatgacttcattgtactttggatagagaagaaagactatccaatggtcgctgcaaacgaaattgttagtcgagccatgattatatgtatatactcttagtgcatatatattacaacttactcaaaggcatatggggcataaacacactccttgtcctgcgtagattcaagcgcaatagctacgtacgtagcgacatcaagcatcttttcaagatgcttttgtgctatgtaagctttcctctcttagggagtcatcgccttgatgtgttccggtagcttcttctcgtctagcgtgtatgtgtggcttacttatcctgcacgggtttaggtaggcgacaggctttttcatcgcttcggcttccgcgtaattcatcctaccaacaatggatgatcaaatgagctacgcatataggtgtagtgatctattaacacgttcaagtgtagcacttacagacaccagaaggcaatcaaattggcgtccagttgcttcccacggtagagggaatgc

SEQ ID NO: 17268 - DNA, 2776 bp, Oryza sativa
gtactgtagtttctattaattgctctgtctgaattgaattatgcagtgggtgaacaaatctttagtcaccaaggtaattaatgttctaggtggcaggatgtatgtacttaccaaggagggttggacacaacatacttttagttgccaattacttggtggcaaattataaatagtcaccaagcaaccttggttattagatatttttagttaccaagtaccacttggttctaaaaaatatatagttaccaacattttcttggtgactgttgcttttacatattgttaccaactatggttggtaagtaatgatattatctttagcaaccgaggagatcacatgttggttacaaaatacatttagcaaccgggttgtagccaccaagatgcgaccaaggttcattggtagcgaaaactcaatagcaaccagcttatagcttattgtcaccaaccaccttggtaactaatggtctgtttccttgtagtgcttggaagatgttggtggtaagtactacacttttttaatcattttaaatcatagagttttctgatttgtcaatgtcgaaagaaccttttttttcaaggcaggagagatgtgccaaatgcaaaacgaaaacaaatagttaatgctttattaacaaaaagcaaaaatggaaaactagagcgccatgtgatgagggaggttgctgagttattcaatgttcacattcgatctgttcagcgcacttggaagcaaggtaaaagttatcttgatcaaggcattacggttgatgtcaatgttgataatagaagacgcaattgcggccgtaagtgagttcaagtagatttatctgtgctagatagcattcctttaaaggaacgaacaacgcttcaagatctttgtgctcggttacatttgagtaaatacaaggtgcaaaatatgataaaagaaggtctcattaggcgtcattcgagtgctataaagtcacacttgacagatgcaaacaagaaagctaggttgcaatggtgtgtatccatgcttgatccaggtagcatgccaaataacccaatgtttaaggacatgtttgatgttgtttttattgatgaaaaatggttctatcttatgaggaaatctgagagctattatttgcgtaaaaatcaagtagagcctacacgtacgtgtagaagcaagaacaacatccctaaaatcatgttcttaactgccgttagtcgtccaagatttgatgccaacggagattgcacttttgatggaaatattgggtgttttcctctagttacttatgaacccgctaaaagaagtagcgttaaccggccagcagggacaatggaaatgaaacctatcgtatctattacgaaggaagttattagagatttcatgatcaacaagatattgcatgccattcgagttaagtggccacaagaagatatgaacaaacctatctatattcagcaagacaatgctcgtcctcatcttggaccaactgatcaattgtttcatgaagcttctcaacaagatggatttgatattcaacttatatgtcaaccgccaaattcaccggatttgaacatcttagatttgggcttttttcgtgctatacaatctattcagtataagaaagttacgaaaacactagcagatcatgttaaagccgttgaagaggtactgccttttctcttttttccatttaaattcacaacaatttggttggagctaatgttgttcacatgaaacaggctttctaggactatctagttcacaagtccaatagaattttcttgacacttcaacttgttatgaaagagacaatgaaagtacaaggaggaaacaactacagaatgccacatatgaagaaagggacccttgaaagacagggttgccttcctttgcagatcaggtgtgagccatcagtggtagaaaccgctatgtctcagatctgaatagtctaccaagatgtctcaggtttgagcaattagaatctttgccatgtatgaatatctaacttgaatcatttcttttctttggaaaataagaaggtagaagaagctttaacatttctgttctaatctcatcaaattcaaaatcagaatgcaccttttggttatgcaagtctcgttcttcttcaatcacctcatcattgttgtcgccagcaccggtagtgacacactcctctttcgcaaaatacctaggtagaagaagcttccacatttctattttaatctcatcaaattcgtgaccagaatgtacctttttgttttgttcaacttcaaccacctcggcagcctcgtcatccatggagtcggcaaccacgaccacttcctcgccagcaatgtcgtccatggagtcggcgaccatgaccacttcctcgccggccgcgtcgtccatggagtcggcgaccacgtgcatttcctcgccggcagcgtcgtccatggagtcggcaaccacaagcagcgcttcctcgccggcctcgtcgtccatggagtcggcaaccacgagcagcacttcctcgctaacctcgtcgtccatggagtcggcgaccacgtgcacttcctcgccagtcgcgtcgtccatggagtcagcaaccaggagcagcacttcctcgccgacctcgtcgtccatggagtcggcgaccacatgcacttccttgccggccatgacgtccatggagtcgacgaccacgtgcatgtccaagactacaagctcttcctcgctcgcctcatccatggagtcgctagccatcgagtcctcatcgtctgcctcatacaagatgtcaggaacagg

SEQ ID NO: 17269 - DNA, 11110 bp, Oryza sativa
gaaacaataacaaacaaacataagagatacaatagctattttcatttgtcaccaaacaaaattgcgcaaactaagcttataggtttcagttgagagaagaatttacccatctgggacttcaatttggggagcagcagtaccatcaggcacgattacctccatgtggtcatcaatgagggccaattccagggagtcaaccgctgggtctgaaccatcggcgcagttgttggctggttgcggcaacaactgcggaggtggttgcagcaaagatggggccggaagcaccaagacgccggcggtggaggcgaggtcaacggcttgtcgcggtgacgctagggaaggtggttgcggcggaggggaaggtagcaccaagatgccggccgtgggtcgcagccagcggccggttgcgcccacgctgctgcatagttggccggccggcggtgcgtggatggggagcctggcgaccggccatgcccgagcgtcgatgaggttcccggcgaccggccgccgctgcgcatcgattgggatgctggcaaccggccgcgcccatgcgtcgatggggatcccggcgaccggccaccgccgcacgtcgatggggagccctgcgctcggccgcgcgtcgatggggagcccgtcgaccggccaccgccgctcatcgatggagagcccggcgaccggccgccgctgcgcgtcgatgggatccctgcgcccagcggcacatcgatggggagccaggcggtgggcggcacgtcggggactcgggcggccggccttccatcgatgggagtcggcgcttcactatgggcagatcgatttgggagtgcagggttagtgttttcagtcaacaggtgctagggtttattagtcaagagtattttagtcattaagaaaaaaatcaatacaccaaacggatgcttgtggacggcgatggcacgcagtagacgttcgggaaatcacggtagcatattattcaacttgataaagtcagtggtatattgtagaagtggaaaaactcagtagcattgagtggattctctctaaataaattggttgacagccaccgggcgtagtcaggctcaggcataggctacttaggccatggtccaacatggaatgtaaggcccaatgcaaactttaaatttggattaagtctatattccctccctcaacttatactcatgttgaattgaatccatcaaccgcaaaaccagatataacccgtcttccaactcacaaaaccattgcaaatcgactcgatcatcgggtgatttgagaggtggtttcgtcagacgtgccatcttcgcctccttgactagctgagtcagtacatgggctccatatatatgtcagtgtcctgtggtactcagtctacctccctagtgttcttcctcctccagccgctctatgcccatgcccatgcacgtattacgtccccagcattctaccttctctagccggtctcctattcgtgcccatgcattgtcgcactgcctctccttccaaattagttgcagaaatggatttctctcgatctcctttccttttcccccaagaaagccccatcgatatcgtgttaaatcccgcgaattttgcccccattcttatcccgacgaacttgggacgaactcgtcgaatccatttgtttctagcctagtctccctctccttcgcctatatatagcttgcccaaggtcctctcttccgattccaaccctagtccgagcgtgtcctgtgccctagctgcctccccacgcgcttgcaaaattcgcgggatttaaccactccagccgagccgcgccaccacatctgtcgttgcctaaggtggctgtcgccaccgtcaggttcggaagacgaaggagaagcttgaccgcacctccgcttcacttgggcatcgccggagcgccaccgtcgacatcaacccgaggccgccaccttttcaagctcggcgccggccactcctatcgccgctcgtcaatttgcaacggttttgagttggaggaaggttgtatccagttttgcagttgagggatgtgattcaactaggggcatgagctgagggaggcatagacttattccttgatttttcaccatgtaaatatttgttgggccaaaagtggaacgggccaggcatccgaggccttggaccatttttgaatccacccctgcagtatagtgatgtgatgcgaagatgtgatttatatgaatgattattaattttgtactatctgtttctgttgttaagagtgccgaaaagcattttggaaaagtacataagggaataaaggaaaagtgcatatgggcgccgcccagtactacgactagcactgctatagctccaacaagccgcgtcacttccccttgtgatgagaagaatgataaatttccctgtcagtcagtgtcaagcggagccatatacatggagtatataatactcgtcccaacatttaaccgtcggtctaacttaaataatttataaataaaataaaaaaagtcacgcataagaaattattcattgttttagcatctaacaataaaaaaaatattaatcttaattatttttaataaaacagacgatcaaacatttaacacgaaaatccataactatacttaaaataaaatggaggaagtactacatagtaatatactatatatatgcaatatgcatgcatcgtcctccacaccaacatggctaactccactcgtacgtacgtgttcgcctctaaatcacgagcactgtactgcatgtcacgtaccgatatctctagctttatatatctatctgttaaacatttctgatttatttagcaaaattaaaattaaaggaaaatgactttcgtgcctttatatgtagggtgcgttttaagcataagacggaaaaggaaaatttaattaaataggaggtacaattgatatcatcgatagacgcagtggcggagctacgtgcactctgcaggatcatatgaccccataggtttttgcaaaataacccaaaaactattgatatttgcgttgcaacaatagaaaacttgaaattttatagctttgaccccacattatttgctgctggctccaccaatagaaaacttggaattttatagctttgaccccacattatttgctgctggctccgccactgaaaatatagaggtatatgaatgtatgcattaaatattaatgcttatacatattgttagatgcaggggcgaaaacaaacctatggtagcttggcttgagctcgaactctacctctataatcatgcttaaaataagtccccttaaatcaccatatatatacgatcttttgagaaaaatcaatatctctcgtgaattagtcgagtcctatttgactccaccgatatatggttgaacggatagagagtatttttgtaaatgctgcgtggcgtggacgcgtgcccgtgctgcgtgcgagcgtggtccatgccgcgggggaggcggcagcaagatgccgatacgaattatgatacgaatacgatggagagatcgatatccccgccgcaacttgctcgcgatcgatcttgtagccgccgccggcgacgacctctctttcggctggatcggacgcacacatcgatcgatccatacgtacggccatcgatcgaatagaatatgctcttctcgtgacgtggactagattcccgatcttccgaaagattctgatagtcaatgatttgaacggagtcgcgacacaaatcgatctggcttcttaaacgaacacgctcttgagccccgcaatcgcagtaccacgtctcctctggttatcacccatatcgaaacgcgtatgacctcgccgagaggctaatccctgtttgcgaatcgaagaacacaaacaagaagaaggaagaatacaaccaaaattgcagatgaatgattaagctcacaagttggggtcttacaaaccgatctagcagcgaaactgttcttggcagaataatctaagcaaaacccaaaccttaaaagttatggtgggtactgatatatagagtttagggtcatgcaaccaacccttgacgcaacactaatgggttccaactaacacgatacgcggtccaaaggcctaaatacggtgacgcagcaccggaacagattcaggacgtcaacttgttcggtcgattttcattgactcggaaataatttggacgtgggaccaaaaccattggaaatgttatcttcttagctttctatcatataaagaacgtcccaatccgagcacgtatgcgacctgggcgtctgttttagtgcagattggtcctggactccaaattgcacttgaagttgacttagtttgggtctccaccttgacttggacgtcctcgatgatcctccatgactctagttacttctccaagtgtctccttgtcctcttcattatttctaatcacaatataatcattaggtagaaatctattttcaaattcgtacaaagaagaacataggaacgagcttacctctaaattcaattgtagcgcgcgagctcttgttatcgatccttaaatgaccggtggaggattgttgtgtgtatccgaagaagtgatgtccgtattatctcgtttgactttttttagtcaaacaagtttggtaaaatttatagcaaaataaagtactaatattttcaatacaaaacaaacattgtatcaaaacatattcaatgttgaatttaataaaactaattttatatcatgaatgtggctaattatttatataaatttaattaaattaaaaaactttaattagaaaaaaaagtaaaacggcttataatatgaaacggagagagtggctttttgcttctcggccggtcagataggagctagccacgggcccagccggccggccgccggcatatctcttcaaagccaccgtcatcgccgtcgacgtcgaatcgatcgatcggaattgccttttgcatcgctataatgcatgcatgggtttgcggcgagcgaggccggtgcgtagctgaagtgccgtcgaccacagtatagtaatccactcttctttttaactgtcggcatagccgccaccggcgcagccatgcttggagccttggagccaggcaaaaatgttttgagaataatctagtcgagacaggcagtttaggtcatgcttgattcactttaggatcattataatctgaattattagtagtaagctgaaacaaacatatagtttattttgacagattattataatctataagccagattattataatttggtaattcactctaaaggtgttttttctatattattgggtggctaacaactaacatacaactaataatccaaagaaacaaatagttaagaggttattcgatatcggtttattataatccagcttatagtaatctggcttaataatctaaattacgaacaagcagggcctaatttgggtggctagcctgcgaatattgttttttcatgcatgcaacgaataattatgataaggacacacaacatatacacgacaaaaatgtatacatgaaacaaataattccgggtgtctctccttcgtactacctctattttttaatagatgctgccgttagacttttttttacatgtttgaccattcgtcttatttaaaaattttatacaaatatataagatataaatcacacttaaagtactatgaatgataaaataactcataacaaaataaataataattacgtaaattttttgaataatacgaatggtcaaacatgtgagaaaaagtcaacggcatcatctattataaaacagagggagtacctgttactaccacactcacaaatcgcaaatgcgtaaacgtctcctaacacacgctgagaaccccgaacacacatcactgtgcacgcacacctatagacgtgtgcttaacacacactcaaaatagacctaagcctgcaacaattctcttataaaattactaccacagttttggccttccgcgataaggcacttttgttgagatcagagaaacttcgtcatggttcgtgtgatggtcttgtaacgaaaggatatcattgtagaagctccgtctgtaattacctacagccgtgataaaaaaggggtcatccatcacaaatgttcatgacgaatcgatgcagttgtagcatttctaggacgaaactacttcgtcaccgtgtgctagctcgactctcttctcatatttacagataggactctctaactattggcccataaagacactgcctaccagattcctatgttttcctccaaatcaaaagagctcctaatatataatttttcacaacattagtgacaactctatttgttgccatcaccactttttatataccacaaagaccttaagtcgtcaccaaaatcagccaaggatgaattttacgatagttttttttaaaaaatttcatgataatcgttctgtcgcagtaattcctatatatggataacacatccatgtacgtatcagcaccaagatttaaatccttagacgtacataaatacacccacgactccactaacacaacactagtgcttcctttgatacaatgttttattttttaaaaataataacgtgattttaagaacactttttaagtgatttttagtcatcttcctagcaataatgaaaagaggacggacaaaagtgacaaaaaaaactttttttagacaaatcaaaatcaaaatcaacaagtttataaaacaaaaattgcgataaacgtatattatattaatgccagaattaaatatcaagaataactaaccctaaatacgagtgcatataccaagttttagagtacataaacttgttgtaagtacgagcacacatgccaaccctagaacttttaatcgggtggacaagttacaccataagtaaccttaccagctgagctagatatatatgttaagttggtggaaaataactttttagatgtgttgcggacatttgagctgtctataataataattatttttatttgattattagagatggtgtgatgaggatgaagattaagttggcgcacgtaaaacgagaaagtcattaacatatgattaattaagttttaattattacaaacttgataaatagatatatttgatatttcaaagcaacttctatatagaaagatttcgcacggaacgtaccgtatagtagttttaaaaagcgtgctaatagaaattaaaccgagataaaatctaaatcttaatcagaaaacaacaggtgtgttcccgtcatacagtgaatcgagtaatccattaaccaactaattcttcaaactaagcatgcattttgatcattggggaccattggatgtacttggtgttcatggtgacgatgatatattggttagtgtcctttcctatgttgccatatactccctccctccgtttcgaaatatttgacaccgttgacttttaccacatgtttgaccgttcgtcttattcaaaaacttttatgaaatatgtaaaattatatgtctacataaaaatatatttaataatgaatcaaatgataggaaaaaaattaataattactgaataagacgaatagtcaaacatatgcttaaaaagtcaatggcgtcaaacacatttcgaaacggagggagtatatatgagaccaggtatatatgttagctccactgcccactttattgtgaacgaattattgttgggccatgctagtctgatctacttttcctttgcggcgcctcgaaccagtgctgtgctgtgctggccatcgatgcagccatcaaataatggaaagaagtatagattccatcatgcgatcaggctgatgatggatatggagatcgatcgcctgaatgaatatatgctggatcactagctagctatctagctgcatgctttaatttgacgatttgtgcatgtccaccctgtatatcatatgcatacaattagtttaatttttttcagatgtgtaaaacatatggactataataagccacgtttgagtgccacttacctactgcacaatcaagtttcagaaatcagattaatttgtactagatgactgaaaagtcactactattctgcaagtgtatgcaataatgtcagaaatctgctggcatattcctgcagggagatcatcagttgttcatcatgttttcttttccactgatgtgcatgaccgtcaattattcatcaagttttcttttccactgatctatatgatgtttcaccaaaaccatactgtttgaagcatcacattttcttctccatatatatgatgtttctccaaagccatactgtttgaagaattatgtgtttactccttattatgagttggctttattatttatgttattcttattgcttaaatgcttgctatttttgagagaatattataataattagatgtagcttcattgaagcaaaggccgaatttaattccattataaaaagaaaactgtttgaagcattgtcgtcacacatatactgttaatttgctcccgtgcatctttaccagttcatagtagcatcgttgccgggttaataagtaaccaacggtagtttttgcaaaatgctaagagacaattcaatatctttttttctatattgctcgttttgcatggcaatgtatttcctttgtttctaatatcctctccccaaaagtccaaaatgctaaaaatatttttggtaattaacttgggttctacctatatctttggaaaaaaaaactggttttacttagtgttagtatactatgttggtcaatttagtgttaccggaatgataaaatatttgattaaaaaaatgtctaacatcatgtacgctatttcttctcgtgttccaattagcttcaatatcagtttatcactactaaaaaattgatttttcatggcgtttggaaaatatttttcatagcagccacgtggaaaaaccgccagcgcagaaaatcgtgggggtgggggtcaagggccgccagcggaaacacatcttcgctagcggtctatttaagaaggccgccagcgaagataggatggaagagatgttgcgtcatgctgaacctgaggatgttgctgggtccgctcgtgggttggataactttgatgcattgaaaaaggcagcgaatgatcttttgtacgatgaggcaaagggctgtgagaaggatttcacattgttgcggacagtgcttgagcttatgagattgaaggccagaaatggttggtccgacagtagttttaacgacttgttggttctgttgaagaaactttttccgcaacccaactccctgccaacaagcacctatgaagcgaagaagcttatatgccctttgtcactgggtgtgcgaaagatacacgcgtgtgttaacaactgtatcctattccgtaaagagtacgaggatttggacagatgtacaacatgcaagaatagtcgatacaaaacaagccgtagccagtccgagggtctggatgttgcccttgacgatgtagaagagtccgatccatgcaaagacagtaacaaaaagaagattccccagcttgtcatatggtaccttccggtgaaagatcgtttgaagtgtttgttctcaaacccgagggatgccgaattgatgcgctggcatcatgaaaagcgaaaaaaggatgggatgattcgacatcctgtagatgcaagccagtggaaggaatttgacataaagtatcataagtttgtagaggacccaagaaacgtaaggtttgcattgagcaccgatggaatgaatccattcggtgacttgagaagctcacacagcacgtgccagtactcctaaccatgtacaacctcccaacgtgggtgtgtcagaaaaggaagtatatcttgttgaccatccttgtatagggaccacaacaccctggcaatgacatggatgtgtttctagagcctttgctggaggatatgcgcgatttgtgggaacacgggatccgagtttgggacgaattcctgcgggagtacttcacgctacatgcaattatctttgtcaccgtcaacgacttgcccgcactgttttccctattgggacagatcaagggaaagacgggttgcattatttgtgtggatggtaccgtgtacaggtatcttaagcgatcgaagaagctagtgtacatgcggcaccgacgtttcttacgaaagaatcactcgtaccgctcccaagcagaatatttcgacggtactattgagaaaggtgtagcaccagaaccatggaagggtgataaagtgttcagaatgaccaaaaacctgaaggttgtttttgggaaggtaaaaaagaaggaaacaaataagcgaaagagaaatgatgccgaagtgccagcaagccctagcgtgccattcaagaagcactccattttctttaagtaccttccgtactggaaagatttagacatacgccattctatcgatgtcatgcacctagagaaaaatgtcttcgatagcaccattgggactatactggaaagatttagaccaaggatgggctaaaatcacgtaaggacctcgtggatatgcaaataaggaaagggcttcatcctgtggatgaaggtaataatggaaaagtgtacctaccgccttcttgctacaccttgacaagagccgagaaaatggcattgtgcaaatccctacatggggtgagaatgcctactggcttctcctcaaacattaagcgactagtgtcgatgaaggatctgtcgctttcaggctacaattcccatgattgtcatgtaatgctcacagtattcctcgcgattgcaattagagcagtcgaaccaattcacgtaaagatggtcatcacaaagctctgttatttcttcaattccatatctcagaaagtaattgatcctgaagagttaggtcctctccggactttcgctatacagacagtgtgcgagcttgagatgtgtttcccaccatcatttttcgatatgatgcaacacctcatagttcatatcatgcctcagataattgcacttgggcccctgtacctgcatcagatgtggctttttgaacgatacatgtccattctaaaaggctacgtacggaaccgcgcccacccagagggatccatgatagagggatacacaaccgaggaggtcgttgagtgttgcattgattacctaaaagatggaaagcaattggtt

SEQ ID NO: 17270 - DNA, 5925 bp, Oryza sativa
  unsure (1)..(5925): unsure at all n locations
tgcaaatccctacatggggtgagaatgcctactggcttctcctcaaacattaagcgactagtgtcgatgaaggatctgtcgctttcaggctacaattcccatgattgtcatgtaatgctcacagtattcctcgcgattgcaattagagcagtcgaaccaattcacgtaaagatggtcatcacaaagctctgttatttcttcaattccatatctcagaaagtaattgatcctgaagagttaggtcctctccggactttcgctatacagacagtgtgcgagcttgagatgtgtttcccaccatcatttttcgatatgatgcaacacctcatagttcatatcatgcctcagataattgcacttgggcccctgtacctgcatcagatgtggccttttgaacgatacatgtccattctaaaaggctacgtacggaaccgcgcccacccagagggatccatgatagagggatacacaaccgaggaggtcgttgagtgttgcattgattacctaaaagatgggaaagcaattggtttaccggtacctcgacatgaaggtagattatctgggaaaggaacaaaagggaagaaaagaatccacgacaatgactacaaaaaagtgaaagatgctcatttcactgtgctgcagcaactcgcaatagtggagccgtacatagagcaacacctgcatgaattacaagcaacaaatgtgggtcgatctaatagatggatcatgaagaaacacaagcatcactttactgaatggttcaagaacctcgatctaccagatggccataccatggaaaaaagatcaattaaaatgctagctgacgggccatcaagtgtgtatacctcgtggcaagcatacgatctgaatggatacacgttttacacaaaagcgaaagacaaaaggagtgcatgccaaaacagtggcgttcgcgtagaagcaatcgacacaactgagcaaaagagcacatactacggattcatagaagaaatctgcgaactagactacgggccaaatatgcagattccactgtttcggtgccaatgggtgaaacacccagccggcgtgtctgtggacaactttgggctgacaatagttgactttgaaaatgtaggcacaaggatgacccatgggtgcttgccgatcgggtcgctcaagttttctatgtgacagacccatctcatttgaagaaagacatagttatttcgggaaaacaaaggattttgggagttgatgatgtcgaagatgtcgaggcatacaatcaatatgagaacatgacactattcatagattttcgaaacaagatattacgcgtcgaagaatcaattggtgaatcgccgaagccatacatgagagatgaaggtgtggggaaaagtgttagatgctaattcattatatatgtatcatgttggacgtatcgatgaattttaatgtattataatgcgtgacaatgatggatgagatgaatttttgtatatggaatatggtgacatgataattgttggatcaagaaatagtttggtataaatttatttgtatgcatgcatttaaaaaatatcaggcgcaaacattaaaaaatcatattttatttttttttgataaattaagcatatctgtgtaaaaataaataaaattattttttcagttgggaatgacatgtggggccaaagggtttttgctggcggccggctttgcccaccgctagcaaaaactgttttcgctagcggcccgcataagctaccgccagcaaaaaccgttttcacttgcggcccacataagcttgccgccagcgaaaacccttttcgctagcggcccacggaatcctccgccagcgaaaatgttttcgctagcggtcggcgcgttcctccgccagcgaagatttcttcgcctataagtagctagcgcgcgcggctgaaaatttcctaagtcccgaaggcgcgcgaaccctaaaatttgtgccgccaggctgccaaaatttcgagcgccgccgccagcgataaccctagcgcccaccaccgtcgnctgctcctgcttcatttgcgccatgctgcattcggacacagcttcttcattcgcgccttcaccgccgccgncggctacttattctctcggccngacgacgtcgncgttagatccattcgcacctcctctccaccaccgccgatagatccagcttctctccgaccgacggccaccgcatcctctttcttttcgccgcatcttcatggattggcccaccgtctctaccaccgccgccgccagatcgagctccacctctcccccggctcctccttcctccacctcgggagttgtcgccgccaccgggactcgtccgctggctcctcttctccgccgccgccgccgactcctcctcctaccgccgctgccaagaccgccgccgggacctcctcttcctccgccggttcctcgtcgtcgacgccgcctccacctcaggagtcatcactaccgccgggtcctcgttgtcgacgccgccgccgccgggtcctcgtcgtcgacgccgggaccagctccgccgcctcttcctcctccgcgccaccgccgtcgccgccgcaccggaactccacggtgagccgtgacgagaagccgaggtacaccccctcctctgctcctcctccccattctgtaaaattgatgtatgatgaatgtgatgtgagatgaattgatgcatgatgaatgtgataaaattgatggatgatgaatgtgatgtgagatgaattgatggctgaattgggatgaattttttatgaatgttaattggtggtgaaaatttgggtggatgcagtttttttttttgtgttgatagaggcatgtatgagtttgtgcagcctctgaattttttgtgcaccaactaaaatcgatgtgcagccactgaattgtatcgatgatagaggcatgtatgagtactgtcctttgttttcttgttgcaaatgtgatttaatttgtacaatcaaaattgatcttgtgctcaacatattaagaaaaagaattgttctgctgttgcacttttttccaaaatgaaatggacctgtacatattgtacatatgtattgctgcactttttttccaaaatgaaatgcactttcttttgttcaggcctatgctgttatatatatatatatatatatatatatatatatatatatatgctgatctggatatgatgcattgagatgactgttgggtgaatatttagatgcacaaatttgttagtttgactgaaattgagtaattcgttagtttgatactatggcgatcaaaatgtgttgtttgaaatttagttcaaatgaaagaattgataaattggccgcagaattttggtggattggtcagtgtagtccatggacggaaccgatctagacaccaaaattctccatgcattttgtattctgtcattctttgataattaaggaacttaatttggtttagggtttgaaatttagttcaaatggaagaattgatagattggctgtagatttactgtagttcctaggttatcaaaccatcacagaatacaaaatgcatggggaattatagtggatttgtcagtgtcgtccatggacggaaccgacttagacaccataattctccatgcattttgtattctgtcattctttgataattaggtagtttgaaatgatcagggttggtgaattgtaatattgatgtcgttgccgatctcattgattggtaacaatatttatagttgtagtacaaaattagtatctaaattttgccttctttttggatttacaataagaaaatgattccattttgcaactaacattaattcaccttcaagcgatatcaatggacaaacccacccaagagcaacccacgggtgacaagggcaaggaaactcagctagtcatggaggaagatatttgcacgcaagtagtcgcggaggaatcttcgtcgtctagctcaagttaaccaggtagtggatcgtatcactcaccgagtgaccaccatccttctccggcaaggaagagaaagggcggtagcaacaaatgaagttgactccgactacgttccgcccgaactggtggtacgtagcatataatatatgtttagttccaatcatattaactgcgaactatggattttaattaaagtcacgttatttgcaaacaatagttgaatgctccacgtcgctccaaaaggaaagcccaagccgcaactgaacctgaagctgtagctatagccgtcgtgtgcacaacagctttaagcaaacccaagaaaaggaggggcgagcgagggaagaacatattgttgaaggaagtaagcgtgctgacgcggatgagtgagacaggggaacccctgtcaccggaagactcatgttcgaagtatagcaaccaatgtggggcggtggtcagggatatcgtggagatcacatggaaggattggaagaaagttccagagagtcgaaagaacagctgttggacatcgttgcaaagcaagtttgaatatccagaggggacagacaatgataaagccaaggattatgcgttgaagacaatggggaagctgtggcgaaattggaaaacggatctgaataagaaatatgtccaaaagggactcacgccgtttaaggactacggaaggataacacaggcccagtgggatgagttcgttacccttaagacatcggcggaagaaaaggagaagagccagaagatggctgagctagcaagaaggaatggatatccacatcatttgggatcaaccggttactggcaagcggtgaagaaatgggcaaaacaagatgaagagatggggaaggctgggaaacctgttcctatgaaaaatcacaacccatgaagcaggaacaccggccttcacccctgagggggatgtagtattcaaggatcagaagctccaggaggtagctgtcaagatgaagaacatcatcacgcagcaacaggccgggacgttcgtgccagatagagaccgggacgagctaacctatgccttgggcaaaccggagcactctggccatgtacggggagtttcctcaaagactaactggaaggatggattcaaacaggatgcttatacctacaagaagcgtgatcgctacaaggaagagattgactctcaggctagggcagcagcttgtgacgaatgcaacatatactggagtcaaaaaatgatgcacagtgtagctgttttagagcctgagccgagctatcctttcgatgttgtaacggaggatactccgtgcaagctcttgatttcggtcggcagggcaggaaagaaaatactcgttgcaactgggaggttcataccaggccacatgtttcattgccaagacattccggatgactacgccaaggtagaggtccggacggtcattgaggcttaccggatgcacgagctcgactttccaactactgagcagattgtgtaccttggagatgccatcgaccaattcatactatggcacaagaatgatattgaactagggtcaacggatggaactgatcgtccaccaaggataccggtgtcaccgtcgcatccaccagtcgtagcccgtccgagggatagtcctattgcttcaccccctagaccagagccaccagttgcatcacctctaggaccaaagccactagttgcatcatctcgaggaccagagccaccagttgcatcacctccagtaccagagccaccagttgcctcacctccagtaccggagcctcctgttgcatcacctcggacaaaaaaggatgcagaagaaccatcagagtctgtacaagcagagcctacaaagctagcggcgggtgaaattgaagcggtgcctgatcagccaatgcccgatcaaccagagcaatcgcaaccagagccatcgcaaccagaggaacctaagggtgccgatgtgctagtgatggtaaggacgcacaagcacaa

SEQ ID NO: 17271 - DNA, 609 bp, Oryza sativa
gacttttaaagcatgtgcacacaatattccagttctactgaacatcccacagccgcatgtactagtttgctctaaaggatcaccaacaactttgtactccttctcaaaggtacaattttcatctagactgccaattgccacaagatagcaattgttgccttccaatgccgtggtgcatgctaccatggatctttcatattcagcttgaaaagcttcgaatatgattggtgtgtatagcttgctagcttggattagcataggtgtcctcatttttattctgggtattttcttccttgattcaaattcagcatttagctcattttctcttttatcttccaccaccctttcaaaatgttgaagaaatcgaatgatatcaaaatcagatttgaaatgcctcttgagttcactatttacactctcacttaactgtgtacttctcatacctaatgtgaacacatccttcatgtaacattcagcccatttttctttcaccttgtatatactatccaaccaactttgcttgctcgcctttgcccttatggtgctaaatgcttgttcaaatgtttcctcatcttcgtactcaaacatacatgcactaaaatctgtgag

SEQ ID NO: 17272 - DNA, 5645 bp, Oryza sativa
tctatgaaatggcgcattctttgcgccattcaactgcatctttcttttcctctgaatttggcggactgtttcacaaatcaatagattcagttttggcactccattgcttgtcaagtgcaggtcaattccaacttttttcaaagcttctataacgagcctctgagattttggatcatgatcagaacatcgtgatggagtaatgcctgtcagaacaggtttcccacaagtttctaccccattttgcatgccactgcagaagaataaacaatagtaatcagatataaggagaattgctcattaagtaacaagatgaattcttcgaagagtaaattggcatccaaaaagtcattccccattccccttgttccaacaaaagaagtacaactaataagcaacatattattttgcatcctacaaattatgtattatatcaacacagatatttcatacgcatatgatatgcctatttgtgagacctaaaaatccctaggttataaaatacagtagaatgatagcagctgctatacacatgtttatttgaggcaatgttattaaggcggtatggtgaggtgtggtgatccaccaccgccttactgccatagtgagcgataatgaatatggcgtggcgacacctaacgtgcagtgaaaagatagaaagaataagaaatatgggctgtaaatacactaattgggtactctattcatcacagcgcagcccaatagtagtagcccatccaagcactcacctaacctaggcccactactttctctcaacctaccaggtagcaatttaaccctacccaacagcttccttcctagcagccaccacctcaccttcatccagatctctctcccctatcgtgcagcactgcagcaggctcctctcatccacctttctctctctctcctcgatgcagcaagcagaccatcctcctatcctctcttccttcttgcagccagcagcctcctctcctccaccttttctctctcatatggcacaacagcagcagtccctctactccacatcggcacaataaggggagagagcgccaccagggaggaccagcagcaagacagtggacttttcccctctgctcttaacctctctccttcagttcatacctgtaaaggggagaagcctaaggcggaaggacaccttgcccttccgtgaacgccacaacgctatagcgacgccttaataaccatgattggaggattatctccaaatcccacaaattacagtatttgataataatagccttttctaataaagaaataagccaaatcctgcaaatttggataatcgtaataaaaattctgacacccatcaatagttctatagagctaccaagctaacagccgcctttaccaccaatgttatagttaactcgttttgaccacaaacaagtttaggaactttacaagctaatcaggaaactgatgggctattggtggtgtccgttctctctctccctcaacgacgccccaagcatccaccgctgccagcagctgatggccccaggttatccagagaagcgacttgctggatctgatcatcaggccaagagcagctcgcaggatacagggtcggatttgtccttgtcgatcgagctcgctggtgttgggagtaccgtggagcttctggcccatcatgggagagagcagaccccgagaggggaatcgagttggagcaagtgagagaacagaagcctctggcccatttggcatcgtcatgcctcgattgaaacctgtgaatctcacactggtgtgctgctacttggtagctagagcatggaacatttggaaccccaccgctttctttgttggtgaagtgaaggagctgtgaagcaaagggacaaggaagcctggaaggtgatgaaggcttgagagctaggagctggagatcgatgtgttcaactaggagaaagagaggaagaagaggacagccaacttcttgatggaagaaagagtagttgagaataggcatagagtgggcatcagcatttaccacgggcgtgcacagtacatcatttttcaagtatcgtttttcacatatataaaataccaaatatgatctgataattagagtgaaaataattttattttgttcttttagttaccggattcggtgggttatcttcctataaaatcccgttgcaacgcacgggcatttagtaagtctagtaaaaattgatttgaccaaacaaaagactgcataggtatatggactgaagggatgaagtacagacaccaactaagcatgtgagttgaacgctcagtgctaatttcttttcaacactctaacactcctaccgatatttttgtgttggcctccgtcccaaaatatagcaatttttagctatgaacctggacacactgatgtccagattcatagctaaaaatacttatattttgggacggagggagtatgccactagctacagccagcagcggtggacatgcaaatgcatgaagtgaatgaattctccagcctgtacattaccaggttgacaatcgtattcacattaattgattatttttattcaaatatgtatttatcagttctgcatttgttcctgattaacaaagatagggaagggatcctagtttaacaacttaccattgttacgaatgttccttccttaacctttacccccataaaaacagcatataggaattgttgtcctatgcgttaatcctcatactaccggtaataaaagtaggaattgcgggagcttgactgttatccaagtgaggtgtaaactgcaaagagtggtgtattgctaaatagacaggtctacttgtcagcttgtaaaagtccagaagttgtgacaatcacaggaagctttgactagtccaaggtttagccccaaattcaacaaaaggcaaatcaaaatttggagggttgaactaaatgttctcataacatacatgccaggactaaaataataataaaatgattcaattttactaacatcagcaagatcagggtatttgaagctaatcatgaagctcagggacactaagataaatgttgtgcaattagtaagataaaactgtataatttgacccattcatgaaaaatgactacatggaggacggttggacatcattagcttgtaggttaaatggacaatcctacttttgagtcatggcatcgagatactatatctgaatcaataatcctattgagtatttgcctaatttgtattcgcatcggtaatactactaattcaaatccacatatttatcacttctatgtacgttcctgaatatctaataaagggaaactattaaggatagtctaagaaaatccactatccctccctttttttttgtcaccacgcaatataggtatcattgtcctacatattactgtatctcatattatcctaaacagaaaccaggacatggcgagaaaccagctggttcacgccaaaattggttcctgccaaaattgtgttccctgatcgaagcaagtgatacataaaaacctaacacaccatacctgcatcggaagttgttccaccaatgtcttagaaaaaaaaatagtcaatacaaccaccaaagtattcagttttcacatagttttgtgaaaaacatacttattcacgcctcatacacataatgacaaggctgcaagattcttgtaactagatcaatgatacaaactatttttattataaaaaaaacatggcataacatcgcaaattcacatgcagacatgaagtcaaccaaaaaataatcaaaattcacaagcaaccatctcccctaacaatcgcaaccacccatcgcacaatgaacccgaccatacaaccacattccccgcacagaattttacggcgcggcgctgaatcaaaccaaaattagaatatggaagcgtgaaattgcaatgtaccttcggttggtgacgaaggcgcagggcttgtagagcagctgcttggggtcgaagaggatgtgatcgaagcagtaggccgcgaagggcatcgccttggcgccgcaattcgccgcggagcaccccgccctggcagccgcaatctcgacagcagcgccgccgccattcacagccggatgaggaggagggggagcgccgccaccaacggcattcccggcgtcggggctggagccgtgctcccaccagtactcggcgtgcctcgcggagagctcgtcggcgagcgcccaaagctgggcgcggtagagggagtggagctgcaggaggccgcgccggcggcggcggatgacctcctcgcgtgacagcgccgcggcgcggcagagcttggcgtcgcccgaagcgccggcgagcaagaccggccgcggcggcggcggcggcgtgggtttatcggcggcgtggccgtcacccatcggaggcggtggcgggctagggtttcgaggggagggtttaatgagggagaaggtggtgggcctgatgaattcggcccgctcgattgggccggtctgtctgggcttatatggcctaattgtttttgaaaaaagtacaccaaaggtccctcaacttgtcatcgagttagaaaatcgtcctccaaccacacaaccggacacaacgtatcccccaacttacaaaaccaggacagactagatcctcggtagttttgaccccggttttatccgacgtagccactgagtcaccgtgggccccatatgtcaggatgccacgtcaacactctatctctctttcctcctctcccttcctctctctcacacttttctcctctcgaggagcacagccggcaagggagaagtgccggcgcggcgggcgcgccgatggctagcggggtaggagactaggagggctgccacgaccagcagggaggagtgcgacgggcggcagctggcgaaggagatggcacccagcgacagcctggaggcgaacgctatgccgctccactgcgccctgggtcctctccacttgcatcgcggtgacgacgcgagagcaggagggagtcgttggggcgaggaggttcgacggcctgccagcgatgtggtggcagggacgcggcggcggagacacgagagaaggagagggcggcggcggggcgaggcggcgtcggcgggcgagtgcggtggcggaaaggtggcggcggcggcggggcgaggcggcgtcgatgggcgagcgcggctgcggatggggagcagcggcgccgacgactccgcgccgctcggcctcattcttcgctcactgggagggatgactgaggtgagaggacgtcgccagacggttcagcggccagaccgaggtggcgagcatggacgacaacgaggcgtgcgagctggtgagcagcgcagaccttgtcatcagtggcgacatcgacgacgatggcgagggcatccgcgcctacctcctccgcctcccccaccggcgatctagcgccgccctgagcccgtgccgtcaccggccgagcgcgctgccgcctgtgcgagtgtttgactttggatgatcaggtcgccgtcgttacttatgtgccactcatactagttgattgcagtaaaacttgctgaaaaggtggtgtgttttttttaataatagaatataacattcggcctttgctcaaaagagctacagccaattattataaactagcactctaaaaacgagtgtaattcaaataaattgaaaacaccaaaaa

SEQ ID NO: 17273 - DNA, 18513 bp, Oryza sativa
cactatttacactctcacttaactgtgtacttctcatacctaatgtgaacacatccttcatgtaacattcagcccatttttctttcaccttgtatatactatccaaccaactttgcttgctcgcctttgcccttatggtgctaaatgcttgttcaaatgtttcctcatcttcgtactcaaacatacatgcactaaaatctgtgagaatactttgttcttcctcgttgtcttcggcagtctgtttgggagaattactggattcttcatcctcgagttcagctacatgtttaacagcattctgcatgatatggaaagtgcacaaaccatgccatgattctaaaaacactttcttaattgcttttcccattgcagaatcctgatcagtatagattgttttaggttgcttgccattatgtgcttttaggaaggtctcaaataaccacttgaaggactcatatgtctcatcatacagtagaacagcaccaaaaaccattgtttccctaaactgattgaacccaacaaatacaccaaaaggcctactttccttgtttgttccaaaagtagtgtcaaaactgacaacatcaccaaaatatgcatagtcagtgagcattttagcatcaacccagaatatgtttgctatttgctcctcactatccatctgcaatgcatattgaaatgatgggttcttagcaattttatcttgaaaatgcatgagcatgcttcctgcttgaccatataccatctctcgttggcgtttgccctgtaaataattcttggggtcacggagaatgtaattgagattaagtgagccaccaacttggatactagccaactgatgtgctgctttgggcccaatgcccgcatcgtcagctgtctcaatttcaaaaccttgtaactctgaaattttcctttgagacaccatcaagtgcgaggtttctggcaattgaaggatgtgattgtgttccaaaactagatcagccactttataattccctttctcctgatctagcacaacacccatgcgaacttgacaatcggttctcgtttcagctcttggacactttgttagatgatcccttttatcctcctttctatgaccctcatttgcacaaacatatctgcatgacctaacctttccatctgatttccttttgattgagtacctttttctaacctcgaaacctttttgaccaccatagctaacccaaaacatccaagcctcatcaacagtattgaattccatgccaacttcaggtaacaaactaggtagcacacccactctacaggaacaaaaaaaatgatttggtggtcatcgaacaagtaaaatctacccgatcatggtgaaaaaagtaacaaccatagctttacagacctgttttcttccatcttaaatatgcagattttgctggaggcttctttgatgaattattccaacactgtctaatggaggaggtggaagacaatcacataatttgctgaaaaaaaggaagagaagaggccatattacttcacctgtgcttgatcaacggtggaatccgtgctgaaaaaaaaggaagagaagggttcagatgatcgcctggcgctgtggcctcgtttggcgccaaaaaggcgagtgcgccgccaaaacgcatctgttcgcggtaaaaaggaataggagcgagacagacggcgctggagaacgaggcttgttggcccgcccttggcccagactcacaacgcgggcgtgcgctttttggggcggacggttcgatcaaacgtggacggctggatgacctcggctgctctctgccgtcgtgagggctgaagtcagaggagctgattccggaggggaggggggatctttgggggtttggattccgattccttgttgttgtgcagttgtagctcaactgcagcttgggcagttgggtcacagaaccacacgatctgaaacgggcggcccagattaagggcatgtttggcagggagctgcagagcccaacggggccctcgtttggcttatttagggaatatttgcaaacgaaaataatctgtgaataaaattttcatatgtgtgttctcggtggtttaaaagcaaaggctgaaaaataaactacgatgaaaaaaccctaaaatgaactctaaatttaaagttaaaaattaaaattttgtcttataagcataaacgaaatgataaagttgtaaagctttaaagaaaagtttaattggacccatatcattacaaatatgccatattaaaattcatgcaaaattaaaaccatgccatcgccatcacgttttccgtcatcatatataccaaaatacatctagaagtgggaccaacaaagtcagctctatctttttcctccaccaacctatcctctttattccccatctctcttcaccttgtttttaaatgcggtgcccagcgaagagggtgtgcctctatgtcatcgtcagcgaccaaacacttgtcagtccagatccaattgccccaccacccaagccaagccaagtaaaagctgcagaaacacacaaacatggtacatggtacaccggagacaggtgcacgaatggtggtcgcagctgctatccgtccccgcggaagtaggcctgcctgaccatgaacatccccatgggggcacgcatcaccggccagtacgacccgcgcgcacctccacgaccaccgctcgtcaccacacggcgccacccatgccgcgaggaatgctcttgccgcgtcggctctccctccctcccgcgttggctctccctctgtgaccagatgccaccaccgtgagcatgaggacgatgccgacgtcaggcagcaccaccatgatgatggttgtttccctctctgcgtagctcaatcttaggggtttagtaaaatttgctaaaaaaaagagaaagagagtagaatgagatgaaataatctgaaaaaagaaatatggaggagactcaactcatataattatatttagaagttagattcatatcaaataaaccctaagttaacggttgactattaacgcggccatcttgcactggtcataagcaaattcagagatcagtcacgagagaaaataaattacaatgtaaggccctgtttagttcccacacataaattttatactccatcacatcgaacatttgaatacctgcatgaaatagtaattataaggcttaaaaaataactaattgcacagattgcgactaatttgcgagacaaatcttttaatcctaattgctccatgatttgacaatgtggtgctacaataaacatttactaatgatggattaattaggcttaataaattcttctcgcggtttactaacggattctataattagttttttttattagtgcccgaatactcagtacgacaccctatataatacccgatgtgacacacaaaaactttacatccctatatctaaacaccccctaaataccatctgcatttactttgcatcataaccaatgctaaaagatcagccataacaattatgtacagcatattaaaaacagagagatttggagggagacggttttggtagatgaaagagggaattgcgatagtggatatgaagaggaaattatgagagcggacgttccttttagaagagtagagtccaaatatactcttgaacaagtaagcgtaacagtggagtactatggtggtgaacttaatggagtaagttatttttaagaagaattttttttagaagaggagttctatggtggcgaaattggagtgagttattttaagaagaaatttttagaatagtagaatctaaatatagtattgaacaagtagacgtaatagaagttctatgatggcgaagttaatgcagtaagttatttttaagtagaaaatatgtgcgtgttaaggattgaacatggaattttgaggttgaaaacacacattttttgccactgcactatcaagtatataactccagcatatcaactatgtccagcactttaaatcctcttccatgacaaatctgcgttatctaaaaaaatcaagcaagtttttgttgagcctcacacaaggctgcgttatctttaaaaaaaaaaaagcaagtcttttgagcattattaagctctcacgcagggcactaaagctctgttcgtttttgcttttagcgccatatttttcgaactactaaatgaaaaaaatattttatatatgtttttctaacaaataaaataaattatttttaagtttataatagttaatacggatgtccgtgccacccattacctcatctattccgatgttttaatgcgccctaaggctcatagtgctacactattgtattatatttttctcaatatattaattatgtcatccctagtgtatttttaagtcttaaaagggtatccatgatggtgccaaatcatctcataccgtattattcacttatggcgatagactattggatgtttttttttgattgaggtaaatgtaaatagtatggtgcatttgtcagctattaacacttttggatctaaaatgaacaagtgatatgataatgttatagggaatcactttgtttttcaaacgtaaacagaagatataaagtgtccactagtacgagccaaccctaatgtaagtgatcaacacaccccattaggaatgcagagtacccacctttatcactgttcatttcatgctttgaatcactatatctaacttagggtgtgtttagttcacgccaaaattggaggtttggttgaaattggaacgatgtgatggaaaagttggaaatttatgtgtgtagaaagttttgatgtgatggaaaaattaaaagtttaaagaaaaattttacaactaaatacggccttactttactgtccttccggtgtcgtaatgcagaggattcagatccattatgtcttgtgtttagtatttaggaaaagttacggagtctatttacaatcactttttttttctaaaaaaggtgctagattgtaaaaaaattgtacaaccgttttaccgctgctgacatgattgtatggttagcctttgttggtttgttattttttttttatgtaagcctttgttggtttgttgacaaatgacaactatctgcaggtatcgaacttaccgaagctgtaggggtaaacgatagaagtgatttcacactccaagaggcaaatttcgtgctgcagtaatgcttgcaacagggtcgacaggtgcatccatcttgttgcagtacgccagtacccactccatgagtgaagaaaaatcacctctcaaagagctctccactctccagagcgacaacaggaggaacaaagactacacctacaaaatcaagaaagagattttctctccctctctctcttggcttggaactgtggactcattcttcattcttcaatggccaatggaatttgttggataggaagaacctacaccagaaaaaaaaataaaaccttttgaatcaagagtgaagcagcatatttaaggtacgctttatgcttctactcccttcatttcatattctagcattgcccacattcatatagatattaatgaatctaaacacatatatctagattcattaacatctatataaatatgggcaatgctagaaagtcttataatatgaaacggaggaagtacttagttttaatgattaaaagcaacaagcccgagttgaccaaaacaatgaaagagctatcaactaattctaaattaagttctaaaattcaaaattatctaccaaaacgagtagttgagaactttctgttcaaaagaagaaaaaaaaagaacacatgaaaatatcagagcatatggatgccatttggcaactgcaacaatgcttaagaacaaaacggctagtgattcaatatcccaccaaatgtacgccttatattcatccatcttccatatgttcaaaaaaaaaaagatcaaaacattgtgcaggtgggaacaacccacgattcaccaccggcccggccagggtttgccagtcttcgcttccatgaaaccacagagctaaagcctaccaagtttaacaagcccaattttactattttttttttcacatgaagtgttcagatcactagcaagtttctgccatttggcttttctaggatgattacttagccagttagtatcaaaattttgaagcatgaggtacaaactatacatcaactcatctcgcagcagtgctcttcaagatgactgagagaagcagaaaataagcctgttgacttggttatctacttcttagagttccttcggtatcgttgacccttcagcgctgtcatcctgaggtgggaagagtagttccttgatgccgctaacaagatctttggtttcctggttgtgcttgatagagttcctttcataagtctgcagtgtattcacaattccagcacatcaacacaaacttcggcaacaatttcaactatcattaggtacaattcaaacaggcatgcagctattttgataactcgcgagacatatgtagatattgagtatataattactgagtacctctgaagaccacaagttatcgccttttctacggggaatgaggtgaacatgagtctgcaataatacatttctcttagaaaacttgatatgcacagacagacattctacattgagaagcttaattagacaaaacatctagggtgggcaattatagaaagtatgatgttttactcacgtgaaaaataacctgccctgctacctttccattgttgacaagcacattgaatgcatctgtacatgttacaaagattttataagtcaaagcaaagtaatatatgttggcgtaaagtagaaaaatattttggcatatacaagggaatcaaacacagtccaacacaagggaactatgtctcatctggcacatataaatatatcctcaacatcaaggagacaagggtttaacccaaaaaatagaatgaatgggatcagttctagcatttttgtttctaatatatatgatattcagttttagattgcttgaaaggtcaacttgagaaggaagaaacatagaatatgagttatctaatttatttatgtacaaaatgccacaaacaagactacattcatcattgcactgctaatatagtagtaatgtatagtctaacaaatatttaacatgtaggtggacaatgggaaacttggaaaggtcccgcacagacaatacttacaagacaaaatggggcagaaagataaagatagagctcagaagattttctacatagttttattaaactactttacacgagcaaagccacttttggcattctttagtgccatcagaggacagtgcaaaacaccagcataattgtcctaacaattgcaaagttgtaggcttgtagtgcacataccacattgagtagccttcacgattgcactggaaataagtgggagtttacaacatatagctgctattacctgtatttttttttaaaaaaaaaatcaaaccagagaaatttcccagttgtgtcaagtagaggtaaagcaaaacaagcagcatgcaatttctaatgactcctatcgtgcaatgtttactaattactatcaaacacagagtagacaacaaatggaatgaaacatataatgcttttataggggttacaagtaattactgagaagagaatatgccccaatacaagataataatttaacttcataggggtttgctaatattatcaataaaaaaaagtggtcaaagttgtattttgaagactgttccatgtccaaaaagacatgttctcgtggccagaatgggtatatggtaatctgcaaaatctctgtcctataaattttgttaaaatgtaaatgttcatgtacggtctgcataactatcaagatcattgtcatcataaccaaaacttacagatggcggtgttgcctgtagtgatggaaagtgacgttttggaatgatcagtgaatgcctacaattgtaaacagaaaggactgatcatgagttaagcgcaaaagcatcttggcatgtgaaaaggaaccaattcgttaaatctcagatagaaatactatataagggtagattcaatgcagaaattatttaatcagtcagttggcccaagctgcccagagttgccgcattattcaaaaatactttggaactaattcaccacattttatgcaatctatattcaatttgtaatagtttctattaacttttgttctgttctgtcaaaaacaggcattagaacataaatctgcaaccagtatcagaatcacaacaatgcaaacttttcttcataaaactgatatatcagctcttccatttcgtagtttaagtattaaagactaaagagtgttaaagaggtcaagacaagaaaggaccgagagacaactagtagagcagccgaagaggatggcttgaggagggaagcaagaataacatccattaagcaaaggctatgacaacagaggtctgaaactacagctctcagtgaggcacagacatttttatcattctgactctgatattctatctctaagcacaattattaggttaacatgaaaaacatcactggttcttccatgattggcttcccaatccttcaaatttacccctaaatattcagtttggcttcaatttggactagggattgacccagcaatatggccgatcatctcatccccacaatgatcatacagcaagccacatcaacagcaaactggccaaaaaaaagctatgttgtacaccactatcaaataggtaaattgaggtttcagcgagcagaaccattatcttgttcttttaagttttataagcaaagtagctatgattgcaaatacaataaaatatttgaccaatactgatgcaactttaaactttattatttcccatttttaaacggtcttaatactagggaccatgatatgaccaatggaccatcatactagactaactggcaacaaacatttggtggcatcaagcacatgctcaaattcgattgatgaaaaatgacattcacatttccaataattttggggaaaaacatgcaaattcatttctcacaaagggatctttacatcaagattaagatggcatacagactacaaaacattagttccttcacaattttacaaactgcaaaagcagaaaaaaatggttgatgtagtaagtatttaaattttccaacagatcaaataatcatgcccagacatccagcagtcgtattttacattgatcattaatgatgtcaaacaaatgcaacatcttaaatgtctcatacttattgaacacatgaatgtaaagcaccccaatacagcatagagtatgcacatccaagcagaaccaggagttaatcatgttgacctgacgcactatgttaaatttgtactctctccggtttcattttaattgacgttttggacaatgacacggtctacaagatatatctttaactttatttttctactataatatatataataaataaatgcatgtttacttttattatagtgctttaaaagacaaatctatatatgttgttctagttcctttaaactaaatatttttaaagttattgatggacaaagttataaaagtttgacctcaaccttgtccaaaacgttaattaatatggaaccggagggagtaatgaactagtaaaagcatcaatggcatgcaatttactgaactaccaaaaaccaaaaccaccataccggaccagtagcaatattacagcattgggagatgtacaattcaatttcatcaactgaaaatgagtacaagacgtaactatgcaaccatcacacaattgatgcatggtataacgtgttgccacgtgtgccttgcatacttcaacaacatggaaaatatggagtattattattttttgttcaacccaccacattagtgaaatgaaaaaaaaaacaaagtgccatctatattgcgcacatgaagaatacatgcagcacataatccaacacaatggagaagttagcgacgtaccatgcaggcatgcacaaatcacaaatgcacgatcagtttattcatccaaacggaatctagcacttattcattcatgcctactcatcggcgacacaatcaaaggtgttaaaactcaaccaaatttcactagaaatttaacaagagagacaaaacgagtcatggattttaaaagttgcagagacgaaatcgagagcgaggacacgcaactagctagcgccttacccagtgctcagtggtttggtgtccaggatgcacaagcacacatcgtcctcgtagagctgcaaccacacaaaaacaccaaaacgattagtgacgcgaaagaaaaaatgttgatgcgcagagaaggtgagagccttcaccgcacgaaatggcggagaaacgcgaattgaagaagcagagaaacccgagaccagagcagggacggtgactgagcagctgcgctgcgcgtgagtagtaccttgtaggctggcttgttgcccttcacgatctcgcagaacacgcagcgctggcctcccgaggtctccccgctcccgtcggcggcgcagggagacgcggcgaggccgcccgttccctccgcctcccgcacccgcaggtcgtggtggtggtggtggtggttgccccgccgcgcggccggcggcgcgcacgggcggaggtgggagaggagcaccccgaggcgccgctcctgcaccggcgcccccgagctcaccggcggcgacatggggcgcggcggaggcggcggcggcgcgcgcccgtgtgctttggagttcgtgcgcggcgcgaggagagagagagagagagagagagagcgtggttgcttcctcgtgtgtgtggtctctgcgttttatccggaagcgtggggccgtgtgggccacgtgggccccacggatatgtcactgacaggtgggtccaggaagtgtttgatcggcctcctgggccgcctggtgacctggtcgggcccaccggggtttgtctggtgctgcggaggcagagagttcgcgggggtgatacgtgttactgccactgacatgtggggtcagttttgtggaggtggggtccactgccagtgaggttgcgtgcttttttgagtggggaccatgcgctgttgcggaagacgccagtagcggttgcaaagcgtgacgtggaatacgggatactagctcatgctcactgacaggtgagagaggctcccatcggatggtctaataagccaaaaaaaaaaagctaaaatttaaattttcaagcttaattttaatattaattttaagatatttttaatatatttttttcaatattagcttttaagtcactaagaacacatttataaaagttttacctacaaattcatttttattttctaataagccaaacggcttattagaaaataagccaaaggatggtgactagagggatttcgttggctttcccttgcacgtggggcttattaaaaaaatgatactaataatgatattattttctactaatagatatcatagagttgtttttcttctttattttctgatgattttttttgtattttctttgttttcctttgaaaatctattagattctatgtgaatctctataataagatgatacttttctaaagtacagcctccatttcatattatatgtcatttgacttttctcttagctaaagttctttatgtttgactaagtttatcgaaaaaatatagcaacatctataacatgaaattagtttcattaaatttaacattaaatatattttgatacaatgtttgttttgtattgaaaatattgccatattttcctacaaaattagttaaacttaaataactttgactataatatttacttcataagtactccctccatcaaactttttaagccatgaataacaatattatcaaagtttcaaactttttgcttgaaattgaaaacctcaatgtcaaatcagtcttatttttttcaacatgtataaaattattctaaaagatattgagaaataggagataggttataatgcatccataaatcttacttcctccgtttcacaatgtaagtcattttagtattttccacattcatattaacaaaatgacttacattgtaaaatgacttacattgtgaaacggagggaataccaaatagttggatgcattatccaaaaaagaattgatagtaagctgaaccatttcaatagtttggagactaaagtttaaaggtttccggcgaaatatactcctaggtcagggagtaaatggacttctgtttttttccaaaggaaaagcataagttgtaattttccttgggctgggctagcccactactcatcagcccacgttaacacgcgttctccggtggccgagttcctcttcctctgcggcgtctccgcccgccgtctcgtctcgtttctcatctcaaaatttcgcgcctcgtcgccgcgccgcgcggcgggcatgtcttgacggaatcgcgtcgacgcacaggcaccgggggccatggcgccgacgcctcccgttccactccccaacccggcggggtcggcggcggcagcggttctgccccggccggcgtggaacaccaaccggaacctggtggtgacccacccgctgctctccctcctcgagtcgtgcgcctccttccgccgcctccttcagctccacgcgctcctcaccgtcacgggcctcgccgcgcaccgcttcccggcgtctcgcctcctcgccttctgcgcgctctccacgccgccgcgcctcgcccacgccgccgcgatcctcgcccgcgcatccccggggcccaacgcctacatgctcggcaccatgatgcggggcttcctccgcgcccgcctccccgcccgcgcgctgggcctcttccgccgcgtcgtccgggatcgcctccccgccgacgcgcgcacgttcgtcttcgcggtcaaggccgccgccgccgccgccgagtcggagcacggtggaaccccctcaggcggcgaggccatccactgcgcggccctcaagtgcgggttcgttggcgagagcgtgctcgtggggaacgcgctggtacacttctatgcgaaccacaagtcactggatgatgcaggcaaggtgttcgatgaaatgcctgagagggatgttgtctcttggacgacgctggtggatgggtatgcacgggcagggttggctgacgaggcatggaggctgttctgcaggatggttgttgttggaggcatgcggcctaacgcggtgacgctggtggctgctgtctccgcgattggtcagatggggttgctagcttttgggatcatgctgcacaagtatgtcacagagggtggtgttgctcggagtgtcaatttggataatgcgctggtggatatgtttgggaagtgtgggtgcgtgagatatgcaagggaggtttttgatggcatggaggttaaggatgtctactcctggacgagcatggttaatgcatacgctaagtgtggtgatttggaaagtgcagaacagctattcaaggatatgcccaggagaaatgtggtttcttggagttgcatgatcgcagcttactcacagttgaatcaacctgaagaagcagtatggttattcagggagatgattgcagcaagtgtggatccaattgatgctacccttgtgagtgttctgtcagcgtgtgctcagttaggttgcttggatcttggcaggtggatatatgagaactacattgtgagtaataagattgggcttactgttaatttaggtaatgcgctcattgatatgtttgcaaaatgtggggatgtaggtgaagcatcaaaattatttgatgagatggcagagaggaacgtagtgagttggaacactatgatcatggcccatgccgtgcatggtcagtctgaagaagctattcgtctctttgagcagttgaaaggagagaatattgtgcctgatcagatcactttcctgggattgcttgcttcatgcagtcacagtgggttagtttcggaaggacgacgatattttaaagaaatggaaatgttttataggattgaacccagggtagaacattatgcatgcatgattgatcttttgggtaaagttgggcttctggaagaggcatttgaagttgcaaggggtatgccgatggaagctgatgaggctggttggggtgctcttctaaatgcatgcagaatgcatgggaatgtagagattggtgcatgtgttgcagataagcttgtagaactggatccttcagacagtggaatctatgtacttatgagccaaatatatgcaagtaaaaataaatgggatcaggtgaagatgctgagaatgacgatgagagatagaggggtaaagaagaatcctggctgtagctctatcgaggtcgaaggaaaattccacgactttttggtggcagatgtttcacatgcatgttcagaagaaatctattcagcattgaagaatatttacttccatttaaaacaggaaggttatgttcccccaacttgactgtgctgaaaactccttgttcttcgtcattcatgaacctcttaatagccttcactgtagaaggaaaaggaaattctaccagaagacaagattttactaatctaatgctcagcttcctgctgacagacttttattaatgccctaccttacgttcatgaataatggcctggagctgagctggaagtgagataaaatttgtactgtcttcatagaggtatatgtcaaatgggcagaaaaaaggtagtgcaaatctgatgaaggattgcatgtactgtcttcatagagatgtatgtcatgcgatgaggctattcttgatttttgtaagatatgtcatggcaaggaactatagggaacttgattgaacccaggtttctttcttttcctttttcttataaacaaactgtaagttctcattgaggttcttgttatctctgtttttataatgtaaacactctgtttattatgcagacagttttagatggcattgctacggagcttttactgggtgaaccagatcctctgcaatccccttaattcacatccaggaaagccttcttgaggtgatcagttccaggtatattgcatgagatttttctactagaatggttatgaggatggaaaccatataactaatgctaccgtatgctgttcccccatttttgtgtgataataaatgcatctatttggcatggaaaagaaccatacgaaattaagaatcaacaaactctgataccctgtagcattgatatgtttagggttaataattggcttaacgattacaaagcacactgatggaataatatcattctgattctgtgcctgctttactgttctgcttgaaggtgtgcactgatcatttagatactttgtaaatgccacacctgtagagtgtagacttgtactttactgactgtttgatattgacaagaccactcatgaatcgacttctcattttctcttggaccattagtgcagtaacaatcgtctagtacctctgcagtattagttggttatggctgagcaagttcgttccagtcataaatgtgaactaataagctgttcccttctctgcggtgacctagattgtgtacccctgaaggcctatccagattcatggatgtacaactgaaaccacctaactttcttgccaacaagccgcttaatatggtataaacgccaaaaccccaattgaatgctgcctttgcggcgtatttacacccatctccggtacattgtggcaccacagatcacttcacagaaacatgtcaaccattcatgggttgcaactccaggttcactgtgcacaatttaacccggcacatgttcactgctcaccaccaccaccaccatctagctcataaatcatcttctattctgccacatagatgaaacacctagcttaaaatgttctgtgacaaagaaacagaacttttctacctagagccaaaggtgtgagagcagatgatccacgccctgattgctggggaaataggcgatgagaatggtaggccgtgtggtgtactggcctgacgacctgcttggacatgtccacatgaagattggacgccttgccttccctgggggagtgccctggctttagtttctcaggactgatgtatgcatagctttgcgatctgcacttgcacactgcaacaactccctccctccccacctagctaggacccttgaactttttgctagctttatgcagtatcactgtagttcaggctgttatcctctcgagtcagtgcttaaacccccgtgtgttttggggatgggaggcaagggaaaagtgatcggatagaatgtgctacaaagggagtagtaggtgtggcattcatggccctcttcactcggcccaaatctaccctctaacagtttgcattcttgagccatggcagatcgacagtcatggcctgcttgcctcccgctgcggcgccgaagagctcggcaccacccttccttaatggagaagacgagagcaaggacgatacattcactgcccagctgattgcctcagtttcattgaagccagcagagcagcgcagagctgtactgctgcgcggtgcagtgtactcggatcctaagccatggcgatgctgcacccgtcgtcctcttctccaagctgcaacagtaagtatactcgcacatatagtggaaagcattcatctctagtaactagctagcacatctatcaccattactattaactaattgattgattaataataatacatttatattgcctcctcctcaccctcaccattctatgtcaaagtccctggattaacatagtgatcaatagtccttccctcaaacagtactaattgcccacgtgctactagggttttttctttctacagccacctgccctttgagcacgggggcatgcatgcaagcaagcaagcaccaactgctagctagactgccctaatggagaaggctcaaggtctccagcggcttgacggcgtcgagcttgcggtgcggcagggccggcggcggtggcgccaacggctgcacgaacttgcagttgggacaggatggggaggacttgcagagcatgacgaggaggtggcaattgacacaaggcacggccaccatgttgcctccaggtccagagctgacgatggtgccacccttctttgtctcctctgcaacaacagcaacagcaactggagtagcagcagctccggtgcttcctccatcgataatggtggggacgacgacgacggttggctgggtagtcgagatgttgagctccaggttcacgctctgctccttgggcctgatccagcttttcttcaaggtcttcctgttcaggtaatacatccttccagactgacagaatcatatatacacatggcattagaaaagataaacaacggggactattacatcaaatgataagccaatcatggcagcatcatatcatacaacaagttttgcatcttttggacgttgagcaagtagctagatatcacaagtggcatcatgcacgttgaattaagctgcatgcgttgcccaccaatatccatgtgggtgctgctggtctatctagttgctctgctacttctgccagctcaatattacgtcagtttcacgtacgcacgtgccatggcggtggcaggtggacacttctaagaataggagttgcacgccataaattatatatttcttaaaactattgtttcagagccaggagctatagcttgcatcaaggcataaacacacgacaagataagctaattataatactatatatgaagtataatgtgcaatgtatcatgcttatacttaactagctagtagtaggaatattacaatcattaacaagtctctgcactaaattgtttttcataactatatgtttagatgttagtgtgatggagaggaactcacttgcaggtcaaggcactgctcccagtcgaggggcagggggtcattgagctggagctccaggttggcgtgcgacacgggctcctcccaggtgaagtgcttcctcttcttcctggagctgccgtctgactccgacgatgagctcttggtgctcttggtggtggaggagacgaagcctggcgccggccacgtcggccctagtgagagctccggctgcagctccatcctcttcacactcaggtacttctccactctaaggaattcagtggtcatcttggctgatgatgctagctcctgctcttatatacacacacaagtagttctagggtgtgagctcttgagagctagttgtagtactaagagatggaggagaagagaattcagtggagggaggggggactgcttctcttctacaatgggcttttgattgatggggtcatgcaggggagggcgtggacactaaagaagggttcttaaatggccttcatccaaccccattaaggggagggcaggccgggcattgaagatgacaagtagagtgaccttaaatgactcaaatctctccacctcctccccatttaaggcggccttgcgctgctctacatgcccggactgtacacgtcataatgccacacccagcccaggagagccaccacaaaatctacaaggccccttgcttgccttgtaagttgttgtgtagggg

SEQ ID NO: 17274 - DNA, 759 bp, Oryza sativa
agcagatatgaaactagtacaagtgatttatggaacggatgattgaaagtctcatgcaaatcggtaagaatcatacattatccacaagattattgtgccgattgtgaaaatgctgatcaaggaacttctctgctcggaaggctttcttgcagaaaccacagcgccattcatttatatcaaagtgaatcttatgctgctcctgttcccgaaacatgtcattaccaggatgaagtctacatttgcttgggagttcatatttctctttttccacaaagggcatcaaatactgcatagaaaggaaatgttaatctgtcatattattatagaggcaccaatgcactgggcattttcatgttacacatgctttacctcatcaatagctttccaagctgcacggcttctttcccttgagcaatgcacttgatttgtgtgttcatgtgacataagaagagttctagaatcaagttaaaaggacagagggtcatgagtcaagcaagagcgttttcaatttccattaaggcttccaggaatgaactactttaggaattaaagaggacctaatctcggcaaggatcttgcttgtagtgtcatgccttgaaagggccaggtacaattttgggagggactaggtgagggtcttattttagaaattagactggcatgtataaaataaaacattaaataacatattttccttcatatgagtttgggagcttaagtacctcggatccagcagcttcattgaaattcctatagcac

SEQ ID NO: 17275 - DNA, 5165 bp, Oryza sativa
ccacagtccagaacaagagatgaaaaaactgttaacttattccaaatgttatttgctgatttttattggaatcagatcctgcttaaaattcatgttttcatatgtagctcaataatgcaccaaaaagttcagaatcctttttgttttgtgaggagaaacccataactgaatcaatcaaaggtttccaagttaggaattctctcaccctgccacctttggggaaaggtttagagccattcttgcatgtgtgggcatcacagaattggcgcaagagaaattctgtgaaacaagttggataagcaagaaagctacacgagagtgctatgaggacagataattagattcaagtagtgctcagttgctcacttaccatgaagacggctggcagattgcccttgattaataggaaagcaactatctgcaaggctctattagcagaagcaaaactgagttagataatttccatcagtaggccagaaaatgctcaatgtatatcacatctattgtttaaccataagaaccaaggtagcaaactgatttatgaaagataaaggacacagaaaacttcaataccattgcaataatggattaaggtaaatacaaatagtgcttataagtaaagcatgtacagcacccatagtctgctcgttgattaggggatagataagcatgaaaatctctatccaaaggtccctcattttcatctaattaacataacaagtacaccaatatgcctgcatgcataatctggtgcttctcaacaagatcacagcgcagaacaatattagtttcaaaggaaaaaatatgtcacataagatgagaatagctaaagacaaaagttataacatatcaatgatgtgtagtttatctaatgcaatcctcgatatgtagagcaggaaatgggaatagtaatatttacacacaaacagtccaagataaaaacaaaatgcaaattagtaatagcagaacatgaatatgcttcttgatatgctatatgaatataatgaaatcaaacaaataaatggatttagaatgtccccggaaaaaaatggatttagaatggttaaaacaaaaggataagaacctcacaaagatgacgattccttgcagctgcagttgcactgcatttactctttggtttcttaaactccaacatcagatcacagtgaagtgctccacatagatcagccaagcatcttccttgactctaaaggagatagtgtaacaatcagcatttctaagcatggccaatcataatgaagaaacaaaaatagattaaacaagttagatctgcactaggagatgcattgccaagaaaatcccacagaagactgtctcgtgtaaatagttataaatggaacttcgaagagccttgaatttgttattttctcaattaatgaggaagggaaagaatataatcacacttgtggcagaaaccacacaggctacaccaatactatcaaagaaagaaagcagatatgaaactagtacaagtgatttatggaacggatgattgaaagtctcatgcaaatcggtaagaatcatacattatccacaagattattgtgccgattgtgaaaatgctgatcaaggaacttctctgctcggaaggctttcttgcagaaaccacagcgccattcatttatatcaaagtgaatcttatgctgctcctgttcccgaaacatgtcattaccaggatgaagtctacatttgcttgggagttcatatttctctttttccacaaagggcatcaaatactgcatagaaaggaaatgttaatctgtcatattattatagaggcaccaatgcactgggcattttcatgttacacatgctttacctcatcaatagctttccaagctgcacggcttctttcccttgagcaatgcacttgatttgtgtgttcatgtgacataagaagagttctagaatcaagttaaaaggacagagggtcatgagtcaagcaagagcgtttccaatttccattaaggctccaaggaatgaactactttaggaattaagaggacctaatctccgcaaggatcttgcttgtagtgtcatgccttgaaaaggcaaggtacaattttgggagggactaggtgagggtcttattttagaatttagactggcatgtataaaataaaacattaaataacatatttccctccatatgagtttgtgagcttaagtacctggatccagcagcttcatgaaattcctatagcacaaaaggaatattcagattagctagaataagggaattaggtgttcatcttaaaatcaaagagaattttctagtagatatagcagcaaattgtaatttgcactgtaacaaagtaaagatttacttatttcgtgtttatcatgagaagcatgcatattcatatcctgaaatgtcatttgcttatcagctaatacaaataacagtgtgctgctttctaatagaatgtagccattgcaagtatatgcaacaactcaaaggaagtgatgattgaacataggatggtatatcaaataattgatggcagtacgctgcacacctaccataagaacttaacttcacataaaaaacatgcctactcaacatgcacaccattagtatcaacattttactgaaataactagtagcagggacaccagagaaacgtttacatgcaacagctctcctttttgttttgcataaaaatactactataataaattaccacggcgaatttccatctcacaatcaatcgttgcaagaaaccacgacggacatcacaaagcaaattatacaaggaaaacaagtcaggtaagcaaatcatatcaacataggcaagcttgcaatgttccctttaggcatgaagcaagacaaagaacaaatctgcagatagactagctgatgcggacccaacgccaattaattctcttaatggaatgaatgacaccgtctcacgtaatgctcacaagttgagcccaagctcagaatgttgaatcatttcatttatacttatcaaatcaaagtaacctaaagcttaattctacatacaaaagaaaaaacacctcttctgcaccctgaaataacaggaactgaacgtacggatctctaattcagcaagcaagaagactaccgatccaatccagcacaagatagatatatacctggtgtgatgccgccgcaacagctaaaaggcaggaagcgaagaggacgaggtacgcggcggagcgagagcgaccaccctcccgactgggatcctccaagcttctacaaccttgtggagaataatcggaggggacctcaggtacttgttctcactgtgattcgaactgaaaaatcatgcaggagaggactttcttaccagaaaaaaggggaaatcactcactccgagctatcttggatggatctcccgctccaccccaccccaagtccagtgcagcagaggggagtaggggactgtctggagaggaagagagggagggggagctgcgggcttcgattcgaagcggcggaagcagccaggtcaggcgagcgtgctccggcgggaggatcgccggcggccggcggcgcgagcgagagaggcggagacggtggaggggaggaatcagctcctctgacttcagccctcacgacggcagagagcagtcgaggtcatccagccgtccacgttcgatcgaaccgtccgcccaaaaagcgcacggccgcgtcgtgagtctgggccaaggccggcccaacaagccccgtccccgtttggccgccgccatcgcccagccgtgctcgtactcctcgtctggccgccgccatcgccgtcattcttgtcccccgcgccgccctcgctctcgccgtcgtgctcgtcctcctcgccgcccgcgctctcaccgtcaggctgcagtactcagctgaggagatggggaccggaaggtgtgcaagatgcagcgcttggtcacgggcacggcgcaccggtgccacgagctcgatgtgcgtgtgccgagctcgagcaggccatgcgccgcgacaggcagcgcgcggcgaatggaggaggggagcgagtggaggaacatagcggcctcctcggcagtcagggagaggaggaactcctcctcgccgtctctcagcagcgagtgagtggaggaacacagcggcctcctcttcagctccttaatgctgcgtccaggagtgttgctttgttgtatgtcaaaccgaatggcattctggagatactgaatgtgcagttattagaatgatagattgttctttacacaggcagcagaccacttgttctgaaaaatggggttgcatgtgttctgtaatttgtatagaaagcaaaaaaactttgtaaattgtttgtagtgagaatggcttgtccaacaaaatgatgaaatggccatttgtaacttatcactgcaatgaaattatgttccaattctgggcatatggcctgttcaagagaaccaacagtttttgtcccccaaaatgcttgctatctgctgtccagtaccaagtgtatatgacatactaaactgtacacactaaccacaggcgtgtgcattcagttaataaaaaagactgaaggtgctcattgatccggcatagcgtcgtcctttcagaagagccttgccatcagaatcctcttccaagtgctcaacaccaatcatgtcatcccctgcgttcagcacctgttggcagtggtgaatgggggcatctgcacatgttcagtaacaaacaagggaggtacaaccaatggatgcataaatgctcaccttgcccaaaagatcaagctgttcatcaagcgtgccaaaagaacaatctcggcaggtgccgcagcccgcagagaccaaaagcctattcaccaaaaccaaactccattgctagaattcaacatcaagatcatcgacggttgctccctgaaaaattaaagaaaatttaaactctgtcgatgttaatactaatggatcatagcttcgaaatattaccgtcaatagttgagagaaggtgttgatggccatgtatggttcacacatttcttccatgggcaaagaggtactaggatatatattttgccctgctggattgtcatgtactgatgcttcttttccctttttcttgcctcccgtctttgcagccttttgttccttcaaataaaagaaataaaactgagcatgttcccattgaacagtgaaagagaaac

SEQ ID NO: 17276 - DNA, 722 bp, Oryza sativa
cgtattacggtgtcatcgacaacatttgggaactagagtatggacccctgaaggtccctctgtttcggtgccaatgggttaggctgactggtggaggcataacgattgatgacagcgggatgacaatggttgacctaaacaaggtaggatactcagatgaaccattcgttctagccaatgatgtaacgcaagttttttacgtgaaggacatggatagcaaaccaaagaaggggaaagggcccgatgagccaagacgccatgttgttctctgtcacacccagaaatttagcccaaattttcagacctttttgtgtattaaatccctgtccaggaccagccagtgtacacaaaacgacaagtaatatacagttccaaacgtaaataaagcgtaaaatacttacagaagaggcacttagtcctcacaccgaaacaaaagcagcagcagcagaaaaagacgatcctagcggggcttcagctccactccacaggcaaaactcaactggggtctgagccttggtcttctaacctcgtcttcagctcagaagcactacacttctgaaaagggggaataatagcaagactgagtacaaccaccgtactcagcaagcctcaccaacaatgcagacgtgcaaggggacacaaggacggtttgtggctatttgcataaaggcagttgtaaaacattttattgagcaaacactaaaactgttgagtaattaagg

SEQ ID NO: 17277 - DNA, 640 bp, Oryza sativa
  unsure (1)..(640): unsure at all n locations
gagagtgggntttgactacgtaagagcttcatagagcnacaccagnncatcacacacgagctggcaacatgtccgatttctccacaacgagagcatgccttacgttccattttatcctggttgaaaccttggggagatttctcatcttcatcttctgaggagacttgatctgaatcttcactatcagacactctacctccattagctaaaagatgctctgtcaactgtggtgcacctcggaaggtgtttcttctctgacgtcttgtcattcctggtggaggccattctgtgctggtaatgatcatcttacgaacttcaccttcggttcgcattggtgcttttcttttctgctgaggacagttccttgcgtagtgcccttgctcatcacacataaaacagatgatacttgcttcttttgggtcaacatgtggcatggcatgaggggccttctgggatgttggctgagcccctaactttgtgtggtaagtggcttgtactcgcctccaacttccccctgaaggttcattttgactccggtttaaaatttgaattccatactggtgtaatatcttattagccattttttctgttaaacaagtgttggcccactcccctacaactcgtgttttgggccccatct

SEQ ID NO: 17278 - DNA, 8404 bp, Oryza sativa
  unsure (1)..(8404): unsure at all n locations
tgcactcggagacacaagcagcagagactgtgtggcctgttgattatcgcttctgtctcaacgcgaatgcacacacacattgatatcgatcagcaatccacgatcgatcgatgggggaaaatagctcaagttcagaggtgagactgtgcctgcaggggctagctgctgtagactgtagtgctgttgcagtgttgctgatctcatactatagcagagtggcgagtaagtgccgtcagtctatcaggatgctcaacaacagggatatcgtcaactgtatccctatactccctgcgtcacaagaatactcaattcttgaattttcgtgtacaaagtttgatcgtctgttttatataaattttttttatgattagcatttttattattgttagaagataaaatatgaatagtactttatacatgacttacctttttaaaattttttataaattttttaaataagacggacggttaacgttagatacgaaaacccagaaattgagttttttttggacggagggagtatgtcataacctagctagctggagtatacctaaatgatggacgacgcacagatatactcttgcatggcttcaattggcaaacgggacagagggtgtgtgcccactgcgacagaaacagtaaattgaccatggtcatatatatatatatatatttgagatggataagacaagagaatccggctggcgtacatgacaaatatggcaatgtcgcgttttccccgttgccagcgtcctttcaaacctatctagagtcgtgcgcatgccattaccattatattgggaccagaaaatgatcaaaaaacattaaaaaaatgtatactggctaggaccaatggattcaataatatataccacaattaattagtatattgcacaggagtgatatgcaaaccaccatgttgtctggactctcgtagcaaccctgtcaccactataattctactttttgcgtacagtgaaatctacaggttgatcccctcggtagagttagccgacataagtccagatcatggaattattacgaacagttctagtcctaatcatcaaacactatattgtgttagctggccaatctgtacatatcattatatatctaaaaagatttgtacatatattaccatatacatatgtcgcgagataattatatggtatgatgaatgcctctcctgtcttagtcgtcaaacgcggtgcattgtgttacagaggaatatctatatgattgataggtcgcaacatacaaacagaatatggcgctatgtttcaatttgcacaggtgtttttatgtttttcaatataattagtgtgggctaaaaattgtttataagccgtaacggcttattagcgatatcagaaaatattttgtgtgtaaaacttttatatatatgtattcttagtgccttaaaaaccaatactgaaaaaatctacgttgaaaatatctcaaagtcaactttaaaattaagttttacaatttaaaatttgactttttctttggttttttaggtaataaccaatggagctataaatcacttttcggtgcgttaccctaggtaggtcccatggaacaaaccacaatatattattatacagtggtgtgagtgtgtgacatatataaccatgtggttaggattgttgtagtagccagtacccaattatttcgattttctgcgttcagtgcaatctacatattgattctcatatatgtcaatatcatggaattatatatgttgagcagtttgcagtcttagtcagcaaacagtacgtacatttgcttttagctagctagctagccatacatacagtatttacatatatagtatatatcgtgaatagttctctagtcttagtcatcaatacatacattgtatttttaaatatgtggttgccaattaataactttttggtatgttatctcaggtaggacccaaagaacaaaccgccggccacatggctaggaaccgtatcctctgacattacacactaatatcatggtgtaacattcttgaatccagaccatccaaaataaatcaatggctatagattaattggcatacaagtaatcaaattaattagcagattatgtagttaaacattaccatacttaatgagtagaaaatttttttagcactaaagtagtcccttcatgttcattaacatgagcccaccaacttgtagattataagagaattgtctttttcttatggaagatgaggcaacacaaagaaaattgatgcacgagattcattccttaacaggttcatatgctaatcattgcgtctaacaggtaagttaaaccattatcgtcatgtgctagttacttgccgattccggcctgtagcatttagcgatatttgcctccttgataatatatttgatctaaaggaatttgtttaactacataatctactaattagtttgattaattgtatgccaaataatctatgaccgttgatttagaatggatggtgtggatcaaaggaatgtcacaccatgacattagtgtgtaatgttagaggatacggttccacatggctagctagctatgtcaaaacattacattgtgttcatacatataacatatatatatgtacactatatatgctcgtgaaatgttctcgtcttagtcgttaaaaagtacaatgttgtattatgttggagtagtacaatgttattgtgtttttaaaatgtgttccttctaagataacgtgtgtttttcttaattctctgaaagcacgatacagcggcgcccgtatatatttggatcatctgctagctcccctagctagcagatttcatctattcgtcggaggcagcattcaggcatgcatatttctctctgctcctccattgaaatttacacattaattcattgcttgcgccagaaagggagaaaaaaaataatgaccagccttaggacaaacactaggatcagaaatgtccagcaaatgtacacgcatatgattaagaaagagaaacaacgcatatgccgtttgtgtacttattgcatctgacaatgatgcttctcgtctcttttggggaaaatcaaaatttatacttttggagctaattttaagatactttcaatgtaattctttttagtgtgggtttttaagtcgctacaaataaatatataaaagttttacctctaataaagtcttgtttggatccagggactaaacatatcggatgttggaacactaattagaagtattaaacgttctataaccctgaactaattcgcaagacgaacctattgagcctaattaatccatgattagccgcctatgtgatgctacagtaaacatgtgataattatgcattaattaggcttaaaaatttatctcgcgaattagctctcatttatataacactggtggagaaaccctttgtagtcccggttcgtaacccccctttagtcccggtttccaaaccgggagtaccaatccgggactaaataaccgggagtaaagatctatctttagtcccggttggtaacaccaaccgggactaaagatggctcagccaaccgggactaaagatcgagctgacctttttttttttgcatggccctgttgctgcatggtatattttatatatatatatatatatatatatatatatatatataaaccatgcatatatatgtttcaatacatatatatgcatacatatatatatgtatatatatatattatattatattatatgtatacatgcataatatatatgtatttatacatatatatgttatgcaaatgcatatgtatatagatatatatatgaccaaaatatatttacattatagaaaatgtgtacacatgcatatagaaacatatgtagtcatgtattaattacaatccattatatgtcctagctagctacgatttcgacatagtagtactcgctgctagctcagaagctaaggaccggtgaattgtgtttccgtcgtagtagaattcacccttgggatcaaggatttcttcgttgatgaatcccatgagttgttcttgaaccgccgcgataaattccttgtgtgtggtcaggttatccctcatgtgaataaactatatgaatgtatgaaattgattagtaattaaacaagaaatcgctacgtaatgaaattttgaatttatttgtacgtacatcgagctctcttgtggtgatgatttggtctgcaaggcagtggcaatactcgcacacgtaatagccgcacaagttagttccctgcttttgctttgcgcactacaaataaatgacaaacaacgagagatctaattaatatacacttgtatgtatttgaatcggagaaatataaatgtagagcatgtgtactcacaggaaatttgaacttccgcctaagtctttctctccatttgccgcggaccaaatgacggaaccgataccaagccctacatggagtttaaagctatgattcgtagtagcaattaacataacaagattttcttcattaacaaaggaacttatgacggtacctgtctataagttcgaaaaccttgtcaaacgtagactcttttttatccattgagtcatatacgttgacggtgcaggcctccaggtcgaagagtaaaagcacccagtggaatctgcaatgtgcgtgggatgcattacatatgaaacacttagcaagttcgtacgggaatgaaatttggtatgtaggaagacagtaaaattaaactaactctgtgttgtatggcaacagtatgaacgtcttgtaatgctgcgccttcaggagatggacgagattgtcctctgtttcttgtggatattggtcgagcattgcgacgtttactttccgagggtcgatgaatccagtatcgaaaaccctccgccgtcgggccctttgaatctccattctacaacgataaaagggagtatattattttctatagtctacttatatacaaggacctaattaattaaaggagacgtatagtaagaaatctaactgaacgatatacttacaaaatccagcaactcataatagagacgtcgagggcgtccagctggtatagttcgtagattcccctgaaattgatccagagaatgtcatctccttgcaagaagtccgtgtccctgatcctcgctccgatcatctctctaccggtggcgctcatctccatgtacagctgatggaacttgtacatttgtgtgggtagggactgcagcagctcaggcttgacaagcggtttaccgagttcgtacatgtatttcacttccgccttttcgattggtgcgactcctagcaattgatccgtagttagaccggtgtcagtaataaattgttctatcgtcatttctttaccggtcaccaacggctcgatctcctggtttggttgctctccaagctgagggactggtttggactttccagaagatgctttcttcagcgttcgctcatagtccgatagcttgatggcctccttgacagatgcagacatacccctgaagaagttcctgacactggggtctataggaatcttcttttgtggacttcgaggcttgaattgtctcttgacttctgatgcaacgtaagcgtcaagctcctcttgcgtgcaatcgtaccccgggtccttgttcttggcggcgtcaactttcgccttcttcgttgcccttgtgtgggcaggcggtggagctgggggggcccttgactttgaaggtgccggaagaggagcttgcgggggagtaggtgtaggagcacgaggaggagtcggtgcaggatcctgaggaggagtcgatgctggagcctgaggtggagacggtgctggcggagcatgaggaggagacggtgcaggatcctgaggaggagaaggcggagccggaggagatggtgcacgagacgccgcttgtcgcccaaggaggatgatgtaccgcctgcgccatagaataatggcatggcatgtgtctcgtagatgcgtctcaccgtctcctccagggtaatccagctcgaggtcctcgtacgcgccttcgaccaactcaactttgaccttcgagtatcctgctggaatcggcctgcagtggtaagtacctgaagggtccgttgggatggccatgcccgacgccaccttcatgttgtgagagattatttattagtaatcaacatatataagcagcaactagcggaatggctaaatcttacctttattgataagttcttgaaaggaatatgcagctcacatggtgtccgctgagtgatgtcatcaacgggacaggtcgattcgtcctgtgtttgcatggcgtccatgctctgtgatcctacctgccccgttgaggcgcagctgctacggtttcctgacgggctcaccattgcaggaggaatggtcggctggggatcatgggaccgatgtgcggccatgcgttcatcaaccttccttgccacctcctcttgcatgttgagttcgtagctcgatacccggaactctaggtctgcaatcttcgcctcggtatctctcttgctcctcatccgactcctgtacgtgtggatgtcctccttgaaaccaatcttccaaggaatcacccctttccctcgtgttcatcctggatgctctggagtctgcagggcgagtgtcagctcgtccctatctctgtctggttggaacgtgccctgagaggaggcttccactgcatctgttagtcgtcgcgcagcctctcgtatctgatcgccgaagaccagtgagccatcagctgggttgagcgttccaccgtgagcatagtaccagaacttcgatcgttccggccaattggctgttgccggttcaatacccctctcaatcaagctagcctccatctgctcccacttcggcatcgcgacgctatagcctcctgaccccaagtggtgatggtacttcttcttggcggcattttctttgtttctttccatcatcgcctgcccttgttcacctgtcttatatgcaacgaactcgtcccagtgatcccttagctttgggaatgtgtcgaagttcggtgtctgccccttcagtatatacttctggtacagatctcccttgaagctctgaaactgttctgccattttcttcagagtccaccttttcactttgtcctctgtacccgcaggaagggtgaatgtctcgagcgttgtggtccacagcatctctttctccgaatctgggacaaagctctcatgatctccgcgtgcccttgttcttcgccagtacaccgtactaacaggcacgttatcccgcacaacccaaccgctgtgacgtacatagttcttggcggcttcggccggggcactaggacgtccatcttcttccacttccgttatgatgtgccgaccctcaagcttcttcgctgcacctcgttgcccgcgtgccctcttctgtccaacggagggttgactaccactagcctcctcctcctggttcccctccacatccctttccacgtgcccctgctggttcccctccgcatccctctccacgttcccttcctcgttcaagtactggtttggatcctcgttcccctcttcttcattccagtactggctgcttccctccgcgattgtatcgtacaatatctgttcctcatcgcggtcagccatctgttgatacaaaaacatctactaagtcacgagacatttatgttttaacaatctaagtcatgtatgctaagtgtaaatgtcgtacattagaaccctacacaaccttacgtgctaagtctaattataaatcgtgatataagctaagtctaggtgacgtatattatacaaccctagctagtaaataattatatactaagtctaattacaaataaaataatcttatattaaaactcaaataatattacatgctaagactaaaatagtcatgtatatgctaagtgtttcgtgcgtatatgctaagtctaattaagactacaatagtcaattgctacttgtcgcaccaattccgtagtcaataattacatactaagtctaattacaaataaagtaatcttatattaaaactcaaataatattacatgctaagactaaaatagtcatgtatgctaagtgtttcgtgcgtatatgctaagtctaattaagactacaatagtcaattgctaggagtcgcaccaattccgtagtcaataatgtcatactaagtctaatttgcaataaaataatcttatattaaaactcaaataatattagaacactacacaatcttatatgataagtctaattacaggtctaataatcttaattaattgcattacaaatataacaatcatttatattattacgtcacttgcctgctccaattccttctagggctagctcttccactcaggcttgacggacgactccgacaacacgtcttaatgaactactgtaccatctatgaggagcaagngcaaanngacgcccc

SEQ ID NO: 17279 - DNA, 14218 bp, Oryza sativa
  unsure (1)..(14218): unsure at all n locations
ggttagggttaagaccaagactaaagattatagcactgcatatgattttcgcttacatatgtgtttataaaatagaagttaatgcattaacattatttaaagtacaaagattaatgacaattacttcgaaaaattatttttgtctgtaataaattaagtggataaattgtaataagcaaatataattaataaaaattccaataatcatatatacttagcatatatatgaatgatattattatattggtaaaaactctaattaagatatgtatgtacatactgcatgatttaaaattaataaaaattgtaatcatcatatgtacttagcgtaggaattatattaaattaaatgctaaaaactctaattaacatatgtaaatgccacatgcatgatttaaaccttttaaaaattcgaatagtcatatataagtagcatatgaaagatagtaaattaaattgtgaaaaactctaatatatgaatgatagttttaaaaatatattaaatttaatacttttaaaaattctccagtcaattataattagcatatgaatgatagtaaattaaatgttaaaaactctaattaacatatgaaattgccacttgcgtgatttaaaacttttaaaaatcctctagtcaattataattagcatatgaatgctagtaaattaaatgttaaaaactctaattaacatacatatgaaattgccacctgtgtgatttaaaacttttaaaaattgtaagtatcacatataactagcatatacatgatttaaacttgttgaaacctctaataatcgtgcgtaattaacatatgccatacatcaattgatttatatggataatcaatacatccaaaatagtttacatcgtgtacacaataattacggcacgtactttctcctcactattgttccctccttgtgatcgctgcgtgagtaaggggtgtcttcatttgataggaggatgctagggtcaatcgtcaccgtgaaagggggttgcccatccaactgatcgtaatcctcgtcagtcttgtcctcaactccgacgatttttcttttgcctgggagaaccacttgacgcttaggctcatcaggccctctgcccttctttcctttgctagacatgtccttcacgaaaaagacttgcgttacatcattggcaaggacaaaaggttcgtccgagtatccaaccttgttaaggtcaacagttgtcatcccactgtcatcaatcattacacctccaccagtcaacctaacccattggcaccggaacagaggaaccttgagaggaccatagtcaagttcccatatgtcctcgatggcaccgtaatacgtggcagttgttccatcgtgtcccatggcatcgacacgaacagcgctgttttggttcgtgctcttcatgtcttgggctctcgtgtagaatgtgtacccattgatctcatatccctggaatgtcgcgatcgacccagacggtccgctcgccaggaaggcaagttgttggttgatcgactcgttacccatgagatgttgtcgtagccacgcggggaaagtgtcaatgtgatgtcgtgtaatccatgcatcggacttaccgatgttcctggcgcgaactagagccaagtgctcctcgatgtaaggagctaccaatgaagagtgttgcagaacagtgaaatgggctttacggaataaattgttgtctaccgtcgttattgctttccttccgagagttccctttccccgtattctcccttcatggcgtgattcaggtaccccgattgggcgaaggtcttcgataaattctacgcaaaattcgatgacctcctctgttccataacccttggcgatgcttgcctctggacgagcacggttacgagcatacttcttcagaacgcccatgtacctctcgaaaggaaacatgttgcctaggtacataggcccgagaatacggatctctttcacaaggtgacaaagcagatgcgtcattatattgaaaaatgaaggtggaaatatcaactcaaaactgacgagacattgcaccacttcattctgaagggcttctaatctatccggatcgatgaccttctgcaaaattgcgttcatgaatgcacatagctttgttattgttgcccggacattgtctggaaggataccccttattacaactggtagcagttgtgtcatcaacacgtgacagtcatgagactttaggtttgtgaacttcttctccttcgtgcttattattcgcttgatattcgtggagtatccagacggtacctttatgctatccaagcattcaaacatactttccttctctgccttgctaagagtgtagctggctggactcaagtaatggcttcctttctcctttggttccgggtgaaggtcgccacgttgttccatatgcttcagatcattacgtgcttccagtgtatctttcgactttccgtatacacctaggaagccaagaaggtttacgcaaaggttcttagtgaggtgcatcacgtcgattgcgtggcgtacgtccaagaattcccaatatggtaactcccaaaatatagagttctttttccacatcgccgcgtgaccatcttcgctctctatatgctggcttccaggcccctttccgaacactactttaagatctttaaccatagcaaacactgttttcccgctgcgatgtttaggcttcgtacggtggtcggccttatgttcgaagtgcttgcctttcttccgtaccgggtggtttgctgcaaggaatcgacgatgacccatgtatacaaccttcctacagtgcttaagatacgtactttctgtttcatccatacagtgagtgcaagccttgtaccccttgttggactgtccggataggttgctaagtgcaggccaatcgttgatggttacgaacagcagcgctcgtaggttaaactcctcctgtttgtcctcgtcccacacggggacaccttccttcttccacaactgtttaagatcttcgaccaatggtcttaggtacacgtcgatgtcgttaccaggttgcttggggccttgaataataatcggcatcattatgtacttcctcttcatgcatagccagggggggaggttgtagatacacatcgtaacgggccaagtgctatggcctctccaaaaggattcatgccatgcgtactcaaaccaaaccgtatgtttcgtgcatcctttccaaattctttaaattttctgacgatgtttcgccactgcgaaccatcggcggggtgtctcagcatcccgtcctgttgacgctcttcagcgtgccatcgcaacattctagcattccccttgttcctgaacaaatgccttagccgtggtattatagggaaataccacatcaccttagcaggaattctcttctttgttagctgcccgtcaacttctcctggatcgtcccgtctaatcttgtatcgtagtgctttgcaaacagggcatgcttctaggttctcatactcctcaccgcgatataggatacaatcgttcggacatgcgtgaatcttatgaacttcctgtcctaacgggcagactatcttcttagcctcgtacgttgtctcgggcaatttgtttccccccggaagaatgttcttgacgagtttcaataaatcgccaaatgccttgtcactaacctcattttttgccttccattgcaacaactccagagtggtatccaactttttgtgcccttgctcacaacctgggtacaacgaagttctgtggtcctccaacatcttgtccaatttatgggcctccttttcactttcgcagtcctccctggcgtcctgcaacatctgaccaagatcatccgcaacgtcgttaccatcagcagctatttcctcctcgcccgtttgatttccttcaaatccaacatactgagcaaagttcggaatattgttgtcttccacttcatcttcttccatttcaacaccttgctctccgtgggatgtccaacaattatagcctggcatgaaccccgactcaaacaagtggaaatgaatagtcctggatgcagaatactccttctgattcttacacttattgcatggacaagaaataaaacccctttgcctgttagcttcggccactctcaaaaaatagtgcacgccgtcaataaactctttggaccgccggtcagcgtacatccattgccgatccatctacatgagtcaaaaaaaccgtacacaaataattattcttacaataatgacagtcatacaataattataagatatctttattcatacaaaaatcataaaatattacaccaaataattcttaaaaactatttgtaaagttttaaactaattttaatgtgttttacttcttttaattttcattttagtttgttttctattatttaagattaactttcactagagttttccttctcaactattttataaaaccttgtttagcaaatgaactaaatttctatatattctttcttccccacacacattttctctctcatcaacttacaactaaattttagagacaaaaaaagtgtgcaaaacataggtgcaaatgtagtatgacaaaaaaaacattggaggatgaagttgcaaaccttttaggcacctccgatttgtatgtaatcaccaaaataaattcaatagaaattttggcatgacctcccctcttttttgaagaaattttgaagcttgctcgggcagctggaggaggaagaagacatatatataggggtgggactttagccccggttggtgctaccaaccgggactaaagatcccgggggggcctgacaggccctgacagcattcgaaccgggactaaagatgatctttagtctcggttggtaacacaaaccgggactaaagatcaaatatgcccgttacccttttgaaccgggactaaagatcatctttagcccctgtttttattgcatccgggactattgtggaaatcggccgaccgacgaaagatggtttctccaccagtgtaattagttccgtaaatagtttatatttaatactctaaattagtgtcaaaacatctgatataatagggattaaagtttagtctctgatccaaacaccacctaagttgtttggcttactagggcaaccgataaggctcgaagtctactagtataccggaaggctggcatcacatgcgcatcttctttttttttttttgtccactcagttgcacagattggcacagaggaagaagagcaggatcagctggccggccggcagtctggcgcccgtcggcagggccgggtgccctgaaggcctgaacacatactgtggcttatattatcagtggcagctagacatgctcatctgatgaacaagctgttttctgcatgctcctatcattgctgcgcatatatactaactattcatcttcaaattaccaattcatccacatatacaaaccgcatggtccttctgtcaagtacagaatgaggattgtattgtacccggttatatattatactagtagattaggatgcatttccatctatatcctagacttgtttgaaaaccaagccttatatatcccctaaagcttaatacaatcgtctagttacatactagtaatcttgtatgtatccctatacgattcaacaatacatctacgaggcttccacacacgtgcatgatacgtacatgcacagaagaaaatgtatgtgtactcctatataggagtagtagttaggaataattgtctaaattaatctctctgcacggacgtaccgtacacgtattaatgcctgaaagcttgatctgcggaaaacatattctgatcaaccgctgcaaagcctggatcgtgcagtgctaattaaattggacgccggcgatttgtgcgctgaagcctggaggagagtacactgatgctagcttcatcgtgatgcgcatgcaatgaaccctgcgcactgcgcagcgtccgtacgttatccgacatgatcaggccgcatgcaggataggatatgcatctatatcgataaatctgcagaactatatattaactactataccttcatcccgacatataaagaattttgactaattatccatatacatagtcgaagtccttttacattttgaaaggaaggtactgtaataaattttggagacaggatcattcaaataagggcctgtttagtttccaaacaaaatttttcacgctgtcacatcgaatatttgaacatatacgtagagtattaatctagaaaaaaacaattacatagttcaccaggaaattgcgagacgaatcttttaagcctaattgcgccatgatttgacattgtggtgctacagtaaacatttgctaatgatggattaattaggtttaataaattcgtctcgcagttttctggtgtaatttgttttattattagactatatttaatattttaaatatatgtccgtatatccgatgtgatatgcatggactaattttttttttgccaactaagaagtccctaaatatatttaggaagatgaaatataggaagagccttctttaatttcagacaatgattagtgcagagcagttgctgataaggttaggtctagctagctagcgctgcaacgggctttgccttttaccctttggtacggtgtggagacgaagcacttttgttgctagctgctgagacagagactggctaatgacagggagcggtgtgacatacaaaccaattattcagagaatccgatcgatggatggatggatggatggatcgacctccggcgaggattgttactagatccgtctcatcgaacatgattaggacaacacaagaaagattgatagatagatatgcccggacggccgggaagatcatgtgtacgggaagagtatggcaaaagttaggtcaagccctgcaacaattttgctgctatttaaccttcggttggtgatggtcccgtttcttcgacgacgtgttcaacaccgaatgatttccgctgattatttgctacacgctttcagaaatatgtcttcttaaatgaaaactctcttctaatacttcctccgtactcgtaaaggaaattgtttagaataatatttaagtcaattcctaggaatataaatcataaataactctcaagttgttaagtttgaaaatgtaaaaattatatgaatagatttgtcttgaaaaatattttcataaaagtaaacatatatcacttttcaataaatatttttatagaaacaagaagtcaaagttgtgtttcagagaccgtatcgctgtccaaaacgacttactttacgagtacggagggagtacattgtttagaccacttgctctaaatagttttcttttttcacaactaacaatttttgctattcttatggacacagatgtaaggtggagctatttcttcattacagataattaacaattattgctattcttatgaggaaattgttctctatctgtcatatggtgatgtatggtatggacatgcacactccttccgtacggtaggtgcaaagccataagattgttttttttttttacggagggtgtactatacttgccatggaagaatacgctataaacctgtagaagtagacaatgaacacatatataaggtggagctcttttttcattatagatcaaatctggagtacaagtcaatcatatatatctcaccctgcgcccttttatatatagcggtcttaggaggagataaattttatctctactctggttaagattggcacacaagaaacttatctcctagagattgattttcacaacaaaattgaagtttgttgtgtatgtaaaatgccacatactcttccatgggatcttcagtactcctagatgggaacggtcttgctctcctgcccagccttgtgcacagataaaataaaaccgctgggtcaggacaaagcccatccgggaagcccacaatacaggctaaatcctacccttctacaggcccattgaaggctgaaagatctggccggtacccgggccacggtggcctctagcaagtcgccatgttttggaccattgagttggtcacgattttgacagggaataagatcattttgactccctcaactgaccaccgaatctaaatcatatccctcaactgcaataccagaaatcttaacccctgaacttataaaaccggtgcaatttgacttctttgatggttttggagagcagtttcactgacgtggcgcacatgtgacagtgttgacttagtctttgtccaacgtggcattgacatgatgtttatgtggcattaaaataaaaaaaatatacgggcccacttgtcattaaaacaatatgtgggatccattgacatgtaggccccacatatcatcttctctcactacccttcttcttcctcctctttcccttatttctctccctcccccttgactcccccttgacatggccggcggaggcgggggctcggtggcggcaacggcgggcaggtgccggagtggtggcggcgctgggtagttggtccttgtattttcatccatctcatctgcatttgcatctgtttctccctctcactcttgttttgtgttcgtcctcgtttggtctctgtttcttctcgatttggtttttctgctatggagcccatgaatcagcgagcggcagagctcctctagctcagcccctaacaacctataaactcctgaagaaggcacttacgtctgcgccgagcgtccatctgtacacacgtagtctttgttgacgatttctttgcctgttgctggaattgagcagcttgaggatgttgttgattcggtaggggtggagatggatgaggagtttgcagatgggtgggggcgtcgggtcggcgttgtcgggggcggaaacggacgagcggctgacgggtgactgcaaacataagagcggcgcaaggaaggtggttcatggcgagcggggacgccacgggcacacacgcgctggtccttccttggcttgatggcgagcgcctcggcgtcgtctatctccggcaccactgggagcagcagtacgagggaagcccacggcggctgcctcctcctcggccgtcttcccattggtgaagcccacggcggcggcgtttctcggcctcgaggcagcggcgcgaagcgagtggtctccggcccgccctcccgcctgccgcagccactccgtccatcgcccgccgtcgccgccgccgattcgaacgccgctccccacgcacgaagagaaagagggagagatagagaagggaggagagggaggaggaagaaggataagagaggatgacatgtgggacctacatgtcagtgggttccacacatttttttagtgataaatgggtcccatatatatttttttattttaatgccacataagcgccacgtcagttccacgcgggacaaagactaagtcaacactgccacgtgtgcgccacgtcagtgaaactgctctccaaaatcaccaagggagtcaaattgcatcagttttacaagttcggggggtcaagatttctggtattgcggttgagggatacgatttagattcggtggtgagttgagagagtcaaagtgatcttattccttttggcagagaccggcccagctctctcctctcgaaccgtcacctcggcgccaaaacttaaccggcccagttccgtgtcacctctcgcgcagccgcgccacagggcacaggcccagcgggacaccgagcgcgcgatatcgcggcccagccgctcgtcgccacacgaaacccacacgcagacgcaacgcacgtacggggaggggacggctggtttcgttcgactcgacttggtcgcgctccagcgaatgatgtgcgatcgatggagcacctgtgatacgttttgtacgcacgcaggcgcagcggatgagatgaagttgcattgcaccgataccaaaccccacgggatcgaaccagcaaacccccgcgtgaaggcgtgatttcgtggcggcacgtccgcaggagacgtgagcaatgaacggtcgcaggcgctgatcagcaaagaaatgagctttctcaagccaatttgcgaacacaatgaacggaccgagctcctaacgagcttgtgccagcctgtgcctctcctgaggctggagcccagccaaacagtttcagcttcaacagaaataggagcggagctgggtggagcattctcgcaaaatgaatagagaggtggagctgggtttaggctgctccacaactccactccaaacctaattcctgaagcataatttaggagttgtaactctactaaataggctctaagctcgcgagcttttatcaaagttcaactcgagctcctaacgaacctagcaatatattacttttattatttatttgacaaactaatagatcaaatatgtcattagtatgcatccacaaagtgaagtgtcttgtgtttatcttattatttttttttctattttggttattgcgatcaaataagcgaacgatcaaacgttggacatgaaaaaacataactacacttatattgggacgagggtaatattttgagacagagggattactacccatggggccttgcctgcccaatggcgagcgacgtgtacaccgtatttgccgcaggtgtagtactccctcgtctcaaaaaaaaaatcaatctagtcctctcctaggacaatatatgtggacacccactgtatccacatacatcaatataggaggggtcacatcccctattaagtacttgccactgcccattgctgtcacggcctgcagcgttgaccaaatttatggcccagtgtacgatggagacatgatttttgggctctgacattgaccaaaagtccaaaaccctcccgctacgtgaggcatcatgcatcaatcaatcaaatcaatcacacagaaccgagatatcgcgtggccgtgccatgccaccatatccttgcccaagtcaactcccgctccaggtgggtagtggtacgaatcgaccacgaaaaagattgcgtacgtgcaggtgcaggcgcgcgcagctgctcctgcaccttcggaccgcgaaaccaccgcggccacggcacacgacacaagggttagggcgcgagtcatctcgagagaacgcggaagcaaaaacatgcgtacgtaggcagggcgccacgagacagggatcagcgacaacgactacttaaccatcgatgagtagtagtagcagcaaatcttcaagggcacatctgttactgcagctaagctccagggttcaacgacatcatctctcttcctcctagcgtggattgagcgcaagtgcgcaaccgcggaagcgactacagacagcatctcgagcatggcaacgcttcttgctcttgcatcttgagtggaaggacaggttcaagtgcgtgtttcctgttgaacagtactacattggtcgtggaaggataaaacatctaagatataagtggggagcccctcatctcattggctagctttagggtgggaaaagccctttacgattctacaattggtatcggagcctagctagttcaacatctctagcccgagggacatagtaagtgaaggcctgatggaccgtggggggtggggggaggacggtgaagggctaagggacaccaatgtgtgaagggtgagattgttgaatagtcccacgttccttgtggaagggcaaaggatctaagatataaggcttctcacagtgcaaggcacgcaatagagggcttagcccaaaaaagtgatccaaagacactcaagcccacagtgcaggtatcttatttcgagtaacctaatgggataaagctacttttgaagactacaatgcccacagtgggcgtaccctagcacatgggggcactggcaggcgaaggaaattaattcctcacctacccttctcttcctcgcgacctcgccccttctctttctctcagccgtgccgcccctccttctcctccctcccgcaccgccgcccctcctcacctcccatgccgcggcggcgcggcctcggtgtggcggagctcgagcggacgccgccgcacaacatgcgacggctgcacatcgggcgcggcgacggcgttgtcctcagtcccgtcgaccgcgccgcctcctccccatcgaccgtgccgcctcgtctcggtcgaccgcgccgcctcgtcctagtcgaccgcgagctcgcctccttccttcacgcggcggaggtgaggaggaggaggaggtgggggagtagatccggcgggtggccaccggcctcgccgctgatcctaaccccgccggtgccgccgtggtcagctccatcatcaatcgacgtggcggcggacgggtccgcctttcccgccgacgggggcggtgggaacggacggcaccgaggatgaagagggtgagggagaagggcggaagcgggcgagcaggaagcgggcagcggcaagcttgagggcgacgaggagatgactccgatgccactgagcttgggctacgacgcgccgatggagcccaggcttggaggtggcggggttccctagtcgtgctggcggccgacggcgtggtcctcttgtgtgattcctcttgtgttcttgtgtgattcctcttgtgttcttgtgtggtcctcgtcggcgtggttctcttgtgtgattccccttgcaacgtcgtcggctcgccgccgcgatctgttgattttgcttgctgattttgaggattctcgacgcggctgaatcggtggcgggagaaggaaatcggtgtggcgggatcgccaggaggtataggcgcaaggtcacgggagggcgaggagacgcagcccatagcgcgcgttcccggggatttcggcgtcgcgcgctccctcacttggatcaggttctgcgctcctctgtttggggattagcaccctaggatggtatcgctcgctagctccacgtcggcccgaatcctatgtggcacaacgagatcacgcgccagctcaccgcactgtgagaggcctaagtgggagagcccatcacctcattggctagtttttggggtggaaaataccctttacgatcctacacttccaatcaattcagacgtatattttagtctatcattttgattctgaattgttgcattctattttatcgcaatccgatgccgtggactgttgtgacgttcaactcgattttcggcagtagtgttattgatttacgtaaaggaattacaattgttgtgatcaaaacatctcagaaaattaatggtgtttgtatgtggtctttgttaaatttctggatcgtattttctggttttaactcaatcccgcaagcttatgttcctgttccgaattgttcacctatcgatttaatcaatttgtcagtctgaattttgtgtgcgatgattagtctgtagttctgccctttgcatgctctgctgcctgaattctgtggaacctaatgggccagatatttccatcaagacaggggcaggccaattttttacccggtttccaagtggttcccaagtaggaataagttcatcggaggtctctcaacttaacagcgagatttttttaggtccctcaaccacaaaatcagaaatgttcgcccctaaattcattcaaaccgttcaccggaggtcacttggcagtatttttgcccgttttactgacgtggcatcctagtcagcaaaaaaaaattaaaaaaattcatatggcccacatgtcagcttcacatatctctttttctccttctcttcagtcttcttctcctcctcttcacttttctcttcaccggcggagcagcggtgggcgagaggttcggctgctggcggcgccgaacagcgacgcaagagaaggggagggcgtcggcgacggcggaaggtggccggagaagaaggtcgccggcgagcgcgctcctgctcctgctctggctgctgatgcggccgggaggtatcgccgatacaggggctcgtcgttggtcgtcgtcacgggaggtatcgccgtgcgctggggatgtcaaaatgcagagagttcgtgtcttagaagacggccatgagcttggcttctcccagcacatgcccctcgatggcgtccatcagcttgtccttgatcacctgtaagcaatcaagaatcaatcacagttaattaatccttaaacagcaaagatactcgctaaaagattgttcgatcgacttgccttgttgccgaggtgcacctcgtcgtcgaggacgtagagcttgaactggatgcggttgatgaactactgtaccatgtaatgaggagcgaagcgcaatnngaacncccct

SEQ ID NO: 17280 - DNA, 13701 bp, Oryza sativa
  unsure (1)..(13701): unsure at all n locations
gtggcctcctggatgcgtccatgaacccctccacacncgcggcaggacgaaagcttgaactggatgcggtggccgcaagagggagggatgactaccactcctgccgctccgccgaggccgtgacctgggccagggccggcgccgccgcacaaccacactcgcgccgagcggccgccagccgcgcctagccgcatcggcgccgccgtcgctcggccgagcttggctgcatcggagccaccgccgccgcgcctgcgcagtagcagccagagcaggagcaggagcaggagcgcgctcgccggcgaccttctactccggccagcttccgccgtcgacgacacccttcccttttcttgggtcgctggccggccctgccggcagccgaacctctcgtgacccgtgggccgtggctccgtgctcgttcaccgtccgcttcgcccgcatcccgcccaccatgctctgtccgccgcccgctccacccgcagctggccgccgctccactgccgcgctcgcccaccgccgctccgccggtgaagagaaaagtgaagaggagaaaaaagatatgtgaagctgacatgtgggttccatggaaattttttttttgctgactaggatgccacgtcagtaaaatcgggcaaaaatactgccaagggacctccggtgaacggtttgaatgaatttaggggcgaacatttctgattttgtggttgagagatatcgaaaaatctcgctattaagttgagggatctccggtgaacttattccatcccaagtgaaagtgacaatagcactaaaagtgacgggtcggcccgtcctgcacctgaagtccacaatgtatgtcatacctttttttctcgaggataaccggagttgtgcacgtcattactactagtatagtaataataacgtatttcttccgtaaaaaaatatatacgaaattacccccttaactattgcgtcggtacgaattacgtccttaaagcataaaaccagacatttggcacctcaaactttctaaatcgaacgaataaacccccccccccctaacttgacccatagcagttttggatcatacgtggcgcacacgtggcggtccaatcacctttaaaaaaaatagaaaatagtgggacccatctgccagatcttccttttccttcctctccgctaactccggcaccaggagttacgagattccccgcagcggcaaacgacatcgagggcgaggtggcaaaggagtagatcgacgacgagggatgtcacccgccacccgtcggtgtctcctcttctcttttcttccacttcctcccccttatctctttcttctttctcttttttttcttcagatttgtgcatcctttgacgcaggacaagctagcgaaggatagggtgtgtgtgcgcggtaggtggggaggggccatcctcgccgctaacaaccagtagagagtggggggacctagcactacttcaccttggccagatgacgtgggcgtggggcttgggttgccatggcatttaggtagaggaggagacgacaagacagggaagcacgggagggagagtaatggcgtacttcggggtcgccatcaccatcaccaccgcgcccatgacagagacggagacggagacgaaggggagggcagcaaggtcgtcgccgaggaggaggtggtggcgtctagggtgcatgtgcaggccgcaacgctactcctctcggcgcccgttgttgcctcattggcgaaaagagaaagagagaagaggagagaagctgacatgtagtgctcacaaactttttttaataaaaattggttgactggagtgccatgtgtaggataaaacttttcgaattgagttagggggtaatatattcggtttacatagttaagggtgtaaaatatttggttttcgagcttaggggataaaccggactaacacaatagttcagaggtaatttgttctttctagtattataaatttgatataatcagtacaataaatctagatagaattaccaactgccgagctctgatttttttttctttttgccaaaggtggagtaccaactgccaaaggcattatttcctgcacattcccagtaacgagaggctgtgccgctgtacgcggtgcgccacggcaacactacacagtaccgtcattctatagtaagggtgtgtttggatgggaggatttgggttgataggacatgacgaccctttttttgggtgtttggttgctgggcgaagactggataggatggctcgaaggggaatattcccctcagattttggacagagggatctggccgaatcggtcagatgcggccacccgagcgacggacgagctggatgaggggtcgcgtcacctccatggagagagaaggggtgatgacgacgccgatgcgtgcccagcggcgacgacaaggaggaggcgttgcggccgacgagcgccgcgtcggcagtagaagggtgcagtggcgaacgtcgcggcggcggtcagcggcgagagtcacgtcggcgggaagagggaatggcggtgagctcagagatccggcgcgggagatgagcgccgctgtgatgacgattagaacgcggcaacggttacaacgacgatgagaacccggtgacgacgacgacgatgcgggcggcgagcgccgcgtcgacgggaggaggcggggcgggaggaagcagcggcgggaagaggcgagcggcggccgacaggaggaggcggtcggcgggaggagaaggcggcaacggtgagccccagatccggccctgttttttttttctatgtgtatttataatggaggtagtggtgtaaaattgtattatgtaatttgatggattatattcaccgtctcaagtgagaggtgaccacacctacaaatccaccctactctcttcgaccaaacaaaaaattggatcaccaaatccaccttcattgtccttataatcaaataaaaaactggatcgtcatattcacacaatcaaacaaaaaaactgaaccgcagtatctaacaaaatatagaccactatatcccatcaactttaacagtgaaccaaacacaccctagactgcagcaaactgcgcatgcccctgtggcctaggccctcgtccaaataatctactgtgatctttcagcctgcggcagatgatgatgtgccactactattatatcaaggcaccgagattccttctgcaaatcctgcgatttcgcaggcagtatccaaagaacaaatggggcacaacaaaatcctgtagattaaaccacgagaaaatcagcaggggaatgttgcaaacggaacatgcatcgtagattccttttccgaatgcatcagatcagttcgtcctttggccattgggctcgttgctcattattcaccatttgacccaagcattacctggaggactatagtagggctacctccgtcctaaaataagtacagtcatggagatccgtgtctaacgtttaaccgttcgtcttatttgaaaaatttataaaaaaactaaaaaaaagtcacccataaagtactattcgtgttttatcatctaataacaacaaaaaatactaattacaaaaaaatttttaaataagacaaacggtcaaacgttggagataaataatgcaaaactgtgtttattttgggatggaggaagtacttctttcatcctattataagatatcacacatcctaatataaataaccgtttgtttaaacctgtaatatgatgacacatccggtactagataaacttattttgaaatagaggtagtatctcgtaaatagttcatctctaattggttgatctactgctgataagtccactaaacactaaatgatacaactgaaataaattgttggcaattattttttattatactattaatagttcaaatgccaatggtggaaagtagaatatgattagagaaacacaattaagtactatgtctcgagtttaaattttaacagcaatgactgatagaaaaaaaaggcaaacaatgaaagccacatgaaacagcaaaacacaaaaacaacatgtgcgtgcacaagaaacgcacatcgcaacacgagatggtcgtttttctgccccgtcctattgtgcagagaggacacggcgccgcgttggagcgcacagcacatgatccaactccagttcggagtgagctgcgaagcagtagtacacagtacgaacgggacagggcaggcagaggcagtttcagcgccttctcccaattttttttcaagaaaatccaagaaatatcatcgacgagaaatactatcaacaaacctaacttagaaatgctatcatacaatatttttgtctcaaaaataccataaccgttaggtttttggtgagaacgttccgttaacgttgtaaaaagaccattttacccctataaactgttaaaagttttaaaactatctatccgttagtgtaggttgctctttacatatcgtaagttgaccgaaatgcaaaaaatttaatcaactttcaacaattcatgggagtaaaatggtattttcatatacagagagttgctaatagaaacctaacggcaatggtatttctggggcaataggaattttacaaaccttgaaaaaaataccttgaagtacccaaatttttacaataaattttttagtaccataagattaatacctagatgtactaaattttacactagaaaatatgatacctccagatatcttctaaaggatggtaaaattaactctaggacaaaaatgtttgtataatggtattttatgaaagattgattcgttaatgactcttggagttaatgatatctcttggattgggtgtttgtcaatggtattttatggatttttttttggttgatatggaatgaggaaatgtgaaaatccattgtcgcattttgatcggccttggatgcgactgggcatccaaagaacaaatcaacacggacatatccaagctcaggagaaagaagcagtaaactactctgatccactcgaccactcgtagacccacccccaacaactctgccggctggcctccaagagatctcatggaaaaagtgccgtcttttgtagcaagtgaacaaagaaaatatccttgctcctctaatttcaattacaggtcagcagttttggcactctcagattcttttctaaagaatttatttgcacccttttcacatttgttttttaccataggatttgaacctcttgttcttctatattttccccttttccagaatgaatcgttttcttaatccttatgtacaaatttaaaacaactcacattaagtatgagaagatgtggtatactccactttcaaactgctactcaaccaccaagagaatcagcacattctcactaggacactacaaacagaggatcagatcaaggaagcacatgctcagagcttcagattaccagacgaagtataaaactcctacaatgctactactactacctcatatgatttcacaagctaaatccttattgccggagaaaactactaactcaagaggaggcacctactaagctagcactagtaactagtagtaatacaggcatcaagagggtaattaaggacataaaaatgaagacaaagaaaagttttctttttttttttggttcaagaaagctcctttcttgcactgcatcatccccgccgtgaaaagtgccatggagatgtcaccaaacagggaaattttgaacctttcccttttccctcctttcactctcactctcactatcactcactcactcactcagctgtttcttggcctccgtctcctcgtcctgtccgtcctcgccgccgcctttcttggggctctccaatgccctcttctcctcctcctcctcctcctcctagttgtcgccgccgccggtcgcgttcccggccgccgccgacggcgggcgcttctcggcgcgcgccttgagcacctcgaggagctgttccatggcttgctcgcgcccgttcctgcggttcttgatcagcacctcgctcacgtccgccggcgtgatctccgccgcgtcgatccacgtctccagcccggccatggtggcggcggctgcagcggaggaggaggaggcggaggagtcgtcgtcgaggtagttccggaggaggatcttgagcgccgggaacgtgcagtagctcatgaagatgtgcatgtccatgcggccggagcggagcagcgccgggtcgagcttctcgatgtggttggtggtgaagacgaagatgcgctccgagccgcagcacgaccagaggccgtcggtgaagttgagcaggccggagagcgtgatcgaccgcgccgccgcgccggccggcgccgccgccgcgttctggtcgatcgcgccgccgtcgatgctcgcccgcggcttcggcggctgcgccacggccacggcggtggcgcggttggtgaggtcaacggagcagtccatgtcctcgatcacgatgatggacttggaggtcgtcttcatcagcagcttccggagctcggcgttgctgccgacctcggtgagctcgaggtcgtacacgtcgtagccgaggtggttcgccatggcggcgatcatgctcgacttgcccgtcccgggcgggccgtacagtaggtagccgcgcttccacgcgcggcccgtgcgctcgtagaacgcgctcccgtcggcgaagtcgcgaaggtcggccatgatggcggccttgcgctccgggtccatggcgagcgtgtcgaacgtgctggggtgcttgaacgggacggggtcccacggcaggccgcgcgcgtccatggcgccgccgcgcgcgttggtgtagagcagccggtcctggctgcggcgccgaatgtccgcggcgccggcgaggatgtggtcgaggtacgccgggagcagaacgccccggtcgccgcggcggatccggagcgtgaaccggcgcttctcctcggggagcgggcgccacaaaaagccttgcgcctggcgcggcgcgacgacgtgctcccacgtgacggcggcgccgcggaaggcgtcgagcacccggtcgctggcggcgagtccgaaggtgaaggacgacgcgttgtgggggcgcgacagggtgagcctggcccccgcggcgggcgccgccgagctgctgaggtagagctgcacggcgtcgtagatctcgttggtgcccatcccctccgtctccgtcacgtcgaagtagcagtagggcgagaaggcgcgcgtcgcccgccccagcagccgcgccaccgccgcccggagctccgccgggaacaccgcgtgcaccaccccctgcaagaacgccaccgcgcccatcagcgacgccagcgacgtccagtactccctcatctctcctcctcctctcccctccacaatgcaatgcaacaagaaaatctcgaggattttggaagcgaagaggaggaggaagacgatgatttataggcgaagaagccggagacaacgcaaggcaaggtcgctatcaacggagagagacgacagtttttttcttcttttttttcttgagaaattattggcagggagaaaggatggatggattcttgatgcagttgcagttgcagtgtgattgagtgcggcagagatggatggagacaaagatgcagattaacacatgatggagagatctcctggattgagttcagagttcacagttgagagagagagagaaacaggggagatcttgctcggtttggactgcgagggtggagaggagatacgctgatactcccccgtccctttatacaaggcattttaatttttaatattttgtttgcatttttttttgactgtttgtctcattcaaaaaatttatataaatataaaaaataaaaattgtgcttaagtattttggataataaagtagccacaaataaaataaataataattttaaatttttttaataagacgaatggttaaacaacgcaaacaaaatgttaaaataggaacggagggagtatgaactactagtacattgtaatgatgctactgtacaatccttttggcagagggttcaattggtgcaaggctcccgttgaaatagagtaggaaaaggttttttttttttttggaggattcaactttctaaggacttttattttgagccccttgattcagaataagaagatagagaattttctatagaattataatcctatgaccaattgcatagaaaaaataaccaaaaggttagatctcttggaagactttcctttgatttattttccctgaggtgtaatcaaaaggctcatctttctgttagctctgccttttaatttccgtagaattgaaagagcgtgctacttcaattcttaccttttttttgttttatgttcgttgcatttttttttcggtccagtgttttaatactcgttttttccctaggtggctgacaccgtgggcttggactcttggaccatggattcttgggagttcccttttttttttttttggtatcaagattcttgggagttggaaggcactcaaccatgaacagtttaggtgtcccaatgagatgcacaattgcacaatacacatactattcttaaggcctcctataggttggtcttcaaacgatcttaatggttttcatcagttcagttactgctaatagaaaaatgaacaaagcaataaaaaaaacttttgcatctgagttatgagggatttaaaaaccaaggctgaaaaccagagcacaattcataaaccaaaaataaactctaaatgtaagtttaaaaatcaaaattttgctgataaggcactgtttagttcccacgcaaaaacatttcaccatgtcacatcgaatgtttgagcacatgtatggagtattaaatatagtcaaaaaaaataaaaccaattacacagattgcgtgtaaattgcgagatgaattttttaatcctaattgctccatgatttaatattgtggtgctacaataatcatttgctaatgacggattaaataggcttaataaattcgtctcgtagtttacatgcggaatctgtaatttattttgttattagtctacgtttaatacttcaaatatgtgtacgtatatccgatgtgacacgctaaaacttctcaccctggaatcctatcttagtataaagttatcccccactaactccttaagcttaacattcaaagatgccacatcatcatccactaacaagataccacatcatcatctactaattaacaagatgccatatcatcatccactaacaatcatcacatttaaacatcgtgcaaacatgctatatctttatagtttttataatttaagagcttttcaaatacaaacatgttaaattatcatccaacataattcacataatgtttcaatgtatatctttattatgttttatgatatcctatatacttatatatagttcatcctcacttagttagtgcttaaatgattaatctatgatccaaattatatttctccttttttcctctaattaagtcatatcacatcaattttttttagcctttagatgattaatctacagtctaaactatctccctactttatctcttccataaagtcataccaccttactttttacgtttgaatcactattctacatcctatttaaatttaaattatcataaaccacattagtttatataatatgatgttatctagctatcttacccgttatttttttattattatcatactaaattcccgcagcaatgcgcggggtttcacctagttaaacagggcctaagccaacaagcagacggtgtaaaccgttaatagttttatataaaaaaaatgtacaaataacctcagttgtcaattccggtaagggagattgatatgtacagtggagtaccttgcttggggggatattgcaaaaattgctttactatataatattccttttctgaaactatttttttttacttttcattcaaccgctctgaacagaccagtacaacattggattctttttggaaagaaatgggagtttcttcaccatgaaagtaaaatggtcggtttaccttattttgagaaaatagtactactaatggctgaataacaggtcccaagttcacacgcatccacactgtatttcacaactcacaagccatgcatgtctccgtcaatctctctctggcattgtgtttaggggtgcgcagaaaaagaccgaaccaaaaaaccgaaccaaaaagaccgagatagagaccgaaaagactgagaccgagaaattcggtcatcaattcggtcctaggtagtgaaagaccgaattttgttcggtcaattcggttagtctcctcgtgtaaccgaatagaccgaaaagaccgaattatcaaaaatgtctagatgcaacctcaatccactatgtttaataggattaaactctaattttcacattcctacttcttctaggcatgcaacctaataagagtctttacttataagtgtttacggatcttttttgtgatttttgtgttgaaaatttccattatttctttgcatatatgaaaatgttgttgaatttcggtcaggaccgagaccgagaccgagaccgaatttgtcgggcctgacatttttgcgctgaaattcggtcttcacttttcaaagaccgaaaagaccaaaagagcgaagaccgagaccgaaattttcagttagaccgaatgcccacccataaatttgtgtttgcatgcgggggtgtttagatacatgggtgtaaagttttgacgtgtcacatcaggtattatatagggtgttgcatggggtgtttgggcactaataaaaaactaattatagaatccgtcagtaaaccgcgagaagaatttattaacctaattaattcgtcattagcaaatatttactgaagcaccacattgttaaatcatagagcaattaggcttaaaagatttgtctcgtaaattagtcgtaatctgtgcaattagtttttttaaatctatatttaatacttttattaaacgtttgatgtggcagggtgaaaaattttaggatgggatcttaagagcaagtttaatagtatagcccactactagctccaaatcatctataatcaatgtaatagccaattcatacaatagttagttattatactattaatacctagttacacctgtcatatatattacgtcttaaagttcgtgctgcagctggctatagatctgtaacccgctactcttctctctattttttttttttgcccgctattgtacctgctctaaacaggcctgcagtcaattcagctactgcatgtacgacaaaagataatatttggcgacaaagattgcaccgactcgttgtggactgtaaatgaaaggtactagtactaccttcctgcttcctgcaattttcaatgcctagttgtgccttggtagtttgccgttgtctcatttcgctaatattgctactaccatttcagagtttagtagtagtagtacattgcaactcgcacgagtggtaatcattccgtgggcacacgttagggcattagcaatgcagctaccgcacttgccgttcctgagctgccacctaacccaagtcctttgagagtcacacactccacagtagaggaggaggataaggctaggaccttccgtgtctctgttgctctttctcatcacttatcatctctcaacccctctctctctctcctctctacatgtaccggcggcggggcgtcccgaggagcggcggtggctctgggtggcatcggcgctaggtggcggggtggcccaagccacgacgacaccgggcggcggtggcagggcgtcccgagcggcggcggtggcaccggtcggcgttggcgctaggtggcggggcggcccaagccgcgatggcgccggacgccaggcggcgagcgggtcgagcggcggcggcggcgctaggtggcagggtggcccgggcggtggcgagcgggtcgagcggcgggacggccggagccgcggcggcactaggcggcggggcgggtcgagcggcggcggcgccaggtgcgggttgagcggcgatggcccgatgcctgcgccaagccactcgtgttttttggttccaagaacgagtatcgaagtttggctccgagtacctcgtttggctccgcgagttgccgatgtggcatcgaataatcggttcttggctgctaggctgaacgccacctcggtgcgttgtgaacgcccttatggccctttggaaacgtaccatagaagaaaacatggtataaataagtgaaacagaaggatcgaaatagcatgtttttcttaagagcgatgttccggtgttctctactgttagtattatattaccagtattattagggataaatcagtaatttactaatacaatgattaggttattttatcatttatgttttttcctggctaaatcgatctatgagcacccattgtgttggtatcgcttatattccattgaaaaaaccaaaaaaagggaaaaaggtttagtcatggctaaaagatgattatacctctcccatctttttttacaataattttcctccgtgttttactaccgctaactgtggtaatactataaatagatccgaaccgttcgattaaataacatcaatagttcagattgctttctactcactgcattggatcacgtcatctctaatgggctcatgcccttacctgtgatgggttaagcgttggtcacagatcagtggtcactgatgcctctaggtcacctgtgacgagtaaagacccatcagaggtaagagttacctttgacggactacaactaaaatccgtcacatgtaaccttcatatgtgacgggtaaatattttaactcgttgatggtaatccttatctgtgaggggtccgagttgggacctgccacaaacctcaaaaatggggaaaaatattataagcctagctagtcgcaaaccttcattaggcattcacaaatcacaaaaataatcacattcacaatcatttgtgcacaaaacagaatcaccaaaatcgtccacaatcacattcatctggccaaagaaaaaaatcacttcacattcacaatcatttgggcacaaaacaaaatcacaaaaatcatcacaatcatattcatctgggcacagaacagaaagtatcaactccatctagcggcaatggatctgaggggaagggatctagcggcggagctcgatctggaattcaccaccgccagatcccacgattggggcccggatccacccacaagctccagatccggccagcacctgcaagctccagaatggatctggcaaagacttgccatcaatatgaaacgcatcacaaaattaatgagaataaaatagatactttccattgatgatgaaatcctaaagccactgttggcggtcgtcgtcgtcgtcgcttgagcggatctggaggtggtggctgctgggaccttggggcagagggcgaaggaggaggtggctacagcttggggccgtccagatatagtggtcttcgaccaccttgagaccagatctggcgccaaggagctcgagacggcggagagacggtggccggtgaccttgggattgagggagaaggaggcgactgctggagcatggggggcatctagatcctgtggtccccaaccacctggagaacggatctggcagctaggagctcgtggcgacaaagagaccgtgaccaatgatcgaccttgggcattgcacaaaggaggcggcttgctcgagcttctagaggcccagggcgagcgaaaggaa

SEQ ID NO: 17281 - DNA, 3788 bp, Oryza sativa
  unsure (1)..(3788): unsure at all n locations
aagaagaaaaagggccgaattgatgggtggtgggcccccctgggggtatatataggggtgtatcttgtggacgagtgatatctcgactagggtatttagatggtatgtggatcgtcggtacagggtatatgcaagattgaagtaaaagagatggagacaaggatttttatacagattcggaccccttatctcacaggtaatagccctacatcctgttggccgaagccggtgtttctctaattcatctgaaatacacaagtacaatatttaggataacctatctagctgtcgtcgacttggcgacatggataaccaactcgtagtcgacgacagggtagtcttcctcctcgaatatgagctcgtcgagatcagagatggcactagatccctcttgccagcctctgtaggcactagattgggtatgtctaggctaatctctgatgtcgatatctggtggcttgtcttggcgtgtgttggcttgtattgatctatgttgatcttgtggcttggcccctctcctcctatgggggcttgtatttatacccatatatgtccccttgtccaagtagaactagggacatcaatatggatacaatccgagtagttcttatcatttccatatagaactctattcatcatttcttatccggaactccttttatataagaggtatgatcccgtataagacttggtacatggtgagccctgccgagtttagtcaactactattagctatgtggtatctatcaacgtttgatgtcgcgattccagtatttgcatagtatgaggatagttggtactaggatatatgcgagactgaggtaaaagagatggagacagtgatttttataaaggttcgggcccctgaattgtcaggtaataaccctactcctgttggccgaagctggtcgttgctcttattcaccataatcacaccagtacaatatttggggtatcctatctatctgttgtcgacatggtggcttgaagtatcatcacgtagtcgataacagggtagtcttcctcctcgaatctgtgtccagcgacatcagagacaacgctagaaccctacggccggcctccgtaggtaccggatagggtccgtccaggcatatctctgacgtcgatatccggcgacttgtcttggcgtatgttggcttttgttgttccgtgtatgttgattgtgtcccctcttctcctaggggaccttgtatttatacatataggtgtccccttgtccaagtaaaactagggaaaccaatatggatacaatccgagtagtccttgtcgtttccatgtagaactctattcatccttccttatgcggaactccttctaaatccgaaggttgtttccgtataagacatgttatgtggtgggtcttgttgagatttagtcgactactattagatatgtggtatccataacgctgacagtatccataaccatgacacacctcacctcaaacgggttagggcttaaacctgtcagaggtgactaaacctcacctctaacgggccgggaagttgcggcccatcacaggtatctagtcacctgtgacgggccacaaccggatggctcaccgatgacggcatcccgtaatacctgtcaaaggtgatggtcttcagtgaccagcacttcggcctgccacaactatgccgtcagagatgtgaggatctggcgtagtgactattagtagagagcaacgtagtaagactctttttaaaaaaaaaaatccggtgaaaacaaaaggagagaagccctttaattgtaacacgggaaagattgaaccaaagaaaagtttttaagatgttttatcttaggggaaatatcctgtgaatattagttaagtgttgaaaactcgtaaaaatcatacctaaaagtttgtaaatccatgaaaaatttttactagagataggtgtatatatgaaataaattctcactaaatcttaaatccaaactcaacttcatttgagagaaaaaaatgacaaatttcaagtaaatggtgtctcctgtccctattcattcgaaatttgtcttttgttacttccaaataaaataaagtgcctatttttctttggaattgatcgtaggaatataatcttataaaaaaaatatcttctttctacgaatcaaaggagcctctagggaaaaaaatcctataagaattattttctctaaaatcctttgtcaatcatgaatcatccaattcaaaggagcgcacgcttgcactctcaacagcggtgagaaaaacaaagggacgtggctgcgtgtagtaacacataaagccatatttacttttgagaccaacttcgacaaatggtagtaagccaaaaataatcatggtggtgatttcgttttcacgcttgcagttcaaaattgcagactgaccgtatctcaataatgtaaagatacaaacataccggtcgatcggtatcagtcagcaaccatggacatcaacaagttgcgagtgcgagacatttttgtcaattttagtaccaagtagttcatgtagcaacatcaatagaagaccactcaggacacacaccaagtgtgtgtttgtggtgtagatagcatggtagagtacttttgaacagtggcctaaacaattttgcacatcagtcctctgctgttctctcttaaacccttaaaatatgtatctccaactatttaacttgatggagtagcttttttttttttcattaggaacctatggtaaaagataaaaccacataaactcgccttgagagaaaaaaaaagaattggacaatcaaaggatgaactaagaaggaagtgaaaaacaaaaatcaaggccatcgataacattaagtcgagaaaaagacttcatgtaagactacttttcactttttcactttccgctcggggttggctacagcctctggtgtggattagtaagaccacttttcacttgagcatcaacttaagacttaacatagtggaacatcagtgtgtttagtggtggatttaccataagcgtggcagggggctcgagcctccattatcggcactaagagtacataagcctccaccgagttttcttaaaatttcctgccatagaactatagaagaagatctcctattggtaaaggggctgaaatttttgtctagtttatttagtttttgtacaatttctttttggatttggctgtgattgttttaagctagactgtgcattgctaaatggttgaactggcaccgacacaaacgacaacttggctcacacttatccgttcctggccggtgcaagcatgggtacaaaaacgaagtgcacaagtacattcagggcacacgcaatgcaatgtccggatatactcttttcgttcctaaaaatcaaatatagtacgatatattttaatattataaataaatctgaatagaaacatgtacatattcagtattataatgtattatgtctcatattaaatttgatttttatggaccaaagaagtacagcttagctggatgacagggattagtcgtatatggtcctcggtagtacttaggggctgtttggcaggactcctctccaagaaaatagctccatctccaagttttttttgccaaacacgagtagtggagtagctccggctcttgaatcgcagctccatctccaggaatattctggagctcctcaaggggtactccaccaaaacctggagtcatatgtcctcatggagatggtaaaaaattacccaccattgccattggttacaaaaaaacgattcgcttctattcctattanctatggcngacacatatggactcct

SEQ ID NO: 17282 - DNA, 1107 bp, Oryza sativa
ccatgggggggtttccctcctcccgcaacgggcaaggggcgcgtctgcccgcctcatgttgccggtcagtggcgcggcaaggggccgggctgcccgcctcccgctgccggagccgccttgcacccgcctcccgctgccggagcagccttggggcacggctgcccgcctcccgctgtcggagccgtcctggggcacggcagccctgccgccggagccgccgtggggcgcggctgctcacccgccggcgccgcactggggcgcgggtcccagccgaccggcgctgcccagcagcaagctcgtcccccgcgtactggatgatagaagagcttttccccatttcaaaggttgtattggtgctcttgatgaaactcatatccgtgtgtcattgtcacctgatgagcaaattagatatattggaaaaactggaattcccactcaaaatgtgcttgccgtttgtgactttgacatgcattttacttatgttgcaacgggtcaaccgggagctatgcatgacacaagtgttttatacaatgcattaagagtggatgaaaaattcttccctcatcctccacaaggtaccacacttgtattatgctctctatttgtgctaactgtgcatgtgttactaaaatgtatcaataatcatactatgctatcttttgtaggcaaatactatgttgttgacgcaggatatcctaatcgtcctggttatcttgctccatacaagggtgagagataccatttaccagagtggcacagaggtatggaacccaatactccaatggaaaaattcaatcgtgtgcactcttccatccgcaatgttattgagcgatcatttggattactaaaaatgaagtggcaaattctgtacaagatgccgtgctaccccatgtacaagcaaaaaatgattgttgaggctgctatggtccttcataattacattcgtgagcatggaggtgaggatcctgattttgctaggtttgatcgtgaccctaattttattccaacaataccagaacggtacaacaaatacgcagtttctcgaacggcatgtgatgagtcaactcccgaaagaagtgcacgaactatgtatccttttcgtgatgg

SEQ ID NO: 17283 - DNA, 14092 bp, Oryza sativa
  unsure (1)..(14092): unsure at all n locations
gagcgtcttttgatgctgtgcgatgcccnagcncancacgctagatttgtaagacataagatgataatgtatctttgttggacttcaattatgaacctttgattaaaatgtggtaccttgtgcggattttgctatgtgcggattttgctcccaactcgtttctcaattgtggcagatttgcatgtgttccattaagatgtaaaataaatattacgataaaaaaattagctactcggaggtgcaattccctagtacagtagcagcattgccatgcgtgttgctttgcactctgactgtgcgctctccagtctactgtgtagctcgatcgtggccgttttggcgttttgctgcaacattacctctcgcagcaggattgaaataggtgcttgcatcgtcttgaaaaaagtctattttataatttttttattttttattataaaaaaattagctattcgagctaattttgtaccgttcttgaaatagctacttgcatcatcttgcaacaagtctattttgtaatatattttattttttattattgttatggctgtgagaaatattaaacatcactatatattagtaatcaacatccatacaagatccatgggcaaaacagtcctttcactcatcctcctaccaaatctggagctggaccatatgtattattacccaaacaggtgctagctccaggagctccacggtggagaagatttcctggagaggagctcattttttttagaggagctctcccaaacagccccttagcactgcacacttggtgcgtacgtgtgcagcggcaaactggcaaaggtgcagccaacaaatgcacatgcttgcctgcctctctagctaatgctgtgtttggatccaaactttcaacttttttcatcacatcaatctgtcataggcacataacttttcagtcacatcgtaccaatttcaacccaaactttcaactttgaaaggaactaaacacagcctaagagcctgtttgggggagcttttagatgctccacttctcctagaatcagaagctccccccaaacaacctagcttttggtgcagattctaaaaagctgtaattgtagaagtcataaactgaaaaactcagcttttctagattattaaaaactggctttcaactgcttctgaaaattttgagctctctcaaacaggccctaagcaagtagttgcagttcattgtccgtcgtcaacgtagaggttggatatacggcaggcttgtcaggaaagggttttagtggaattggaagtgtagttcctgttttttcctacgcaaaactttgtatcgttggattgcttttagaaaataccctatgattcactctgctccacttttatagctccactgaaatgcagtaacagtaaatgaaaaatagagaattcaagctcatagggattttaggtaccgtagctccatttggatgaaaggaataagtcaaaggaaaaaaaacattaggattagtcccatattaataattaatgatggaggagtacaacttaaaatgtgcgagcggttctaacttttgggttgtgtttctagttgcataggcctatggtgggacatgcccattgcaacgtgagtatccgatagttgacgggtcgagctatgcattccgttaagtggtacttaaggtctgaaggcttgaaagaacttttagagcttcatggttgagggtgtgtccataagagcatccacaatgtattagtaccccttaggtattaaggtaggtcccacataaaagcataagaccaaacatcgatttgtgcaatgtataacctacttcaacaatacaatgggatccacatctaataaaatttgtatttctattggtcctcttcatggcttgggtaaaagagtaatgcttgtttatatgaatagcctggcctcatgggaagacccggcttgttctttgatagcctaaaacttgttttttgcaatgtatagtacccttgctatagtagaaagattcccttagtgctccccttagttcccacaccatggatactctaataagttttcggaggttgttaggcacggttgaggtcaggtgtacgaaataagtctttgcaaattattggacacgatatatgacagtgaagattgttgggtttactcgtacatcagatattgatgttaggcaacacagctgaaatggtgggggatgagacgaggcttttgggtaatgtaggcttagcatctagagttgtagttttgattggctttgtgggtttatagttggtgggctaggctatatattataactagtggtatcagagcacaagagtaataagtgtcattatagtcgatttttttcttaaaagagctagtgtttaaaaatataatgtgatgaaataattctaaaatcaactctaaaattagttttaaaattcaattattaactgcagctgataaagataataagagtaaaggggtatccatcattttcttcctatttttttctttagggttttgttatttcttggtctgcgcatatattgggtcaccggcaaatactttatatattatgaaatggagagaatagctgggaacttttgtttccgctaaaagattttgtttttggtacatcaaccattcacccactttggttggtttagttcttgttgttccatcctacatgcacaatcgaattgagctttgttccatcatattatgtcttttcttcagttttatgacaacttcacttttttttatttttttagttttttattggttatacgtcttagagcaaatgccagaaatgtgaatccttttcatcagtgttaaaaaaaaaacacaatcgaatcgaggagcgatattgtgcagtcaatttgcctactcctagatcagtcaaaacggaaggacgtcgtgtactgctactacaagcttacaagggccagcaatgacagtgtggtacagtaaatgctgaaacggctgctttgtcgctcgtcatccacagaccgggataatgcatccactgccactttgaacaacgtgaggatgcagacagttcgcaataaaacaaaggatacaaacgctgtcacattttctcacagtactcctacactcgacgcgacgagcatcgtggtagagtagcagccgccaccaccacggattgagatcctatgtagttcgactgaaccgtttcttttatcactgatatatgatttgatgatctttaaaaccacatatcctgatcccaggcgtggtgcagtgaaatatcctgatcccaccactactgtagcaatatgccaaagaactgaacggcagatcgttctcaattcgtggtggtgccactggccagcttgctatgaaccactcactgctagagatagcagcagcagtagacgcatgtgtcgcagcaggcagagatagagagacagctactctggactggagccaaggcagctagccctactagtatcccgtaggagtggaagtggtaaagaaaacaagacggcatccaaaccaacagggccactgcagtgcagacgaccgaatctctcagagcagagcagagctgcactgtgctgctagctgcttggtgcgtcgagacataggatccctttaggcattgatggacggcagcaggctggcccctgcacggcgcgacgccggcggctttcccggccacgagttcgtacgcctgcctagctttgccagccgccgcgcgcgttggggccgtggccgaggaagaagacgtgctagctcgcctacacacgcccgtcgtcctcttcttgccgacaatgtgcgtcgcagtagtagcagtagtagacatcggttgcgactggatcggaattcaccggtcgaagagcgtatagctgtgctggtaattctgtgggaatctccgatcgaggtgcgtgtgcatgcatgccacaccgtggcccatccctggcggctcgctcaggcacatctcgggcgcctgcattagagcaagtttaatagtttagccagctaccggctccaaatcatctatagctaatctaatagcccattcatacaatagttaactataaaaatatactacaccattaatacccggtcccatctcttatatacacataacgtcttagagtcagtgttgcagctagctacaaatctgtagcccgatttcttctctctcttctcttttctttctcgatatgtgtttataactggtttatagcctgctattgtacttactcttatgcaggaggacaaggataatagtaaactactacatccctcttaaaatataactttttttctataaatataaacacatttcattctctggtctagttgttgttttttttttcattaggaaccgcagattttttagtccatcacattcacgcatttacaatccatgtgactgtattaatacttttaaatggtattttattaatagcaatttatgcttcacaataatatatattttgtatatcgaagtctacagctaaaattatttatattttaggacggagagagtataagttagctataaacttatacggagaagagagacgataaaaaaaatcaatggtgttgactctcataaacagctaactcggcacgtgctacaagacaaatattaccttcattccaaattagtggtcgctttgattttttttcttacaacgtttgaccattcgtttaatttaaaaaatagtgtaaatataaaaaaatgataagtcatatttaaagtattttttataataaagcaagtcacaaataaaataaataataatttcataattttttaaataaaacgaatgatcaagaattacaaacaaaaacttaaagcaacgagtattttgggacggaggtagtacattaaatacataagtaaaaggaagagagaagagaataaaaataaagataatcttataactaatcgattatatactccctccatcctaaaaatattcaatctatgagagaatttgacccctcatagtacaacgaatctggacatagagatataagtttatccagatttgtgatattaggaggaaatgcgccctcttctaaggtttagtttttttttcgacggagggagcatgttggttttaattaagataaactaaaatagctggcagtgcgatcgattggtccttgggtgcttcaaccaagtgtataatcatgatcctacatataacccatacctagctagccgggcacgacgcaggcaggaccagccatagacctcgcttgatcagttgctctcgttcacagtgtcagtgtgcatcatcaggacatggcagggcatggaggcgcatctcacacaatgattggctcttctgcaacatcctccccctcccatttggcccattttctcccttgttcgcatctgcgcagtgccgcagaatgccagaatcatgaaaggccaccactggggatcattgggacgcatatctatctatccgcccggtgttgtgttgggactgtgatgaatcgagcgactgcctggctcgtgtcggcgggatgccggctgatggatttcatcggccgtgtttagaccctgtaaaaatttgactattttttttaagtatacggacacacatttaaaatattaaacgtatactaataacaaattacaaattccgactgtaaactacgagacgaatcttttgagcctaattaatccgtcattagcacatgtgggttactgtagcactatggctaatcatgacgtaattaggctcaaaagattcatctcgcgatttacagtcggactgtgcaattagttttttttatccacatttgatgctccatagatatgtcaaaacatttaatgtgatagaaaaattgaaagtttaaaaaataagttggaatctaaaaacacagccatattcaccatcgatcgatggagcggagtagggggctaggggccccgcgggggaataattctgcccatgattaagctgcctgccggcacgaagcgagattgtgcgcccggaaatgattcgcctgcatttgcatgcatgcccccctccccgggctgagcagagcagtgagctgagcgggaggaggaggagcagagcagcactagccaatggagcggggaaaaaggcagccgagatccaaggctttttgtggttttgagaccggggataatcgggagagagaacggcttgcccgggcagccagggtgggtcagccctggggcatcttgctgagcgcatgagcctttaccatggtgtgagtgtgatcggatccgaggatgaacgccggcgtcgctgggtttgccggaccgctgtcgatgccgcggctgatcgagagagctcgagattgggtcagtttgcaagagtttcagcaccaattttatttctgttgaagctgaagtctagctaaactttaaaagaaaaaaaaatagagcgggggctacgacactcatgaaatgaaataaagagggagagtttggtttaaattgatccataaggccattcctaacccaatgactaggatggtgtccatagtattaaataagctgtcacatatgatgaaaaatgatgtggcaagtgaataaataaggaaagagaaagaaaccatgtcttgcatgagacatggtttctacacaacatccaagtcatcatatgagataagtggcattaaatttatgtttggaatagtggtgtttgcattagaaaaatagtgtctagtactagtttcttaatgatgtgaagtttataaaaactatgtctagtcttgggttggaaatggcctaactctacttagagttaaaataaatttaggagctggggtgctactaatcaggcctgacacgtagcgtgaatcgtgatcgggtccgtgacgtacgcccgccgtgtttctgggccagatcatgttgggttgggtagaaagggttagcttggtttgggccggacattttagctgggctaggttgtttagctaaggaaaaagtacactgaaggtccctcaacttgtcatcgaattacaaaatcatcttgaaccgtaaaaccagatataaagcatccctcaacttataaaaccagtacaaatctctggcggttttaactccggttttgtctgatgtgacagctgactcagcatgggacccacgtgtgccccacgcgtcagcctcttcttccccctcccctctccacctctcttcctctctctcctcttttcttcacggacgccggtgggggagcagctgcacggccggcaggcggcggggtgaggagccgcgcgcgtccttctccggcgcggtgttcaacctgtccaccaccatcatcggcgcgggcatcatggcgctcccggccaccatgaaggtgctcagtctcgtgccgggcctcatcctggtgatgctcgccgcagtgctcacggacgcctccatcgagctcctcgtctggttcagccgcgctgtgggcgccacctcgtacggcgaggccatgggcgacgccttcggtgctttcggcagggggatcctctagctctgcgtcatcgtcaacaacgtcggcgtgatggtcagcttcactgaacatttcgttgtgactctaatggcttgtgttctttttccctgggatgagttcagatccactgaaatacacgccggccgtgtcggttgctctggccgtcgtgttcgtggtgatcactgtcggaatcgccaccatcaagctgatgaaagggcagattccgatgcctaagctgttccctgatgttcatgactggagctccacctggagacttcccactgcagctccagttcttgtgagttgtgactgcctacattttccattacaacggtacattttaattaccagctaagtttgcatttttctgtgggaatgtgattaacttgccactgcattcagtgcacacaattcacaacgagctcaaggaccactccctgatcaggccaatagtgcgggcgtcactgctactcggcttggtcgtgtacaccaccaccagcttcttcggcttcctcctcttcggcgaggcgacgctggacgacatgctcgtcttccccatcgtgttccgcgcgctgcgattcaacatggacggcctcctcttcccctcagcgaggcccttctcctgcgacaaccggaggttcggcgcgatcacggcggagctcctcacggtcatcttcctcgccgccaacttcgtccccaacatctgggacgcgttccagttcactgggagtagctgcacgggcgacgacgtcgactgcggaggcggtggcgacagctgcctcacggccgtaatccttgtggcggcagccgtgtctccgatgaggccgcgctcctccagcgcgagctcgacgccggtggcggggaagaaggagaaaacggcgacgcggtggtgctcgcaatccaccgcgccccgatgtgaaaaggctgcggcgggtcacggaatgccgccgccagcgccgccagcccgccaccaccaacgcccaactctgtctgggccatcgctggcgacgtgacccccctagccccaccaccagtggctcttgcccctgcttcggccggccggcatgaccggcgaattagaagagaattggagagagagagagagagagaggacgggagagagatgacgtgtcatcatgtcatgtggggcccacgtgggtcccacgctgactcagccgtcacgtaggataaaaccggtctcaaaaccaccgaaagctctattataactagttttgattagttaagagacgtcatatatctgattttgcagttgagagatgattttgtaactcgatgacaagttgagggaccttctgtgtactttttcctttagctaacacacacgcacggaagatggaacggtgggaaaacacaagtaccagtactccctccgtctcaaaaaaaaataaacgctgggtttccatatctaatgtttgactgtccatattatttgaaaaattatgaaaaaaaattaaaaagataagtcacgtataaagtattaatcatgttttatcatctaacaataataaaaatactaattataaaaaaatttcataaaacacggatagtcaaacattaaacacgaaaatctaggatttgttttttttttggacggaagaagtattgggccagtcgctttccatccgcttttcacaaccggcaaagacggtgagatgcgaccgcaaactgactacaggacgacaaagttgtgtgttcagttgttcaccacgggtgtcttcacagccgtactgctaagtcaatcccgaaagcttcggttgtgattcagaaatatgacgtgtttaaatccaaccagaatagttcgtatcaaaatttgaatttgcggcggcggtggccagcgagtgcgtggtcagtgagcacgcggctggcgaagcggagcggagcgccggcagaggccggcggagtggagcagagcggtggcgacggcgataggctagagcatggccaacggagcagagcggagcgtcggtggcggcgggctgcgtgtcgataagattggaaaggaaagcaaaggagaagaaagaaaagaaaagagaaaaataaaaaaagaaataagatatgtgggctctatattttttttatctcacttatatgtagaccttatattttttttctgactagaatgaaatcagcgaaaccatctatatatactatcatgggacccttgattgcatggttttgaacatttgaagggtgaagaattttggaattagggattagggctgtcatacagactcgacgaatagttaaggaatggtaggtgaacttattccaagaaggaacgagtgggaaaactgtaagtgttggggcagtcgctttccatccgcttttaactggagtacgtgcaaagacggtgaaatgcgacagcaaactgtctacaggacgacaaaattatgtgctcggttgttcgccacgggtgtcttcacagccgtactgctaagcttgctgacgccccgaaagcttcggttgtgattccgaaataggacgtgtttaaatccaaccagaatagttcgtaccaaaatttgaatttgcgtcttagtaatttgaaagttttcaattagctgttgtgaagaagcggaattaactgacggagtgaaatcatcaggagaagcaaatggctgcattcccccgctacatattgcgacctgtgtgcaatgattgtactattaattcgctttggctcagccacgctgtcagctcgcaatcagataatgtaaccaattgctaaataacaaattccagagaaagaatgtgaatggcgtacgctaccatggcggaatcaaccaacgtcgcctcaacaacattaaataaaaacaatcagaatatacaaaacaaaaattgatcgatcatgggaagtggtacaggttggacggctggagcccggcggtgacgttgaagtacctgaacgccgccgcccaccggcggttgtccttgagcatgtgcacgaggacggtgtccggccggaagttgtccatgtcccagttgaggtcgtacatccgcggcctgaggctgtaccggttcttgccccggcggccgatgttgagccatttcccgacgaggaggtcctcggggccgtgcgtgtcgttgtaccgcaggatgtcctcgttggtcgacacccacgtcgcgacgtcccaggacacgacgtagcccatcccgtgcatgaactgcatcgggtcgtcgccgacggcgaagccgtagccgaggtagacgtcgtcgcggggcttgtgccggagctcgtcgaccagcgcggccacgcggaggtacgtgtcgtcgtcggtcttcatcacgtagtcgtagggcgacgacgcgaacatccgcggcacggaggagaggtactcgtgcgtcttgccgtcgttcatgttctccgtgcagttgagcaccaggatgtcgccgtgccgcgcggcctccagcaccaccagctgcgcgtccaccgggtcggccacgcggcagaacacgaagcggacgtccacctgcgcgacgccggggggcaccgccggctgcagcgcgtacgccaggcgcacgatgttgcgacgctcgtaccgcttcggcgtcgtcagcacccccaccagcagacggagctccggccgcacgacggccttcgtctcagcagcagcagcagcagcggaagctgcatctccacccggcgtgacgaggtagccgtcggcggtggatgggccggcgtggcagaggacgccgaggccgtcggagcggacgtgggaggagccgaggctggggacgacgagcaccacggcgaggaggccgagcggcaccagcaggagatacggggtgcagagcgaggcggtggccgggaacccgtgcgacgacgacgacgacgacgatgcggtcttcatcgtaaaaatctcgcggggaaatgcaagtgcccctcgcacgatcgcggcccgcgcgttactcgagctatagccgtactcgacttataaccaggcacgaacgcgcgctggtttagcgatgtgggactaaaatttcagcattttccccctctctctctatctcgtgtcaaaagcgtcggtggaaacgaacggttcttcgcggaagaagtcgtcgtggcaatggcaatgtggcatcacccacgggagtacgcgacacgggctcgatcgatcgatcgtcgtcgaggctgccgtcatcaacggcgacaaggaaccttactcgataagtttactggataattttgggttgtctcgtgccacatgacaggggatgtttcaacggccaacgccatatggtaggtggcagacggccggggatataccccagccctccagagctctagttttatcgccaatgtatggaaggacagctcaggggtacatcgaaaattcgaaagggatttgattaaaataacaagtacacagtgagcaatcattcaatcattcatgctgagattcgaggcatccagcttccagcatgcattgttggcgacttggcgtgatcgttttgagttcgggggcggctggaacagaagaaggtcgctgggaacaggcaagcttgtcggctactactacttgcgcgatagatatgcccggtgtgtgttcaattgttcatgacatgcctgatgccttggctggaggacgatcgaaaccgagatctcaccaacttatacaaatgatggtagattaataggcagggaaattgacaattcttgcggatgcttttgcctgtatgatcgccttaatttgagatcgtgatttttcagtgaaaaaatcgatttcgtgcaacttcgaaacgttgagggttaattggctaatgcagctggtcttctgttgagtaattcaacataagaattctactagcagatcgatatagtgttgacctgttctctctattttgtaaatataaagtttagaccttttctgggtatatggcatgtgttatggcaaagtcggtcagactgatcatacagtgaaaccaacttggtctggtctttctttctcagaatacaacctgaatgtacgcgtacccatgcatgtctacttcaattgattaattaagttttgtactttctagtaatatacggcattgtttacttttggatatgatatttgaccattgattttattaaaaaaaacctaagtaatatttatttagttgtgatttgttttattattaaaggttccttaagcatgactatatatattgttttatgtatttatactatacgaataatcaaacatcatgtctaagagtcggctatgttatatattaaaatcagagagaaatagagaatatatactagctagtaaaatgttggatagcaacataattgcgacggaggtagtatatctattatattattaaaggaattgaaaaaggagcctccacattcgctctcatggtctagaaattctcacattaatcggacaaaaagaaaaaacagagttcatatagaaatacaatttagaaatagctgaaattcggaattaaaaaataaggaatattagaagagttgactagagtccatatagaaatacaatttagaaatagttgaaattcggaattaaaaataaggaatattagaacaggagactagagtccatatagaaatacaaattaggaaataactgaaattcggaattaaaaataagaaatattagaagtagagtatagagtccatatagaaatacaaattaggaaataactgaaattcggaattaaaaataagaaatattagaagtagagtatagagtccatatagaaatacaattaggaaataactgacattcaaaattaaaaataaagaatattagaagtagagtatagagtccatatagagatacaattaagaaaaaaacagaaattcggaattaaaaaaaggaatattagaagtagagtataaagtccatataggaatttaaaactaactaaaattcggaaaaaaaaagagtctccatgttcactctcatgacctagaaattctcatattaatcggagaaaaagaaaaagcaaagtccatatagaaatacaatttagaaatagctgaaattcggaattaagaaataaggaatattagaagaggagactagagtccatatagaaatacaattaggaaataactgaaattcgaaattaaaaataaggaatattagaagaagagtatatagtccatatagaaatacaattaggaaataacaaaaattcggaattaaaaataagaaatattagaagtagagtatagagtccatatagaaatacaattaagaaaaaaaatagaaatttggaaataaaaaaaaagaaatattagaagtagagtatagagtccatattggaatttaaaactaactaaaattcggaacaaaaaggagcctccatacaattaagaaaaaaaatagaaatttggaaataaaaaaataagaaatattagaagtagagtatagagtccatattggaatttaaaactaactaaaattcggaacaaaaaggagcctccatacaattaagaaaaaaaatagaaatttggaaataaaaaaataagaaatattagaagtagagtatagagtccatattggaatttaaaactaacttaaattccggacaaaaaaggagcctcacgttcgctctcatgggctaggaattcttcacatttatattagaaaangaaaaagccgagtccctattgaaatct

SEQ ID NO: 17284 - DNA, 11834 bp, Oryza sativa
  unsure (1)..(11834): unsure at all n locations
gtaaaaaaaaactgttgctgacantcnnnnnnnnnnnnnnnnnnnnnnnncacattagtagtttcgtaaagttattgcaaaatttaaaattatgttgtcattgtaatatattttaataataaaatgagaaaacatatatgctattatacgtgagaaaatataatgatgctaaccgcgtaatctgcgcgggccaccatgctagtttttttttttgaatgccaaaagaggtagtatatgacatggtacatacggagtaccttctattagtatcttctcaagcaccgtgatagaacaaatgtccatctatctcgaggcaacaaattgctcaccttaggagccaaactaccgaatgtataataagatcgtaggttgtgatatacaggtttaatgcttgagaatgcaacggacattgctccagtcaaggttaagtacatcttgcactattgttatgcacttttcttttgagtgagaccaccaaaaacaacataggaaatccccaaaattgatatggcaaagctatctgaaatatacagccttgacaaattacgttttgcaagaggagtacaagcaaattacagagctaataacaagcagagcaagcacattccactttggaggctacaagtctactacagcttcaccctgcggaccacttgcatcaaccctaatcgtatgaagaagatggatacaaactttgagttatcatatccatcagccggcgacccccccatcttgaatgctttcatttcctccacacgcggacacaccgtgctgtttctcatcaatccgccaattacaaccacacctatcgttgtcacgaggcgatcaatgacgaatcgatcgaacaggatcaacccgatgatcaccaagaaatcgagcagccgaaatcgaatttgagcgagtcaaaccgaggcacagctcgcgcatccgtgttcgtgcaccgcacaaccaatgcacgaatcgaattaaacccgttaaagaatgtgtcgaacgattagttaattagaattaatcaaacggggaagaaattaacaaacaacaattatggatcatcgaagaggtgatcgatcgatcgatcgatcatggtgagaggtggtgcaggttgatcccggcggtgacgttgaagtagctgaacgccgccgcccaccggcggttgtccttgagcatgtgcacggcgacggtgtccggccggaagttgtccatgtcccagctgaggtcgtacatccgcggcttgaggtcgtagcgattccggccgcgtccggcgaggttgagccacttcccgaccatgaggtcctcgggcccctccgtgtcgttgcgcgcgaggatctcctccgccgtggacacccacgtcgcgacgtcccacgacacgacgtaccccatgccgtgcatgaacggcatcggctggccgcccatggcgtagccgtagccgaggtagacgtcgtcgcggggcttgccgcggagctcgtcggcgagcgccgccacgcggaggtacgtgtcgtcgtcggtcttcatgacgtagtcgtagggggacgacgcgaacaggcgcggcacggaggagaggtacgcgtgcgtcttgccgtggttcatgttctcctcgcagccgccgagcaccacgacgtcgccgtggcgcgcggcctccagcgccaccagctgcgcgtccaccgggtcggccacgcggcagaacacgaagcggacgtccacccgcgcccgcgccgccgccggctgcagcgcgtacgccagccgcacgatgtcgcggcgctcgtaccgcttcggcatcgtcaggacgccgacgagcaggctcagctcgggcttctcctcctccttcggcgccgccggcgccgcgacggtgtagtcctcggcgccagcgctgcggcgggcgcagaggacgccgaggccgccatcggagccgacgcgggcgccgttgagagaagggagcaggaagacgacggcggcgaggaggagcagcgcgagcggggcgaggaggaggtaggagttggacgacgccggcgccttcatcgccatggccgcatgcaaatgcaacgggagacaacgtggttggtaggtgcaatgcagaacgagctgtagtagctgttatacgcgcactaatcaagctcacgtaatcaagaattccattaagaaattccactgcctaacttggtttttttgtaaacaaatcgtcgaacagaacagctgacaagacaagagttctttctagcttgacgcgatgcgctggccagttagaactcgccacgtgcagtaataacaacacccatcgcttaccttttaacttatctacaaataaaacttaatattgaatttaattttagagttttcaattatgatttattttttacattgatcttttaatcgccaaggacgatatatatatgagtgtgtgtaatagttttatagctttcgaacgattaaacagaaaacatcttctctttttcttttgacagagacggttgctctgtctcgttattgacacaaaggttaagttaatcacgaaacgagtccatatcccatagaggttcagaaatggcacgttgagctgtcgccgttcaataatagcagccgagtcaaaggagagcgtgaagtgccgttcacgacgacggcttccccgctgcgaaatgcctagccttaccggtgaatgatcggatcaaactctgaacaggaataataataataacaataatgcagagaagtttctgaatatgaggcagaaaagaaagccatatggtccctagtagtagggtcgaagcctgtagtatacagataccagtattaatcaaattttagtccctgagttgccgtgccgtgctgtgctatgctcgcacatgctgatggcattgttgtttgtgttcatggctctgaaagtaacgggctaccaagaactgattccaatcaaatcgcacatcgctgtttcatgtgacgaatcctggtcatgggctggtgtcatctccagtcgtgtttcgtccagaatttgtaccgcgttttcttcctgttgctcgtcatctttgtgcttctcggctaagtaattactagcctgtacgagcagaattgttccacggcgaggagcccccgttttcaagccgtgctccccgcgtttctggagacaaagaaaacttgtcgatacccaacagtcctacctgattagctcgaaatcaatcgacaaaaaccggtgaaatccgaacaaattttgcagatatatacactgaacctttcccgtatttagccggcttactgcacggtttctcaattcgaaccgacttgataagattgataaccgcgaccgattacttaccgtcataggagtatctttgagaccctggtcaggtcaaaggtcatcggaaacgactcggaaaattaaacctccaaattcacaagtctccatcccactggtccctggacatggaagaggaggggaccggccgtgtgtacttgtacacggaaggaaccaagcaacagcactgtcgccggatggagtttggtcccggaggaaactgatcgatgaagctccaagactccaagcgccggcgacatcacacagctcgatcgatcggcagcagcagcagctacagaatatagatgcgtcgcgtagcaagctgagctatgccgatgggccctgtggcactaacggttgccaagagaggggattctaatcactcgagatgataatgtagtgatcgataggtcgcaataggcgccaaagccacccgtatagcctagtgatctttaaaaaaaaaaaatctgaattacccttcttactatcgtggtgaatagcagatattcaggtcccgtttgatagagctctaaactccaactcccaattctaactccaactccagtaagagctggctcctatacgagctgagacgggtatagaaagtatttggctagattactcagatccacgccaccacatccctcgtcgccattttgtcgaacaccttgtagacgtcaccctactgttgctgccgccaggcagcccgcgagccgccgctgctggtcagcccccgcatctcctccgccgccccgggccaccacctatcgccaccgccgccaacgcctgccgccgccaacgcaaacgccgctatcacagccacagcaagacgccggaggaggatggggaggaagatggagaggagagacaacgggaggagaagggtaggaaagggtagtttagtggtatttttacgtaaatacactaaaaaggtagtggttcttttgaggtggagtggagttgtggagcagcaaaaacccaactccatcccgtagtataattttgtggagcagctctgctacctctgctctaaaaaaataaagaatatgtatctatcgatgggggatacccgtagaccggataaatagggtattggggtacgttggtatgaggatctacatgatacgacatcaaaacaaacaaggagacaaagattatactggttcaagcccctcgttacgtaatagccctaatctagtttgtatgagattgatatgaaaaatcacagagtacaaagagaacaaaagaatccggcgttactggcgagatccttctctagatgattcgatgagatctcccggcaagtgggcttcgcgtcctcccgctccgtaaactatggtgggggtgttggtgttgtgatacaatgatctgaaccctcaggcggccttttataccgtgagttgccttagtctccaagtagaactcagagacaacaaaccctgcacgatatagaataaacctaatcctctctgaataggactctgataatcacttgcccataaggatattttccataatatcttgtaaattcccttatcgcatacggaaacatatcgtatacatgaaggtataccgtatccgtatattccataaggcgtgggatatgaggtatgccttatccgtaaccatgacagtaccgtttggcacagttctccagataagctggagttgggaggtagagctgtgccaaacggggccaataccatcaacttttcatactagacaattaaccccctaactcctgttttagatggttttgaactggggaggttaacgtggcattccaaggtgtcaaaaaaataaaaaaaaaagtaagtcaacaatggctgttagcaatatttaataaaactagcatagtgacccgcgcagattacgcagctagcatcattatattttctctcatataatagcatatatgttttccccttatattattcaaatatattaaaatgacaacataattttaaattttgcaataactttacaaaactactaattactaatttgtaatattcatattgtattttatatacgtgttagttattaattatttttaatatcaaatttcagttatttgtaaattatatatattcctatatatactctagactcgtcttttaatatttctttttttagtttcaaattttttttgtaaattgtatttctatatagactctatgctcttcttccaatattatttatttttatttctgaatttttattatttctaattgtatttctacgtggattctaaactcatcttttaatattatttaatttttaatttcgaatttcagttacttctaaactatattcctatattgactttaaactcttcatcccatatttttcttaatttcaaattttagttatttgtaaattatatttttatacggactctaaactctacttttaattttattatgtttattctaaattttagttagttttaaattcctatatgtactctatactctacttctaatattccttattttttaattccgaatttctatttttttcttaattgtatttctatatggactctatactctacttctaatattccttatttttaattctgaatttcagttatttcctaattgtatttctatatggactctgtactctacttctaatatttcttatttttaattccgaatttcagttatttcctaattatatttctatatgggctctagtcttctcttctaatattccttattttttaattccgaatttcagctatttctaaattgtatttctatatggactctgttttttctttttctccgattaatgtgagaatttctaggctatgagagtgaatgtggaggctcctttttctattcctttaataatataactagctaggtggcctgcgcaattacacggctagcacccaaacaaaatcatatatttttttagtatgatttttacttaaaatttattaaatagttatctcattgtcttaagactttgaaagacgaaaccttatcatccttatgtttctaattatatagtttttaaaagtcacaccaattgctaccccttatgtcatctccttctttatttgcttgctcgatctaccattatttctattcattctttttggaacctttaaaaattggattttatagtttttagagtttattgtcacattggatttcatttttataatatcaaaatgtcccgtcaaacgttgccattatactcctctacggcccgtccattgtctcttctctttattgtcattgagattttaaaaatcgaacataattattgtttgggttcatttttactttctaaaagtcccgccaaaccgtcaacggctttgccattgtactcctctacggctaacccgctaccttacttctttattgtcattgaaattttaaaatcgaacatgattatcattggttcttttttactttttggaagtttcaaacctttaaaaattggacttgtagttttattttttataacttttagaagtcccatcaaacgatgccactatgcccctctacagcccgtccgccgccaactctttattgttattatgattctaaaaatcgaacataactatcatttgaattcattttttattttctagaagtcccgtcaaccgtcagcggctctgcaactatactcttatataccccgcccactgcttctcctttttattgtcattgagattttaaaaattgaatatgattatcaatggggttatttttttttactttctagaagtcccagcaaccgtcttactcgtttgcttcacggcatgcctgacgtccctccttttaattgtcattaggattctatttggtgttttattaacaatttttatatctcgtatcaaccgccaccactctactcctttataggcatgtttcttaatttatctcgtcatgtgttttagatggtcttttctttcaataatctttatttttatcacaaattttagttatttataaattgtattcctaattgaaatcttacttttctttttcaaatttcagaatttttttaaaaaaaattagttaatatcgtattgtgttcttttaatgtttttattttttattttcaatttcagttgttttaaaattgtatttctacttgaattttcttttaattttttctaattttagatattattttatttttattctcaattttaattaatctcgtattgggttcttatatggattcttctttcaatattgcttatttttaattctgaatttcagctaattttaaattgtttccttcatgaactcttcttttattttcttttgctaattttggatttatttatttttatttcgaattttaattaatctcgtattgggttcttatatggactcttcttttattattccttatttttaattctgaatttctgctatttttatattgtattcctacttggactctcatttgcttttctaattttggattttatattatttttgtttttaattttgattaatctcgtattagattcttatatggaaacttatttcaatatttcttatttttaattccgaatttcagctattttaaattgtacttctacttgggctctccttttctttttttcttttctttttctctgaataatgtaggaatttctagcttccacagcgaacatggtgcctccttttaaagctgttttaataatataatagatagataatgaatggtcccacatgttaccttcttctcttttcttcccccattttcttcatccccagccgggtagatacggaggaggcagcgagccagcaagcgccctccttggcccgtggaggaaggcgacgatgatagcagtggcagccagccgacggagaggtgagctcatgcagggtgggtcatgtcttccctgtcacgccccgaactagtcccgaccggaactagcccgtgacgcttcaaattaacctgttaatcgataccagtcccaggaaacagtgctggtatcacagggagacagaatatcacagcaacagaggtctctttattatagagtagatgtacagtcatgttgggctgcggacagatcccgagctcacaactgcattacaaaaggaaagcggaagccaggacttggaccaatcaacacaggcgcgacttgggaactaggccgaaaccctaaaactcatcgtagccggcttgctcctggaaaaactcctcatcagcaggatccgcttcatcttcttcagcaactgggggggaattatttatatagagcaagggtgagtacgggagtactcagcaagccatgggaaataagtgtttaatgcaggcttcaaggaaaggctgatgtttttgcaattaatttttatttgaactcttttctgaaacaactaagtgagtgcttctcaaacgacacggatgagacagtgcgtctcgtccggtcggagtatgtgcaatgtatcagtctttagaatttaaacaaggttagcacccggccaacagctttttcaacggccacccgggccaacaacttttcaaacggccacccgggcctagctgatcccatcagctgcagatttttcaaacaccgaaccccttttcacacagcaatttcacaagcagtagtcaaaccaaactacgctaggaatcacctcacatccgcccatgaccgtgggcacggctgttcgaacagtttgttaacctctgcagagggggtacactttacccgcatgacattactaacccggatcacccagcccgtggggatcagccacgtcgggagacctccaagctttcatgacaaggcatttccaaagccgacacaggtttaccatacgccgacgagaggggtcccagaccaacaacaggttagctcccagaccatactgtgccaggaagcccaggggtcctccccgacaccaccccggcgaatccacatgtctctcggcatcaaggctcccctgataagctagttactcagccaggggtgtcccattccacccatgtggttgtacttgtcttatgtttggatgaaattccaaggaatcggtccttaagtgcgagagcgggaaaccgtacacccggtacgtttcccggtccgcggttttggaaattcatttagttcgcaagcaccgacccaggtgtcgggttttccaagtcttttgtaaaactccagttttacccaagttattactcagattttaagtttgaaggcgaccgtcgatactggcacagggtgcacgaatatcgaggcgcaactggatggttacaaggggacatagtatagcaattaacaatggaaggatcaaatgcaacaagttaggtaggtctgccaatctgccttgcagacggaacaacagattaagtgcaatcctatcaatgcataatattttacaagcaatataattagatttcaaatataggctcaagatgttcaaaggtggcttgccttgctcgagatctggagcttgatcctcgaaatcctcgcaatgcgggtcttcgggctccgaaactacacgcgaaacgggacaactcaacaaacggcgaaaatgaaaccctaataatgacctctaagcgtgccattagatagatctcgagatttgaggaattttggaagttgaacggagtcaaacggatctaaggttaggaagatattgaatttctaagattattggattttttggtcaaaaagaaaaggatttaattaaatccttttttggaaaagaaaagaaaagaaaagagggagggattatagacttttcctcgggcggctaaggcgcggcccaagggaattggagcggaccggccgagttaaatgggtcggccggcccaaggcggcccaagtgcgcgcgcgcgggagggaagagagagagagcgccggtggaccgggctcaccatgcgcgatcccgggtgggacccgcttgtcagcggcttggctcaccgtgcggagggagtacgcggctcatgcgcgcgggcgggggagggacgcggtgcacgtgcgcggttcgcggtggatgcggatgcggcgggcccacgcgcagcctcacggctcgcggtggaacgcgcgcacggggagggactgaccggggtcggctcgacccggtctaggctgagctggcgccgacgtggcgcctacgtggctgccacgcgggccggcgggaggtagacgacgacccggccgcgaatggacggcgggcagcggcagcgagcggcggagcgaaccacggcgatacggacaaaagcgagcacaccgggcggttgctcgtgatgaggggagacgagccaacggctcggatttgccggaggaagcttgacggcggcgaatcgcggcggcgacaaccggcggggagggaagagggaaacggcggcgaggccacgaggggtcgattcccggcggtgagagcatctacgcggtttcgggaactcgatgctagcgtcggattggacggagctacgccgagcaaggctggtgacgtgtgagtgctacggagctcgagcggcgacggcggcgagcacgcggcgagcgacgacaacggtcggggtggcgccggctaactacggggagtctactcgagctactaccgaaagctagggggaggagatggagcgaggaggaagaacagagggaggcatcaccgagatgaggaggggcgctgtgacgagaggccgacggcgcgggagtaatctctccggcctcgggccggggaagaggaaggagagggcgcggccgaagtccccttccgcgtccttactcgtgccgactccttcgacacgcgcaacaacgaacggcgacggcgaacagagcacgggggcggcagctatggcgaggaggcgaaaacgagggagattggaggggaaggagctggggtttaaagggggcggcaatgtcggtttgggaaccgacttagggcggtcaaggcgcgagctggcactcggcggtcgcggccagagcggcgacagggaggatgacgccggcggggggaaaaggggaaaaaggagggggagaaaggggcttgcccttttgccgattcgggaaaaaggaggaggggagcgggggcgacgcggcagagggaggaggggcgctgcctccatcccttggcggcttgcgcgcggagtggcggggccgggcggtgacgacagcgatgacggcgggcggtttggagcggcgcgacgacacgggcgacagacgcgtgaagaggctaacggcggcggcgaccgggcggtcggccactcggcacgcgcgtgcggcttgcaacgggcggcgtccgcgcgggcgtgcgcacgcgaacacggcgcgcgggaagtggcagtgagggagcggagagggaggacttcgctcggcgcgggcggctcacgcgcacgcacgcgggcggagcggaggaggaggagcactcggcgcggctcttcgcgcacgcgcgcgcggcgcgcgggcgaggtggagcggagctgagcgggggggggagcggagcgcgccggggaggggagagggccgggggagagggggagattttttttttttttctttttttattaaataatattcattcttaaaatttggtactctcagtctcctcgc

SEQ ID NO: 17285 - DNA, 24761 bp, Oryza sativa
  unsure (1)..(24761): unsure at all n locations
gggaaaggagggacttaggtgagacctgggcttttcacatataggcgacaagagtgatctaccaaagaaaagcggaagcgtccacacccagccagtaagaaaaccgggtggcgagttaagtgtggtcagacaatctaaagacttaccatgggagttagagcggccattggggaatcaaacggtggtttttcctcagcgactcgggggaaaagagtcagccaagtgggttaccgccagttgggtcaaataaagccggcacgtcctaatcacgcatcgccgataaatcgagaattttctcttaaaatggttagctttcttatccgacgcaccaatccatggaagagatcccgtgtatagggggagatgggccgggaggaaatcggcccatcgacccccgggggaggcaaaatagacttttgtggaggaatttgatttggaaggattggattcgggattggactcgacgatagatcggggattgagatcttgagatggcacgaacactagacaacaagcaaagaaacaaatttcgcaattagggtttttaagagataattttcccgctaggcgccacgacggaacgggcgctacattccctcctcttccatggaggccgatagctaccgagctagaggactccaacaacacaggtgtttgctagctgcggttgcctccagtcttctcccttcttccttcttccctcctcccctcttcacccctgccctcaatctccaatcaagccagcaaccaagccgattgccaaatccacatcccgttgttcgttgaggttccctcctattccttctcctccggccgacaagagaggagatggaaggagaagcgtgggcatcactggattcaccacctcgaccctcgcgtcgtccacttcctccctcacctctctttcttccatcccccatctgtctgggctccatcgagctcacagctaccaaactgcctactgcttccagccctcctcaccgccgtccgccgcgccacaactggccccttcctcgcgcagcccaccatctccagcgccttcctcgccaccgttcaccatgccctccttgccgccgcatactcccgccttcctcaccattactaggctcccactgcgttgcaaccccttcctcacctcgacccgccacctccaacgtcctccttgctagcgtgcgcagcaccctttctgctgttcccgccatccccgcagcgcctacatcgccgatagagagataaccgaaacaaatgaaaaacaaactcgtaactgaaaaacgatgtgtggtcatgtgaagtggtcttttaaccgaaacaaatgttagcttggtgattataagcataattaggaacaaaagaagggatggaaagctattgcaacagttcgcgaaattctcacgcacccgaacacccgcgagggcactacgcgtcgagtgcccgatctggggtgcaaaaaatcgggcgcccacgtcagctgaccgtcagcatgcatgcatgcaaaactattttaaactattttttctcttaagttatttatccaaatcatgatccgattgcaccattaaattcattgcaattaaatttttaaaataagaccacacatagatatattacgatgacaaaaatttagcttattattgaattgtttttaaatgttgcacactgttacaccaaatatatcggaattgtttcactaagtagatcgaaaatgtttcaatcgtttaaattggatgttgtttcaccttatataaaaacaaagtttcagcaaatagcgaaagaatgtttcaattcactgcaacatttaatctatacatagtgaaacatcacgagtacactaggtgatacatttttggtggaacaaaaaataaaacggattcacttaatagagggttttcataatatgtgtgtgatttgttgtaaaagaatgtttcaattcactgcaacatttgattcatacacattgaaacattgtgagtgcattaggtgaaacatttttggtggaacaaaaaataaaacgaattcccttaatagaggttatgtgggtggattgttgcaatagagtatgtggtggagatacatggcaggtgggggcaggggcacgtggtggggcctaggaggcagcacgcgtcacgtggggagggagcgtctgatttttctccttcccctgagcgaccgacgcgaaggattttggacaagactttacccggaattatactctgttttaaaacagagtaagaaatgagggagacaaaatagacatatttccaactgattgctgatgactcgttgttcggttgggccattctgatcccagaaggatggcaaggcccagaaatacataaaccgtcggcgttgaggcacttgtcccaccgggcctggtttaatttcgatgtaactacacattcgtagtcggtgagactaaggctctgttcgttatgaggagataggggagattgattctcgttttccgcgtgcacgcttttcaaactactaaacggtgcgttttttgcaaaaaaatttctataggaaagttgctttaaaaatcatattaatccatttttgaaatttaaaatagttaatactcaattaatcatgagttaatggctcacctcgttttgcgtatctccccaatctcctcaatccccttctcctcaaacacaccttaatagaagtgagtgatagcggagtacattgttgtgtccagccaatatatatagtgtacatccatttctagcgattatgccgtttgtcactggattctagttgtgtggccttgccgctgtggatggctttatgccgacggtgacgttgaagtgccggaacacggcggcccaccggcggttgttcttgagcctgtgcacggcgatggtgttgggccggaactcgtccatgtcccagttgatgtcgtacatccgcggcttgaggttgtaccggttccgtcccctgccgccggcgttgagccacctgccgacgaggcggtcctcgtgcccgcgcgtgccgctgcgacgcacgatgtcctcgttggcggacacccagcgcgcgacgtcccaggacacgacgtagcccatgccgtgcatgaacggcatcgggtcgtcgccgacggcgtagccccggccgaggtagacgtcctccgcggcttgccgcggagctcgtcggcgagcgccgccacgcggaggtacgtgtcgtcgtcggccttcatgacgtagtcgtaggggcacggcgcgaacaggcgcggcacggaggagaggtacgcgtgcgtcttgccgtcgttcatgttctcggtactgcagccgtcgagcaccaggatgtcgccgtgccgcgccgcctccgccgccaccagcaccgcgtccgcggcgtccgtcacgtcgcacagcacgaaccgcacgtccacctgcgcccccggcgcgggctgcagcgcgtacgccaggcgcaggatgccgcgccgctcgtaccggctcggcgtggtcagcacccccacgaggagtcggaactccggctccctcgcggccgtcgtctcagcacctagaccgccgtcgttgttagtgttgtcgacgacgggacgggagcgcggagcactgaggcagccggagacggagaggacaacaaggctcgacagcgccatggctacgagtccgaggggtaggaggaggcggaggcacagcgagcaaaacgaggtggccggaaagcgcgacgacgtggcctgcttcatggctcccgaatcccaaccggcgaaacgagacgacgagacgaacgaaatggcctggttacggggtgttgcattgcgcagttatccagcttatgaagcagcggaagatgacgggtggacgtcacactcattcattacatgtcaattataacgaaaaaaaataacaagatagatcaacatctaatatatcaattcacaaacatgtgtttttacaagttgtaacaaagataacaaatttaattgcaaatatacctatactaattttgagttttatttattattcttgttacaattcgtaaaggttgaattttaacttgcatctatattgcatattgatgtatcttatcatatttttttatttttttcgtaattatttaaatggcatacaataaacgggagaacatccacccatgtgattaaaagagtttcctggcatgatgatggaggtggattttaaactctcgagagaatacctcctcattaatcgtatgttattcaaataattatgatgtttttttaaaaaaataaaagtttgtattaacacgtgatatatcagttaattaaaattcaacttttaccagcaagaaaaaacattaaactacagctagttaacgtatattcataacgtatattcatagttgaatttgttttttgcattgcaatatgtactagttaaattttaccttgcatgtttatgaagtaatttatcatatattaatttatctttttttattttaaaaataaatcataactatttgagtggcatgcaagttcttaaatgtttataatagttccgtgataatgtccatacaatttgatgataggagaaggctaagtcggacagagctcctctaacgtaaaatcagagagacgtgggtcgctgataggtgggtctcacctttatgggcccacacgtaagtgaccacgtccctctgactttctgactttatgataggagatgcttctagcttccggctcagtcacagtcacacagtaccacgaacgaaagtggtttgactatatactaattgcaaaagcaacaaacaacgatttgttatgatgtatacgtaccacatagtagtactacatctgaaaaaatctgcccaaaaagttatgaagatggagattaagtaaggacatctaaaacaagaaaatcatttgaaaatgataaattaaatttaaattactacaaacctgaaaaaatagatttatttaaatattttagagcaacaactatacataaagtttttttttacgaaatcacggtttaaccgtttgaaaaatatgctaataaaaattgagataaattttgtattttaatatgaaacggattatgaagcttaggacgagatatgcggcccgtgcaactgcaagcgaaaaggaaaaatcgtgaaaaaaataaaaattccaaaagtcgaaaaatacacccactaccggttcgccgtcgtccttaagccttcgcagccactgtcgacgtcgtcctcctcctgtcacggtgaggaggcaccgggagggccacagccgacggatcagggtgggggagggcaccggcctgcggatccaggcgggggagggccgccgccagcggatcggagcaggggagggcaaccaccggcggatccaggcgggagagggccgccgccgtcgcccatgccccccagtgccgccgccgtagtctgtgtcgtggggtggtgcctgctcccagcgcctgctcgtcggccgcaccgcccgttgcccagtgcctcccgctcggtgagagaaagagagagagaggagccgaagagaaagagagggagaggagaaaatgagagaaagatagaggtgaaggaagagagagggggaaatattagagaggagaaagaggagaggataagaggtgaaaattttgaagtggtgaggagggaaaaactgtaataaagagaagataattttgcatgcgaatctttaagagatccgcatgcagatctttaagaggcccgcatgtgaatagacttatttttacatgcgaccccttaagagacccgtctgtaaaaatagaattttacatgcgggtctcttagggagtcgtacgttaaaatggaggtcgatttttgcagacgccgttagttacggttcatctgcaatctaaaggggtcctcgtacagaaagattgttttcctaccagtgttatttaggagtttgagaataaatgcgtgtgcgcggaaaacaagaaaggtgagttgggaaaaaagagggaagaacacagcctacaacaataaatttcccatttgaaagaagaggtagcagagagatagaaacatgaacggagagatagtaatcacaaaataactcaaatcaagaaaaaaaatactcctatatgacaacatatttttttaagtagaactgttacgattcgacgtgagcgcgctgagcaagagaagggtgttgcagtggagtggaatgtccggttggccaagcttgtaacacaattaaacaagcctggcctctgcatgtgcatgtgctcgcttttaatttgcttgatatcgactcgctcgtactagttttacactattcatcctatttcgtcttatttaaaatttttttataattactatttttattattattagatgataaaaacatgaataatattttatgtatgactaatttttttaaaatttttcataaattttttaaataaaatgaaaagttaaacattggacacggattttcacggctacatttattttgggatagaggtagtatacgcttgggatcgatgaacaatcgaacatgttacgtacactggtcacctcaccgcccgttcctacggatcgagaaatgtttaatttgcagctttacgtatacaacaatcaaaagaatacaaatctcacgaaccgaagttgactcggctcaacaaaaaaaattcaattgcggtaaaaactcacgagatcgatatatcgatcaacctaaatcaccgggtagaacggcttgagcgcggcggtgaagttgaagtactggagcgtcctcgcccaccggcggttgtccttgagctggtgcacggcgatggtgtccggtatgaactcgtgcgagcacgggtgcctcccggggaagttgtacatggccggcttcacgtccacccggttcctgcccctgccgccgcgtcggagccacgagtagagcgtccggtcctccggcccgcccgtcctcccctcgatctccgccgccgccgccacgatccactccacgaggtcccacgacagcaggtaccccatgccggacatgtactcgttcgagccgcggacgtagtcgcacggcaccatgcacccgtagtagaggtcgcgccgcggcgctcgcgacagcgactcggcgagctccggcagccggaagaaggtgtcgtcgtcggccttcatgacgaagtcgtaggcggcttcgccgccgccgaagaggcgcggcacgctggagaagtaggcgtgggtcttgccgttgtccatgttctccgggcagtcgagctccaccacgtcgccgtacgccatcgcctccagggacaccaggacgcggtcctccggcgagccgacgcggcagaagacgaaccggacgtccacgcgcgccctcgacgccaccgccggctgctggagggcgtacaccatccggagcaggtgccgccgctcgtaccgcgccgggagggtcagcacgccgatcagcagccggaactccggggccgcctgcacgccaccgccgccgccgccgccttgatgatcgccgcatgcggcggcgccggccagcgaggcctgcagggcgaactcgttggggtagacgaccaagagaagggcggcgaggagtgcgacggggagcaggaggagcgccgcggcggggacgggcggcagcggcagcctctgcggcttcatggcagaatgcgtgcgtacacggtgtgtggctgtggcccaaacgaagttggttttggcagaggcagaaatggtggtttttctggggatttttgcagcaggttcacgcggtgcggagggaacacacgatcgagtacaggctgctgcatatttgcagcggagtagagagcacatacgctgtgaagaagtatagtgcaagcatatactcccttagtctcataatattaaaaccttagactggatggaacgtttcatagtacaacgaatatggacagatgcatgtccagatttgttgtactatgaaacatcacatccaattctagattgtaatattatgggacgaagagagtaacaagtcttcttcgcctttgcgtggaatatagttgtggacttgtggagctgtggtggactggtggtggcagaggaaccttggtagtagtatttggtttctcagaagtccattggccgggccatgcttcgattcctggatggcaggccatatcatttgcatgaaaaagggtccaggttttaacgattcacaagtaatcaaagacggcatgacacgtagctttctagactttttaccgaggaaacctgcacatgctcatcgcctcatccgtagcacattgccatttgccagtgcgcccagcgcagcccagcccagagctccaaaaataccaaaccaaccaggcaaggctgtgccgactgccgaaatccatcacggcgcaaaactcgcaaagctcgcgccgcgcatagtccaaaccgcgaaaatttcgctctcccaccacgaaatccccaaatttccccgcgcggtctccactctacactccccgaaaccaacctcgccgatccgcgcctccctcaatccaacggcccacgctgcactcctcaccactcacgcggatcgctccccatccgacggctccccactccccactcccccacccaaatcctatataacatcgccctcacctatctccccaatacagatcaaccaaaaatcgccaccaaaaatccccaattccatcgtcgtcgatgtcggggcgcggcaagggagggaagggtctcggcaagggcggggcgaagcggcaccggaaggtgctccgcgacaacatccaggggatcacgaagccggcgatccggaggctggcgaggaggggcggggtgaagcgcatctcggggctcatctacgaggagacccgcggggtgctcaagatcttcctcgagaacgtcatccgcgacgccgtcacctacaccgagcacgcccgccgcaagaccgtcaccgccatggacgtcgtctacgccctcaagcgccagggccgcaccctctacggcttcggcggctaggagccttttgcattgtgtttgtcttgttaggaatctgcttgtttcggatgtagccctgtatcctgtaatgaagaaaatgctagcagtaaaacttgtttgaattcacctatgaatctagtgcgaaattctgcaatcacaaattcttcagattaattttgctgggacatgtattgaattacgaacaaactgctaatttgaccggtagtttgagacataaaccaaggaaaatctgaagaactttgaacttgctgtagttcagttctcccattcgagagcgaaggctgactcgaacgacgcacggtcgaacaccgcagggccgaccccggtgtcgccgaccagcagccgcatgagctcgccgacggtgtcgaagtaccagtcgcacgggccgtggctggcgtccttcaccgccacctgcatcatggcacgctgcgcggccaccagcgctggccccagcggcgggaggtcggcgcagacgaacagcttcccctccggaaaccgcgcccccgacgcgaacggtgccgccgccgcaccgacggcgaagaacgcgccgctcagcgagcgcgacaggccgtgaacgcggagccggaggtcctcgtgggacgcgccgagcagggcgcggacggcggacaccgccgccgcgtgagggacccagcggagcgcggacgcggcggccacggcgggggccgggttgtagccgcggaagcgagactggaactcgacgttggagaagaacacccagtgggacgagaaggccgacctgaacagcccggcgtcgccgaccagcagccgcatgacgtcgcggacggcgtcgtagtagcagtcgcacgcggcgtggtccgcttcctccgccgcgacacgcaccatcgtgcgctgcgcgtcccgcagcgccggcccgagcggcggcacgtcggcgcagacgagcaccgccccctcgttccccgcgccagcgaagaagacggcgctgagcgagcgcgagagctggtgcgcgcgaaggcggaggtcgtggtgggaggcgccgagcagggcgcggacggcggagaccgccgcggcgtaagggacccagcggagcccggaggacgccgggccgtggggctcgacgtcgtcgtcgtcgtcgtcgtcatcggtggtggaggtggagtacccatcatcctcctcgctggcggcggcgagttcgctcccccggtccaccccgtgagccaccacaaccatgctggtatcgaacgtaatggcgtggcgtcgtgcggttactcttgtgcgtagagggagctgtgactcctgggctgttgatcactccatggaccatgttccatcccgttgcgacttgcgacccaggggcggagctataacgtggtccgtgtggtccatggaccaccatagaattctggtccatggcccattacctctatgcgctacttaaaaatatagatggcactttgacgctttgttttttcgccaattcaaccaccgcgtcgggcatcgggcgtcggcgcgtcgcttcgtttccatcgcaattgtcgtttccaattttcgagcgcgcaagtcgacgagtcacgacgaccactgtccattgaggcactaacgagtgagttgtgacgtcgccacgtcggcggccggcgactgcgccaccgcgggcagcgaccgcaccagcgcgcagtgccacaggccagcagcaaccagcagggagaaagcaatcagcagcactccattcatcaggaggcacgcaacaccaaagcacagcaaacagcacgttagcaaacagcactatagtaggttctcaacttctcatctgcttctctctttctcctccctaacagtagggtttttttttctttaggtttaaatgttcaatctcatttcaattttaggatatccggtcgattggaattggaatggtaaattcaaattaaaccttacaatcctatataatctatggtagatttgctgaacaagttgagttagaccaccatatcttaaaaacctgggtacgccactgttgcgaccgttggtcccgagacgacgcgcgagcctcgaggcagagagagagtgcaggactctcatctgtcatttccatttcatgtgcagaagtcagcttttacaggtactttctcggtttctccttctggttgggttggcatcgtctgtctcggggtgatacggcaaacttcgccgttttttcatctcgagcatccaaacgtgaccgataactggatgagcaaatgttcgatggttgtgtttagttcacgctaaaagttaaaagtttgattgaaattaaaattgagcaaattgtttagtttcaacttttctgtcacaccaaatgtttggacacatgtatggagtattaaatgtggacgaaaaaaaaccaattgcacagttcgactgtaaattgctagacgaatcttttaagcctaattacactatgatttgacaatgtgatgctacagtaaacatttgctaatgacggattaattaggcttaataaattcgtctcgcagtttacaggcggaacctgtaatttgttttgttattagtctacgtttaatacatgaaatgtgtctccgtatacttaaaaaattttggcacacgaactaaacacagccttggacgttaccaggtttacgattcctagatgatctttcgttttgggctctgacggaatgacagttttcacgaaattcggtggaaagccaaaattccgaacaaaactccggcgattccgaacaaattttataaaccaaaatttaaatacaaatttcttaagtttaccgataagcttgcgaaaaccgataggctttggtgaaattctgagcgaaatcatcaaaatttcaatcgataactagaaaaagaggtaaacagattttttttccttttttaattctttattattttctttcctattgtaaatttcagtaaatacacggaatacatcaattttttcgaaaatttatatcccaataagttctatgaatatcatactatttataagattttatttgatttttttcttttttatcaattcaaatttaaatttggataaaactcatcgaaatctcagacggcttctactttgagccttgtcgaaacctcaaaaattcgcgggattcgaccggttttcgtcggaattgtaatccctggacgttactaatctacgcatcagttgaatggagaatctaataattaataagaagaagaaatgtgcaagtatgagcatgttagaaataacaacagaacaacactgaggtggtgatagaatctcctaaaagataaagattaacaatttcacgtaaaacgaggtggtaataacatgtgattaattgagttttaattattacaaaattaaaaaatggattaataacaactttcatatagaaagttttcgcacgaaatataccgtttagcaattcaaaaagcatgccacgagtacctaaaaatttatctaatttatttttacagaaaagaataggcctgaagtcatacaactaactgaacaaattatggaataaaaaagaaagctggctaggatcaatgtcaaggaaggccctaagcgtcggatgcccgatgctttgggaaaaaatcgggcgctgacgctagcatgacgtcagcgcccgatttacgtgtaaaaactactttaaactgatttttctcttaaattacttatctaaatcatgatccgattgcaccattaaattcgttgcaattaaatcttcaaaacaagaccatacatggatatattccgatgaaaaaaaattttagcttattattgaattttttttaaatgttgcacgatgttccactggatatatcggaattgtttcactaattagataaaaaatgtttcactcgtttaaattgggtgttgtttcaccttatataaaaataatgttttactacctccgtcccaaaatgtaactatttctagcatagcactttgtcccaaaataaagctatttttctacctaccttctcctctcaaccaatcacaaccattctttttcacctactttctctttttaaccaatcacacatcttcttcaatcattctcacctactttcttaatacccgtgccaaccttaaaaatgcttacattttgggacggagaaagtagcaaatagcgaaacaatgttttagttcactgcaacatttgatccatacatagtgaaacattataaatacactaggtgaaacatttttcgttggaacaaaaaataaaacgaattcccttaatagggggtttccaaaatctgtgagttttttttgttgcaatggagtatttcagttcactgcaacattagatttatacatagtgaaacattgtgggtacattaggtgaaacatttttggtggaataaaaaataaaccgaattcccttaatagggggtttccaaaatatgtgatttttttttcaatagagtatatggtgaagatatgtagcaagtagtagggacatatggtggggtcccagtagaagcacatggacacgttgtggaggggggaggaggggagcgcccgattttctccccctcccctgggcgaccgagcggcagcattttcgcaatgtcaacgcacgtagaattaaatcttaacctttttttacattcggacaaaaatcttaacctttttctaattgaagtaaatcttaatttaagccagtaggaattgaaaggatgtcatggttgtaattggtgctgattttctgaattcatttgatcccgaaataggtactgcaggatgatgttaggtgcttgtcagatacggtggttggaatccagccataggtcatgtatggatgctctgatgaagcaacggcaaagtttgccgtatcagcccaaaggccgacgatgcctggttagaaattcatgatgagtgtttggatgactttcataagtgtgataagatttctttttttaaaaatattggtaaatccaatattttttttataaatattggcaaatccaatatttctctttagtgactctaaatagtatagcatgattttatttagattatggcttggattttgatgaccttacctttgacaagtttgacgaagaaaacatgataaaccttggcaattatagattgtgaaccaaacaaccactcattgtttcatgctttattttgttttgccacttaggagtaggctttttatgaaaattcagtatcccatactttattttgtttcccatttaggagtaggccttttctactactccctctcccaaaacataaaagattttgattggatgggacatattctagtgctgtaaatctgaacctctgtattcatgatctgctatactctccatggaaaaaaaaatgatctgctatactcaaatataatcatgatcgagaaaaaaaaatcatgtacagttacataaacacatacgtacagccagtatacaaacgcaaatgaaaactaaggcacacagcacgcgttcaactctgatcaatatctgatcaacaagcgagttcatgcgtacacctcgcaacatttccactcgtgtatagtgacagccgaaactctttcgccatccaagatatatccaacgaaacccccctacctgtcctctcgacttcctccgatccgctacgggtagctagggtcgttcggattcaagtgaagaagtcgtacttgaccggcgtgccggtgggatcgatccatggctttgcgtgcaggaagttgtcgacggtgaacttggtcgcgtccgccttgctgatcaccttcttgtaccccggccacgcgacgcgccccgccgtgtcggcgccgggccccttgttggcgtactcggcgtagtagagcgtcttgagcgcgaactcgccgttccacggcatgtacccggccttgtcgatgatcgccgggatgtcggactccatgatgacggtgcgggagaactcgcgccacggccggccgaggtagttgcggatggggggaagcttggcgtcggtgagcgccggctcggcgttgaactcgcacttctggagcacgaaccccgtggcctcgcggccgtcggcgcggccctgcgccgtggcgatgttctgctggttgtccatggggcggcggagcgtgaggacgcagttctggaacacggcggcggcgtcgccgaagacgaagtcgatggtgcccgtgatgacgcagttgcggtagaactgcgccttggagtgcgcgtacagcgtgtcctggaacccgtccatccagcagttgaggaacaccgacttgtccgactgcaccagcagcgccaccgcctggtgcttcgccgcccccgccgtgttctggaaccccatcccgatcgccatgaacccgtccccttgcgccgctgcaaaaatcgccatcgatcacattgcgcgtcaatggcggaagctctgatattggtttataccgaaggttgctgtcttgaaggtggtgaggccgtcggcgaagttcttgctgccggtgacgatggacttcctggagccgtcgccgtacatggtgacactcgccatcttcttggtgatggtcacgtactcggcgtacacgccctccttcacgtagatcacgtaccttccactgtaggtcttgggcatggcggcgagagcttcgttgatggtcttgaacttgccgctgccgtccttggcgacgatgacgttcggcgtgaggttgttcttgaacccgccgcccttgagcaccctccggtcgccgtcgggcacccactccgggatgccgtcctcggcgagggccaggtgggggtccgctgctcctcctccgttgtcttcttccccggcgagcagccggcgttgggagcccttgagggcggagaggaacgaggaggccttctcgatgagcgccagggcgttgctggtgaactccctgccgttgttgaacgactccttgaccttgtccctgaactcgccgtcggggaagccgtcgatgcaggtctccatgttggcgatcaccgcgctcagccagacgcggagctggaagccctgtttgaggccgtccttgccgtcgatgcccttgagcgtgcagttgaggtcgtccttggcgtcgtcgaagagctccttgcagtcggcgacggcggccttcacgcgcgggtcgttgctcatgatcaggtcggcgcggtcgaacgcctggtcgaccgcgccgccgatcacgttcacggcggtgcggatgatgtccttgggcgacgacacgctggcgttcgccgccttgccgatgctcgtggcgcacgagtccgcgaagtccgtctgcgcgcacatcatcttgatgctcttcgacacggcgcgcaggtccgctttgccgccgccgccgccgccgtcttcgtcgtctccacctccgccgcctttcgatttccccttcgacgagcccttggagccgccttcgtcctcctcggatttcttcccgctgtacgtgatggcggcggcgcccatgacgatgaggataatgatgatggacaccgtgccgagggcgatcatgatgcgcctgcgctgctgccgcgccttctcggcgcggcgccgctcggtgagcgggccgaagtcgccgaacgccgacgacatggccggaatctatccctagctcttctcttcttcccccactcctctttctcctcctccttattgactgcttcttctttctctctcacactctctgcctgacatcaccattggcagagaggacggaggaggaagaaggccggaggcattggagaacgagggttcattcatgtggccgcgctgacgcttcccgggaaaaaagaagggcccggagacgattgtggaagctatgtttagaagctttggcatgcaacaatggccgccattctcggacgctcccgccattttcttggaggggtcaatgtactctcttctctgcgagaaagctccatgaaaattttggaatacaaggattcttctgcgtcaactagacattcaaccagaaagtatagaagaattcttctacgtcgactagagattcaactagaaaagaaaatagagacggcggaggcggcgctgcgtgccgccagaatcagggaagagcggtaggactcaaactacatattttacaaacgaaaaatatactgcctccgttttttttttatagatgacgttattgactttttctcacatgtttgaccattcgtcttattcaaaatttttatgcaaatgtataagatataaatcacatttaaaatactataagtgataaaacaactcataacaaaataaattataattacgtaaattttttgaataagacaaatagtcaaatatgtgagaaaaagttaacggcgtcatctattaaaaaatgaacacagtatgtgtttttagcgatctaaaagcaaatactggaaaacaaacaacgacaaaaaactttaaaattaactctaaatctaaaattaaaattttaaaactttgctcgtataagtataagcgaaaagatgagtagtctcgatccgatctgacgatcgaagtgacccaaatgggctactttcataggcccatctgggtgacttgggccgttgaggaagcccatcgcgccgtccccgacacggaccaggcggcccagttgataagccgaccgaactgagccgccgggctgcggcgtccccatcgtcggcgtccctttcttcctcatcaacggcgagcttccaattatgcaaccagggtataactataaattctatcgtttctcgggagagaggaaagagcaatgatttgtcgagctgtccctgcctcctcctgtccatcactctactgttagaacgagatgaaacctctacctcgagtggtccagcagcagctgcccctgtggaattggttctccggtccgctttcacttccaacagggagcacagcatcagtgatgcctaccgcctcatcaatctgccggggggaagattaggcggagaacgcgtcaagcatccaaatccatgtcagtatcagtgtagcaagatcgagcggcagaggcctctggttggaatgtaacgggtcgaatctactccctccatcccaaaataagtgcagttttgcacattcatgttcaacgtttgaccgtttgtcttatttaaaaattttttatgattaatatttttattgctattagatgataaaacgtgaatattactttatgtgtgactaaatattttcaaaatttttacaaatttttcaaataagacggacgatcaaacgttgggcacgaatatccacagctgcacttattttgggacggaggtagtactactgatggattcttgcacgagtgagaatctttgatcttgatgaggagcttcttgatcaatgatcatcctctggaattttcagatttgcagttgaaagatgcgcggtttttctttttttttggaggagtttcttttgcgtggcctatagattcgtgcctgcttcaagtctgcatcgtccagttgtaagtacaatgggggtgttgcatcttttcgtgtttggccaaaagagaggaaaagggtaaaggagattcgtgcctactaataacttctgcagttcagcgattctctagaggtgacaagtcacaactcaaaagtgagcggcaacttggccaattctcgcagcagaatagcagtgtaggtgtagcacagtagcacatgctggttttactgaactgaacaatgagcaagaaaaacgtagaaaaaccaaatcattttaagatttaagtggatgatcagcttaaattactgcaacatctgggatccagaagagaataggagatgataaagttcctgtcaggaagtatatcatgcacattaagatttacgatcatgaataaaaacgttgagcacaaacactggatcctaccaccgtattggtgcgtcggaaagcaaagtaaaccacttaaagagaaaattctagatttatgggtgatgtgtgattaggactgcaggattatcttgatccaactggtgataacgcactcgtctgacttttttcccgggatttgctgaggaaaaaccacggttagattccacaattgccgcactaactccattgttcatctctagttttactgaccacactaactctgtcaccgtgtctgttccatgatcggttttagcaagctcatgctttccttgaaagaacaaacaagagcagagaagagaaaagcaaggcatcaactacagctttaattctcactcccacaaaataccaatcattcatcagcttagctagctagctagcacaatcaacattgctgtcaaattcccagcagcatcagttgcatcatcatctttgttaaaaaaaaattgtatcattatcatcttttttttaaaaaataatgaaattgatttacatcccggtctctctaccataagacacataaccaacgagttttgatacctaaaaatcaaaccatataaggtgaagggaaaaaccctcaactccctctaaacaagttcaattgaaaaaacattccaaaatcaaataaattctagcatgtcattcggtatatgctaagtcagccaaagtggaataaaagaaacttggctaccaattccaataaccgaaaattgaccatttttaccatcatttggccccaatttcagatattaagaagataattatatacaatactaattacttaattagtgaccagtgatcacttgtgtgtgtggacagagtggctttaaatacccatcactcctctccccctcacacaccctccctctcaccattgcaaagccactagagatcgagaagaagaagaggaggaggcgagctccgtttggtgcgaggcgccgccgcgcgctgcgggcctctcctcctccccgcgcgctccactccaccatgcttccgagccggcagagaagcatcttccatctcggggaggagggtggcggcgccgccgacgccgagcacctcggcgctgaccacggcgacggccatggcgatcacggtatcatcagtatccaccagcagcgccttcgtgtcgtcgggctgcagatcgtcctcgcccagacgaggcaccaccaccgccagcagcacggccatgtcgtcctcaagcagatgcagatggtgtccccgccgccggcggcgcgtcaccggcggcggcggcgtccttgcggtgacttcttgagcgcgtgctccctgtgcaggctggagctcggccccgacaaggacgtgtacatgtacaggtacgtacgtacggcaacggcacgccgacgacatggccggcggcgggccggcggctagctggagctcgatcgatcgccgcctgaattttggggtggtttgcttggatgcaggggtgaacaggggttctgcagcgaggagtgcaggtggcagcagatcatgacggacgaggcgagggagcgggacgccatggccaagaaggagcggctaggcctgcatcatcggacgccgcggccgccgccggcggcgatccgcggcggctcgccgaggagactactcgccgtagcctagcacgagcgaagtacagtatgctatacttgatgagaccgtgacccatgcttggatgatatatgatcaaaagaaaattttctactgtactctctgtaaaatatggagaaatcgatgtaattaagaaaaacttgataaggaggaaggagagagagagagagagagagccaggttttgagtaatttgaggcaaatttgaggaaacgtatacgcataactgcatgcagtttcatatttcaaatgaacacgaaatgtttggtgggggaaagaagctttccaggtctcatgggtacaagtgtgcaacttaactgtaacctgctcctgcttatgtgcaaaaaacctggtaaattctggataaattagtttcctgtgcgtgtaaatttcatctcgattatttttagaggatgcgaatgattctcagtcgagtagaactcgtggaatgattctgaacacaagtaaaaaagctctgatgaatcctggggcatctgccatcttttgctttcgagatgccgaggtgccagaaatttgatgccaaagacgaagtggagggaacgaaaggatggtggccgtggcatcaagcaccttgatcgatggggagacagtgagacaccaatcgaatcaaagtggaatcttctcttgctagaaaacgaccaacaaaaattggaagcagctagaagcctataaacattggtcaaggaagagggagcagcctaagagaggcagacagcgattgctacattttagtgccacgaaaatctattaggacagttcgaaaagaagccatcacgttcgtggtgaagactaaaaacacttagatcctgtttagataggactaaaacttttaaatccctatcacatcggatgtttggacactaattataaatattaaacgtagactattaataaaacccatccataatcttggactaattcgcgagacgaatctattgagcctaattaattcatgattagcctatgtagtgctacagtaaacattctctaattatggattaattaggcttaaaaaatttgtctcgcaaattagctttcatttatgtaattaattttgtaagtagtctatatttaatactctaaattagtgtttaaatacagatactaaagttaagtctctggatccaaacaccaccttatattaatcagagaaaaaattaagtaaaaaataatttagaaataattgaaattcagaaaaaaagaaatattgaaagaacatcacataaaaaacccaataaaagattaattaaactcagaataaagaataaaataaattctgaaattagaaaaagaaaaaaatgagatttaaataataatataatttataaataactaaaattcggaattaaaaataagaaataatagaagagagtccatatgtataatccaatatgagttgaactaaaatttttaataaataaataaattttggaattacaaaaataaaaataagattcataataatataatttagaaataactgaatttcagaattaaaaataataaataacagaaaaagagtccacatagaatccaacacaagattaattaaaattcaacataaaaaatatatcattacaatttgacataaattaaagatatagctctacttaccctttaaatttcatttatataaaaaaattatacaaaattaccccctccttccttctccctctctcctctcttacccaagattcagttgaaaccacggtcgccggcgacggagctagcagcggcgtggttaggttaatccattgacaggggcnnnnnnnnnnnnnnnnnnnnnnacagattagaaagagggagaaggaagaagggagtgaagaaaggaggaggccggggtatagtttagtacaaattttttgataaatgcattgaagaggtataagtatggcatatctttaatttctatcaaattgtaacggcatatgtctttaaataaacgaataataatgctattttttccaaatcaaagaagtcctaatgggtatgatatagttattttttttaatgtgaggactggtgagcccttatattttctttttttttataggtgaagccattaacttttggacacataatttgaccattcgtcttattttagaaactttgtgcaaatgaataagatataaatcatgtttaaagtttttttagtgataaaataactcacaacaaaataaactgtaattacatactctctcgtcccataaaaaaccaacctagtactatatgtgacacatactagtacaatgaatctggacatatgtatgtctagattcgttatactagaatatatcacatccggttctaaattcacttttctgaaacggatgggactcaaaagttatatcatagtcatcatctattaaaatacagatgtagcatgcatccagttgctttctcaaatttcaggcgccagcccgatcatatcgatgagaaagcagagaacaccatgcaccgccgaacattgacgccgcgcgccgaaccaccgcggcgcgctccgtctccgtctgccacacgtacaacgcggcacgacgtacgcgcgcccacacacaccccgcgatcgattgacacgggtccgacgccccagtgtgtctgtgttccccccctacccgggacgtgtcacctgcatacgctgcctagcgaccgcccaagaagctctcgcgtcgtcgcccatttagcagcgcacgcgcacgcacacgaacgcgccgtgcagcatcagcaggcagcagcagcagcttcctcctcctcctcctcatcttcaccgacgacaccgcacgctccgcttgctcgtctcgccggcgccatgtcgtacaaccattcgccgtccatcaccgcagagaccataaaccagaaggtacgtggctacgtgcgtcgttgcgttcctccgtcgatctgaacctcagctcgcgatcgatcgatcgatcgatggctagctcgatcgagttttattaactgatcaaatatgtgcgcattctcattcgtcttgaaggtcaggatcttcacctacgagccatgtggggagattgtccgccacgcacgggtaactataaatctcatcaacctacactgagggcaaagccaatgtttgaagcttacaattaccttgagatgagacccataaatagttaatttttgttgtagtatgttatacaatacttatgatcataagataagggcaatgtatacgggttaagtagtccttatggtacggttaggccctgtcacaatagacttcagttatctctatttctatcgctacaaacatgggatgggaatcatgggacccactaacaaataaaaatgtattccctccgtttcaaaatgtttgacaccgttgactttttagcacatctttgaccgttcgtcttattaaaaaaattgtgaaatatgtaaaactatatgtgtacatgaaagtatatttaacaatgaatcaaatgatatgaaaagaatacataattacttacattttttgaataagacgaatggtcgaacacgtactgaaaagtcaacggtattaaacattttaaaacggagggagtagtaagtaacatcaaacacaaaagatgaagaggggagcaaaggagagagatattcttatttcttatgggtagtcgttagttactccatggatagctcatgctattgactcccataaagactccttccacaatatatacattggtacattgaaacatgagctcactacataccctatcttattataagttgatgtccactatctcctaaaattcaacatgtaagtgtaccatatcatcaccactagtaaaatataacctttcagtgatggtgggagtatagatggccaaaaggcctgaggcccgacgggccgccccacggcacaacattttggcccgtgcctccccccccccccccccaccggcacgttgggcaggcctaggccaggcccgacacacaaagaatagggagtaaaaatagacatattatatgccacggttcaagaatagggacgcaaaatatagttattttagctatatatatgtcaacctaaagaggagggagaaaaaatagacttattttatgtcacagcccaaagaggagggaagaaaaatagattcatttaaaaaaaggcatgatgtgccacccgtgccttcgggccggcacggcatggcccgactactggtgggccgtgcctgggccggaggtgcagcccatgagccggcatggcccggcacaaagtgctgaccgggccgtgccggcccgatggccggtgggtcatgcctagccatgcctgggccgggccaggctgggcgggccttatggctatctataggtgggagagagcaaaggagttgtcttttcgttaagtagcgctagattaaatttatctcagattccaattagccatcctccaaccccat

SEQ ID NO: 17286 - DNA, 828 bp, Oryza sativa
  unsure (1)..(828): unsure at all n locations
taagaagcactgttggagaacccttttgtagtcccggttcgtaacccccctttaggtccgggttttaaaaccgggacctaaagatcgctatcttaagtccggggtgaaataccgggaactaaagatcgatctttagtcccggttggtctgtttgtatgcatcgatatgaccttttgttttgcatgaccctgtggctgcatggtttatatatataatacatataacccatgcatatatatgttccagtacatatatgcatatataatatatgcatatatatatataatatatatatatatatgtatatatacatatgtacatgcataatatatatgtatatatgtatatatatatatatatatatgaccaaaatatatttacattatagaaaatgtgtacacatgcatatagaaacatatgtagtcatgtattaattacaatccattatatgtcctagctagctatgatttcgacgtagtagtagtcgctagctcagaagctaaggacctatgaattgtgtttccgtcgtagtagaattcacccttgggatcaagaatttgttcgttgatgaattccatgagttgttcttgaaccgccgcgataaattccttgggtgtggtcaggttatccctcatgcgaataaactatatgaatgtatgaaattgattagtaattaaacaagaaatcgatacgtaatgaaattttgaatttatttgtacgtacatttagctctcttgtggtgatgatttggtctgcaaggcagtggcaatactcgcacacgtaatagccacacaagttatgatgngctactgcacatctcatggtcat

SEQ ID NO: 17287 - DNA, 1090 bp, Oryza sativa
  unsure (1)..(1090): unsure at all n locations
atgtgnattttgatcgcttgctatgcagtatttcatcacttagacatgaagagctatctgaactggtcatgtttgctgtctgaccaccatctttggtaaagcagctgtctggcttgttcaccacaggaggttcactattgcaagcagcttgattattttcactgctttcacatggctgatctgttatcgatttgcaagcttcttcagatctatcagaggaagcttcagctagttcttcatgctccgagccaagtatttggctacaattgacaatatcctttgaacaccccacttgattggatcgatcaacaccgctaactgtttcagaagaaccattcgaactccctaagctagctttctttctagcatccattggctcccatacttgttttggagctgcattcttgtttggcgtactaccaactcggcttccttttgacactatgaagctatccaatggatagcacctgcggtactgtaaccagggcttctcaaccattgttttcctggacatcttcatctctctacttgatctagctgttggagaaaaatacccataatcttcctgctggccacaactgcaggcattgtactcatacctttctcttgtccggttattcgcactgaacaaagagttgcagcctctacctgcattccttgccctctccctagattgccagtgaatatttccaacacccccagtgtcatcttggcaatcttcataccaaaaaccagtggtctgttcttgaagggaatcccttctaaatctgagtttcctccttgaggatgtagattgttcacacatgaaagaaccattgcaatctgatggaataaattccagtgttgtactgcaatgaaactcattgctttgtccatcactttcccttgttagagattgatcaacacaggtatcaggagagaacgattccaaccaaggatcaactagctgacatctttaccaagcctcttgatgaaacccgcttttgcaagttgaggaatgagttaattgtcatagacttctctaatgtggcttgagatggtgcaccattgatgaactnctgtnccatcgagtagatgcatgcaatcaaaa

SEQ ID NO: 17288 - DNA, 82795 bp, Oryza sativa
  unsure (1)..(82795): unsure at all n locations
tgaagaagctgaggaagaggatgtaagctcatttcttaagtaataagattaggatgatcagaacatttgttagtccatgttgatggtctgccaattcatatagtctaatttgttatacatgagcaggaagatgatgctatggacagggatggaaatgatactgatgtcgatggtgttcatccacagaagcatgctaagagtcctgaacttgccagagagtttcttttggatgctgctgcagtgatattcaaagaacaggtagtgtatatcatgcaatttctaagtcctaatcactaaaagatacatgttttttttgtgatattagctgtatatatagcaaacacttttctaaatttatgatctgcgtctgaagtatcattgttgttgtatacaatatcgatgtcttctgtgtaatatatatactaggatctttagcatatgactatcgcttcagtgtcattaagatgtttagcatttactgctaagttatgaaaatatgacatggtattctaaaagaactttttttaatataaaactacccttttcaaaggatgattttctttgtggtctagatgaactaatctttattcatactcatcacaatatatgtaatatatgtattgtattagaatagccaacatagttgattaaatcatgcgacatagtatgttcttaactagttcattgaactgtttatgacattagatgattgtactcactctccagtgtatagatagattgtactcgctcttcaatgtaccaaacattcatggtcaatgtaatcagcacacgtgtcaagctattgttgtttcctcttttctttttaagatagtcgtacttaagcctgcagcatcatctcgtgttgacataggaaacattgtttttcctgtgaaggttgaaaaatctttgagggaagccacggcacaacaaaatgcacatagcgtatttgtgtcccttgcattaaaattgttggaagagcgggttcatgttgcctgcaaagaaataattacattggaaaaacaggtgagctacacatactttgttgtgtagaagaagagagagggagcaacttttgttaggatttgttgtgccttagttgacatgtagtaaattcgattaacttgccttgtagaccaagcttcttgaggaagaagagaaagaaaagcgtgaagaagaagagcgcagggagaggaggagaacaaaggagagagaaaagaagcttagaagaaaagaacgtttgaaagaaaaggaaaaggagaaagaaaagataccagttcaattgaaaccttacattggtacctcgtcatcacccctgagcaactcagcaacaccaattaatgatcagtcaccagatattgcccactccaaatactcagctagcgatgatgaagataaagatagtattgtggtcacggaatcgttctctcctgatacctgtgttgatcaatctctaacaagggaaagtgatggacaaagcaatgagtttcattgcagtacaacactggaatttattccatcagattgcaatggttctttcatgtgtgaacaatctacatcctcaaggaggaaactcagatttagaagggattcccttcaagaacagaccactggtttttggtatgaagattgccaagatgacactgggggtgttggaaatattcactggcaatctagggagagggcaaggaatgcaggtagaggctgcaactctttgttcagtgcgaataaccggacaagagaaaggtatgagtacaatgcctgcagttgtggccagcaggaagattatgggtatttttctccaacagctagatcaagtagagagatgaagatgtccaggaaaacaatggttgagaagccctggttacagtaccgcaggtgctatccattggatagcttcatagtgtcaaaaggaagccgagttggtagtacgccaaacaagaatgcagctccaaaacaagtatgggagccaatggatgctagaaagaaagctagcttagggagttcgaatggttcttctgaaacagttagcggtgttgatcgatccaatcaagtggggtgttcaaaggatattgtcaattgtagccaaatacttggctcggagcatgaagaactagctgaagcttcctctgatagatctgaagaagcttgcaaatcgataacagatcagccatgtgaaagcagtgaaaataatcaagctgcttgcaatagtgaacctcctgtggtgaacaagccagacagctgctttaccaaagatggtggtcagacagcaaacatgaccagttcagatagctcttcatgtctaagcgagggagacagagatagtagcatgagcagcatgacctcattgagtgctcagaatccggaatcctcgtctacttctgattcagaaggatcttcagaaaggaacaatagcaacccaggcaatccaccaaccaagaacggttcgcgttcattacttgaaatgtgcgcaggaaatggtttcagagaataccagccacagaatattcacccttctgatggcaatcaatttgggtttggtgtgacccctttccaggagcagctgttacatcagcaaaagattcatgcagctccatacccgtcaaccttgatgggtttccataatcatcacatgtcagttccaacaaatggatacctagcataccctcaacctggtcatttctacccaaatgctgttggatatggtgtggctggaaaccaatgtgttgacttcccaatgcagtacagtaatgtgcatccttatgcaggtcctgaatttggttatgtgcctgcacagccagtccataagactccggtgaactttaatgccatggtgccaactgctgcgctctttagaaatggagcgccagaagtcataaaccctgtcattgtaaaaccagacaggcagcatcgccatacccttcctcctgagccgaagcgggtggatcctgatcctcagaacggctgttcagaagataacaagaagccgcaagatggctctgtgcctttctcgttgttccatttcaaccttcccatatcctcgcctgcccaggcatcatctgaagacgaggtgagtggaggatgtttggcgtcgagatcgccaactccaagtgctcaaaaagctcagccttgctcaagggaggagaccaacataaaggagtacaacctgttctctgcaaggactggagtggaatttcccttcttctagacaacagacgcgcctattatttggcacagaacaatacatagcgagtgatttgtattctccaaaaaaacaaaaacaaaataagttacctcgaggtttttaccgtgttccctcgaatatttatttatttcttcttccatttgttttggttgcccttgtgtgtaaggaaattgcaaagatagtgagtggtatagtttctaaattttgagatatgttaaatgtttgttgtcccgttttccaccgttgcttttctaccgtattactatgtttgttccagattttcagcaaaggtggtacgtagattggtggacgctgttgacatgttttgctgtgataaatggacgcatcaagttcaattggtgggtaccaaccatcacacaatcttccatcgatcgccgtgaatttatctgctgaatggttttcttttttttttttgagagggtacaatttaggacgctcacgaacacaccacatcacacgcttgcgcatccctaacacgctagaattgagattggagacgtggaaacgtacagtcccataaacatgtgtaccctcccggtgcgaaacctgcgccgagtagcgctagaacgtgggtggtgagcacttcaccgagccatcggctcgttcgcatctgctgaatggattttgaagttgaaaggtgctgttcatggcaggtcatcaatcaccgtgattttggttgtgatctacttcctccgtcccattttaagtgcagctatggttttccgtatccaattttgatcatccattttatttgaaaaaatttaaaaacttaagtcacgagtaaattactattcatgttttatgatctcacaacaacgaaaaatactaattataaaaaaatttcaaataagacggacaatcaaaattaggcgccaaaacttatggttgcatttaaaatgggacggactgacggagggagtattggctatgaaatatatctaagcacgcaaagtggcagcctccgaatagaccatttttacggagaacctatgtacaaaccataaaagtaaactatatgtggatccgtgggtctgttcagttgtatccgatccctaaatatatttgagctatgctccggtgctttctagtggccagtattgttatggataaattaataatttactaatataataattagaagttactttatcatttatgtgtattcccggctaaatcgatatataattatctattgcgctagcatcgctcatatttcatcgaaaaagctaaaaaaggagaaaaaaaagattagtcactgctaaatgacgattagtcatttctaacaataatgttcatccatgtttttactaccgctaactgggatgataatacaaatagatctaaagccttcgatcaaatgagatcaacggtttagattgatttctactaccagtaaagagcaccgtagtgaggataaaaaaacatcattttacaacatctcaatatggagcttagctaaattgattgtagcgtgtttattttgctggtttggactagacgagttagagatggccaaaaatgtaccaaaaaccgaacaagagtgtctttcccttctttctattgtacttcggttttggggcctgttcactttgatgccattttcaatcttaccaaattttggtaaagttgccaaaaaagtggctacatttagtttgctgctaaattttggtaactatataagaaatcctgtcaaaattttagcaagttgccaaaattaactatgccaaaattttggcattaccaaaatttggtaaggttttttttggaaaatgaacaggcccttggtctttcagaagttcgttatttagtctttggctcagtttgtgacttctggaaacaaaactacatatgtaaaaacccgctttagcctcatcaattcaagccctatatatgttggcaaggtccgttacatccctacgttggcatatgcctaatccataactttgacagacttaccgtatgaaacggaggtagcacaaaattttcaacgtatgtacggctatcatctatcttctatctatctattatctattattatatactaaaaatccattaaacttcctacaaacgctctcaagccatcacatggcacttctataaacgctcctagaccgccacgtagcaatgtctaatctcaccatcgattttcacttaaatcggtggacccaataatttagaccattatattagattagatactaaaaatccattaaactttctacaaacgctctcaagccgtcacgtggcgcttctacaaacactcttagaccgccatgtagcaatgtctaatctcaccgtcgattttcacttaaatcggtggacccaataatttagaccattagattagattagacgtattttatttaaaaggaaacgaataacatactgttgggcggaaaaagaacgggcggaaaaagaacggaaaacataagtactccataaatacttaagtacgactaaaaaacaatcaagtttacataatgttgatcgaagaaaaaaagacctacgcactgacttgcttaaaataaataaagccaaaaacaacataagtacttagtaccattgaaaaaatataaaaaacaacaaagccaaaaaaaaatatacgtacataataccattgaaaaaaccgatgatctttatatataattttctattatttaaatataaaatataacactccataaatttaaccaaatattaccgttggtttttcactttttcaattttgacgtaaactaagcacactccaaaagacgtacaagaatctatcttagcaagttgattgaaaggcacggcaagtgggactgcctagacatccgtttacttctgcagtaatatgcagttttacgggcaccaacacatacataatttgttcaagaaaaaaacatacataatcatacttactgcagtaacatgcagtacattttcttattgcaataccacactattaacacataggatgaggcacactatgacagcaacacactatatatactatatactgtacatgcagtaacatgtagtactttaggcagttggcacgacggcgacagcggtgctggcggcgtcgacggggtgtaccgtgcgagccctcttccctgccgcccaccaccaggaagcggccttccagccggcacagcaaacaagagtaactgcagcgagaagtacgacgatgaccacaatcaaacatgaaaaaatcattatttagtaattccgaaagaaaagaatatatgaagaactaggacttgaacgtatgacctcctagctgactagctgaggaaaacatattttctcgtggctaatgatttagtacagatgatcttcttgaacctttgatcgtttaagactcatcgtcattattacgggtttttattctaaatactaaggataaagataaagaagagataaaatccaaccaatctaaaaaatagatactccatccgtttcatattataagtactagtcaattttttttaagttcgactaaatttttagaaaaacataggccttgttcagttggggaaatttttgagtttggttatcacatcagatatacggatacacatatgaagtattaaacatagtctaataacaaaaacaaattacacattctgctagaaaactgcgagatgatttattaatcctaattaatttatcattagcaaatgtttactatagtaccacattgttaaaacatgacgcaatttggcttaaaagattcgtctcgcactttacacgtaatatgggtaattggtttttttctacatttaatactctatgcatttgtccaaacattcaatgtgaccacgtgaaaatttttgttctgggaactacacaaggccatactagtattttcaacacaaactaacatgaaaatatattcaatgttagatttaatgatataatttcatattttagatgttgttaaaatttttataattttgatcaaacttaacaattcaaatgtcttataatataaaacagagggagtactaacattacaaacatgctccaactcaccgccgataatcttcatcagtagtaagtactaacaaacattcaaaagacaccaccgataatcgtcatcagtagtaagccctaacaaacattcataagaatcaggggcggatctagagtgtaacaagcggagcccttggcccccactcaattttgcagcgagtgggggcaaatgcccctttaacactttttacttccttagtctacctaagcggtagatccttagcccccacttatactattttctgcatccgcccttgaaaaaaatcagtcaacggggacgcggcgcattattttagaccattagattagatgtattttatttaaaaaactaataccttattactctatgtacatatacaggagattaaataactgttggctaaaaaatacaaaaaataatacataagtagtccataagaaggtacgtccaagagaaagaaatgaagcttatcgactgaccagcggaagaaaaaaaatatgcgcacggacttactataaaaacaatacaaccaaaaaagtatgtatcattagaaaatgatcgatggtattttgaaatagtattttatactatttaaagataaacatattactctacaaatttaagtaaatatacttagttaaactagatttatattataaatacgagatatccaatcaatgatctttaaatgttctacttaacttacgaggctaatatatataataactaatgctatgattatttttttattttacatcatattttagggtgtcaaatatcacttgacgaatatacaacactaatttaaatctaaatatgtaaaaataaaaacaaaacaatttagttgttttattttacaccattatattagatttattatttaaaaataaaacatttctcctatatacggacacatgagaaatatataattgttaaccagaaaaagtactccatacgttcatatgattgaaaaaaaaaataatgcttacgtatcgtttgccgtaagaatagaaaacatagttatgataaagccaacaaaatcgatagtccttaaaatagaactttctaataaaatataataatattcaaatttacgcaaatataaatataaaatatccaatgaatgctttttgacgttctatctaattattttaaaactatatatccaattttttttatcccgttgtattcctttaaataaataaactattaatttgtgtaaccctaaatacaacaaaatatatggagccgatatgtaataattaatgttatgataataatttcacatcatattttagattaaaaaacacttgacgaatatacaacactaatttaaatgtgtatatatattctccaaattactaaaggtgtctcatgtgataagataggtgttaaaaacaaaccaaacattgaactaacatgcactacactagatatcactttgtcttggttactgttaacagtgaaatttggtaagcctggagtagtcatcggcttagagtcaacatcgtcttcgaagttctgagattagccgatgagagttgtcaagtcgtcagttgtcggattcttgctatattcggttaaggaaattgatctactaaaggaagcttatctagaagagactgagttcaaagataatacggcatggcaagttatatattaattaggaatatagtttgttagtttccttttatatttagaaaagtgtgtttagtgtcctataaggactttatcttttccttttatctttaggaaagtttctttcttgttcgacaaggacttgtatcaacccatgggtataaatatgtacacccggggtctttgtaatttatcttcacgatcaatacaattcggcgcatcgccaccttttaccttttctactttattttatcgtccggcgggacttggcacctgacgcgggactgcatcggtgttcgatctccagctaagaggtaagtccaatgttccgccggcccaggcaattgtatcgtctacgtcggcgtcgttcaaggctgcattagtacattcgacctcttggattgctctggtttggatgatatatttgcctacctatttatcatatgtctttgttaatctagtcttagcatatcaatttagctctatcggctgcttttcgttttagggtttcagccggtatcggctaaatcgcgttgctagattagattagcttagacatctaccaccctgaaaactcagtcaacggcttgattgtctagatattagatattatgtttcttttcatacttagtgctgcatcagttaagtttgatctactaagtcgtgcttagaaccataatctctagcctgcatctaggcccctggtgttaattttggtaattaatgacaagtgctaattgtggactaaccgttgtctttgagctatacattttaagttaggtccacgtcatatgtgcgcatggatgattatcgatggattaaaattgacggcgcaaagcagagggaaagaagacggtaaaactagcgctttaatttagaattaatcgaggtgtagggcgatcaaatttgctagtttatttttagtttcgccgtactattaagaggggtaatgacctagcaaagagatgattttaattgccacactaggtcattgcattttcacttgtgctcacattttcatcacacacacaaaaatcactttgcactttcactgggttcggcctgaccagggacggtcagaccggccacatagtggcggtctgaccagcgtgccctggccagtctgaccggccgcaataaggcggtctgaccggcggcacatgcccggtcagaccggccccctggaggccgagatggtgctgctcgaggtggctgatacagagccgacggagccgtagtcggtcagaccgagccgatggcggtctgaccgagccgaggccggtctgaccgcccactcaacgccggtctgaccggcaaggccgatggagccctctgacagcacttcaactgctagttttctagccattgcagagtagcacggtctgaccggccacatatctccggtcagaccggcagagcacaaagttggaggatttcgcccccaacggctagttttggtgggtgagagtataaatactcccccaccagcagcaaggggactctcttggcacccaattcaattgcatacaccccttgcacctctctcacactcacttgagctttgtgttcatccatctagtgcgttagagggttgattagccaagagtcaagtgcatttgcttccattgtagagctagtgtggcacttgatcatctccacaccgggtcattgcttgttactcttggaggttgccgcctcctagacggcttgtggagaagttgccggtgacctctccgagaagattgtggaggaggcccgatgccggtttatgagtggtttggagttcaccaccttcggagtgaaggaagaactaccctagtgatcgaggcttgggtagttctctccgtgggccggctcccgccttgcccaccccttgacgaagggggcgtgcggtggcttcgtggttgagtggtggagttgggctcgcctcaacggggagtaggaaaccggcgagtttccgaacctcggtgaaaaatctcgtctccttgtctcattttattgtcgcatttacatttgtgcaatttacatttctagatgcaaacttgagatcatatcaccctaggattgctaaacattgacataggagtgtgatttactttcctagagatataattgagccactatcaccctaggtttgcaaaacataacttaggttcttagttagagttgaccctcaccaagcctagcaacttagattagttttgattaggtgtcatttagttttatattgcctattcaccccccctctagtcgacatctcgatcctacaagtggtatcagagcttggtctctcttgattgggcttcaccgcctagagagaagatgtcgaacgaggtgaaccatgtagggaaggctcccatgtttaatggcacaaactataccacttggaaaattaaaatgtctactcacctcaaagctatgagcttccatatttggagtattgtggatgtaggctttgctatcaccggcacgcccttgacggagattgatcaccgcaacctctaactcaatgcccaagccatgaatgctttgttcaactctttgatccaagagtagtttgatagagtgagcaaccttgagaccgcatatgagatttggaacaagttggtggaaatccatgagggcacaagtgagtacaaggatgccaagcttcacttcctcaagatccaatatgagacattctccatgttgcctcatgagtgtgaatgacatgtatgggaggctcaatgtcattgtggatgatctcaaggggcttggggcaaactacaccgatcttgaggttgcccaaaagatgcttagggctctaccggagaagtatgagacccttgtcaccatgctcatcaactccgacatgtcaaggatgacaccggcaagcctcttggggaagatcaacaccaatgacatgtacaagttgaagaagaaggagatggaggaaacctcaccttccaagaagtgcattgctcgccaagccgaagttgaagacaagggcaatggcaaggtgaatgaagccaatgagaacttggaggaagagattgcccttcttgctagaaggttcaatgatctcttgggaaggagaaaggagagaggaaggggctccaactccaataggagaagaaatagaagacccaacaagactctctccaacttgaggtgctttgagtgtggtgagaagggacactttgctttaaagtgcccttccaaggatgatgatggagacaagtcatccaagaagaagagtggaggctacaagctcatgaaaaagctcaagaagtaaggcaagaagattgaggccttcatcggggaatgggactcaaatgaggagagctccgcctcatccgggtccgaggaagaagatggtgatgatacaagctccaagaagaagaagatggccgttgttgccatcaaggaggctccatcactcttcgctccactttgtctcatggcaaagggctcttctaaggtaacatctcttagtgatagtgagagtgatgatgattgtgatgatgtttcctatgatgagcttgtgagtatgtttgaggagctctatgcttatagtgagaaggagattgtcaagttcaaggccctaaagaaggatcatgcttctttggaggtcttgtatgaggagctaaagacttctcatgagagactcaccatttctcatgagaagcttaaggaagctcaagacaacctcatttccactactcaacatggagctctcattgatgttggcatatcttgtgatttgcttggtgatagtgctacttgccatattgctcatgttgcatcatctagcatttctacctcttgtgatgatcttgtggatatgtctagctctagctctacctcttgtgtttctatttgtgatgcctcacttgttgttgagaacaatgagcttaaagagcaagtggctaagctcaacaagagcttggagaggtgcttcaaggataagaacactcttgacaagattttgagtgagcaacggtgcatccttaacaaggagggacttggattcattccaaagaagggtaagaaaccttctcactgtgccactcgttttgtcaagagcaatggtaagtattgctccaagtgtcgtgaggttgggcatttggtgaatgattgtccttgtggtaaacctcctaagacatgcatgtttgattctcattatatgcttaggaaggctcatgatggtagcattgttgctagatatgtgggttcccctatactcggtggtaaaaagaatgccatttgggtgcccaaagctttggtctctaacctccaaggacccaaacaagtttgggtacctaaaagagcttgatcttcttttgtaggtgaactaccgcaccggtgggagccattgggtgtttgatagtggatgcactcaacacatgaccggtgatagggctatgttcaccacatttgaagtaggagggaataaacaagagaaagtgacatttggagacaatagcaaaggaaaggtaattgggttaggtaaaattgctatctccaatgatttgtcaattgataatgtctctcttgttaaatctctaaatttcaatttgctttcggttgctcgaatttgtgatcttggcttgtcatgtgctttcttaccgcaagaagttattgtttctagccttcttgacaagtcttgtgtgttcaaaggttttagatatggaaatctttatttggttgatttcaattctagtgaagcaaatttgaaaacttgtttagttgcaaaaacttctttgggttggctttggcatagaaggctagcccatgttggtatgaatcaattgagcaaactttcaaaacgtgatctagttgtggacttaaaagatgtgaagtttgagaaagataagctttgtagtgcttgtcaagccggcaagcaagttgcatgttctcatcctactcagagtatcatgtccacatctagaccattggagctcttgcatatggatttgtttggcccaacaacctataagagcattggtggtaatagtcattgtcttgtgattgttgatgattattctcgctatacttgggtgttctttttgcatgataagtctattgttgccgagcttttcaaaaagtttgcaaaaagggcccaaaatgaatttagttgcactcttgtgaaaattagaagtgacaatggttccgagtttaagaataccaatatcgaggactattgtgatgatcttggtattaaacacgaactttccgctacctactcacctcaacaaaatggtgtagtggagaggaaaaatcgtatattgattgagatggcaaggactatgcttgatgaatatagtgtttccgattccttttgggcggaagccataaacaccgcttgccatacaaccaataggctttatttacatcgtctcttgaaaaagacttcctatgagctaattgttgggaggaagcctaatgttgcctatttttgagtttttggttgcaagtgttatatttaccgaaagggtgttagactaaccaaatttgaaaatcggtgtgatgaagggtttcttctaggttatgcctcaaatagcaaggcataccaggtctacaacaagaataaaggtattgtggaagaaaccgccgatgttcaatttgacgagactaatggctcccaagaggggcacgagaatttggatgatgtaggtgatgaaggcttgatgagagctatgaagaacatgtcaattggagatgtcaagcctattgaagtggaagacaagccatccacctccactcaagataagtcatctacttccgctacgccaagtcaagctcaagttgaagtggaggaggagaaggcacaagatccacctattccaccaagaatacacaccgctctttccaaggatcacccaattgaccaagtgttgggtgacattagtaagggtgttcaaactcgatctcgtgtcgcttcgatttgtgaacattactcgtttgtttcttgtcttgagccaaaacatgtagatgaagctctttgtgatcttgattggatgaatgctatgcatgaagagctcaacaactttgcaagaaacaaggtttggactttggttgaaagacctagagaccacaatgtcatagggacaaagtgggtctttaggaacaaacaagatgagaacgggttggtggtaagaaacaaggcaaggttggtggcacaaggtttcacacaagttgaaggtttggactttggtgaaacttttgcccccgtagcaagacttaaggctattctcatccttcttgcatttgcatcatgttttgacataaaactatttcaaatggatgtgaaaagtgcttttctaaatggtgaaattgccgaacttgtctttgttgaacaacctcccagtttttaagatcctaaaaatcctaaccatgtttacaaactctcaaaagctctttatggtttaaaacaagctcctagggcttggtatgaaagattgagagattttcttttgtcaaaagatttcaaaattggaaaagttgacaccactcttttcacaaaaatcattggtgatgatttctttgtgtgccaaatttatgttgatgacatcatattcggttctactaatgaagtattttgcaaggaatttggtgatatgatgtctagggaatttgatatgtccatgattggagagttgagcttcttccttggacttcaaatcaagcaactccaggatgggacgttcgtgagccaaaccaagtacattaaggatctactcaagaggtttggcttggaggatgcgaaacccatcaagacacatatggcaaccaacgggcatctcgaccttgatgagggaggtaaaccagtagatttaaagctttatcgttctatgattgttagcttgctttaccttaccgcatctaggccagatatcatgtttagtgtttgcatgtgtgcacggtttcaagccgctcctaaggagtgtcacttagtggccgtgaaaaggattctaagatatttaaagcattcctctactattggcttgtggtacccaaaaggtgctaaatttaagcttgttggctattccgattcggattatgccggttgcaaagtggatagaaagagcacatcctgtagtttccaaatgcttggtagatcccttgtgtcatggtcatccaagaaacaaaactccgtagccctctctaccgccgaggcggaatatgtttcggcgggtagttgttgtgcccagttgctttggatgaaacaaatcttgttggattatggcatatccttcaccaaaaccccactcctatgtgacaatgatagtgccataaagatagccaataacccggtccaacattctagaaccaagcatattgacatacgccatcacttcctaagagaccatgttgccaagtgtgacatagtcattagccacataagaaccaaggatcaactagctgacatctttaccaagcctcttgatgaaacccgcttttgcaagttgaggaatgagttaattgtcatagacttctctaatgtggcttgagatggtgcaccatggttgcttcttttgcatattgtatatttgctcctatttgctcttatgctttggatttattgccatttggttcttcattgcgaaaatggagcatgtcacattaagggggagttttgcactcttgcatgtgctccacttccttttatatgtgagcaaatcaactaaaagtcaacataagtcaaaacttttgcaaaatcaatgtaatttgaaaactatctcttggaaaatgtttcaaaaggttccctatatgttttccaaccctcactttgcaagaaaaatgttttttgaatgaaaatgccattttggccctcttttgaagaaactagaatcttgttttttggccaaaatgagattaaaccccaaaatgagattgagaaggaatttgaaaaaagtttcaaaacaaagttggtagagaagaagttttgaaatgtttttggtgttcaaatcatattcaaaaaccaaatatttcaaaagttgtttgaaaatcaaattcgcccaaaaacccctatagaccataaatggtcacctcctagcactcaaatgagttttgttgcaaatcttcataaatttcaaatattatgaatggttggcaatatttcaactcacacatttcaaaattgctccaaaaatcaattttttgttgaattttattgtgcggggtagccgaactgtgcaagggctgtgcacagtcggctaggggctaggcggtctgaccggcgctatatgcgcggtctgaccggcctagtagcggcggtctgaacggcctctagggcccagtctgaccagccgcaccccggcggtctgactggccgcatatagccggtttgaccggccgcaccccggcggtctaaccggccgcatatagccggtctgaccggcctgggatggtgggcccaggactttgtcctttcttcctcctcctcctcctacgcgacccctcctcatcccatctcatctcttcacttctccaactcgaaatttcttctcctctctcctctcccaaaccctagccacctccctccaccaaatccatccagttcaaccgtcaaaatcactccggttacaccgtaagtgaatctcctcctcttcctctctctattccatggattgatttgagattttattgagtttgtgatccatggcatggaaccctaggtgaaggaagaggtgttcttcgatttgcaccaatagagggtagtttcttggtgtgattcaactccttcaaccagtaaatctctctccctcttgtgcattgctctcaaatcgatctatttcaatctctagggttaagggtagtttcccccattactttaatcttgatgaaatagacctacaccttgatgttcatgtttcaatcttgtgcaacactgtcctagcaatttttagaatcatttgtgtggattatggaaggattcggtggtgctactgtcagtggcagtctgaccggccttgagccgtcggtctgaccggccgtcggccgttggtttgaccgacttcaggcatgcggtctgaccggccgtggctctcggtctgacctcccctgacaggccgtactcccccttcctcccacttcactatgtggtttctaaaattattacttatatatcctttgctcctgtttttcagtgatgcctccccgcactcgtcatggtcgtcgtgcgccaactccggatcctgtgagtgagcctgaggaatcgagtggagaggattacgctcaaagagatgaagaggttgaggccaatgttgagggggctagtgaggaggaaagtggagatgatgacagtggaagtggagagtatgaggatgaagaaagtgatgatatgcacattgatccatccatccagtttgttgtgaacatgaggaatccatcacagtataccatcttgaggcaccatgatcagtttttgaggcctcgggacaccccggatccccgttttcacaccgctttccagaagagtgtgtatgagcaagtctatgcagggaaagcttttgcagagcataagtggatctcttggagagacatcaatgagactctagagtttgagggcttgcaggatctcttcaggactgttggcattgaccggattatgactcttaagcaagattacaatgaagatttgatccggcagttttatgctacagtgtgggtggctggggactatagtgagatgaagtggatgtccgacaccctctagtgttctatctctaggaggcaattccggcggctcctcaatattcgcttggactttggagatgacttgcatgaggagcacacccataatccgctctccatagactacctctctcagttttatgaagatggagcgcggtacacatatgggaaggttgccggcttgaggaccatcccgagtgtggttaacaagattgtgagagctaccatcctccctcgcctgggtaacaatgatgacattaggggggtggcttggcacgtcatcgatgcaatcattcagggccgacagttcgacattgtgactctcatgctgcaagagattgccatctccaaggggaccttcactcagggaatctattatgccccttacatcatgaggttgattcaagacaagcttggggctgctaggcagaatttgaagaagcacaagcagtacaagccccgccttcagcttggagctccctgtgctcctagggtggcgccctcctctcatcctggagctagctcaagctcagcacctcctcctcctcatgggtatgatccaaatgccttctttcaccctcagtatgcctattttggaatgcaacccaacgagtacttcaacccggtacttggggctattaataccctaagtgaaagcattcaacgcttgtttaccgggcatgaagctttgcatgaggatgttcgtggcttgcgcacagatgttggagacttgaatgcttccgtggggagattgcacactcgagtgggtatattggattctcgagtccaaatgttggagagctcccaagcttctcatcgtcgtcgtcgtgatgcttctcatccttccacttcggcgtgtcctccttctcctccacaagagtgaagacctttttggtgcttgatgccaaaagggggagaaaagtgtgttttatgttgggttgggactagtagtagtgaggttagtcacctcatatttaataggttaaggaggtttgggctatattttgtgtgggtatgggctattactctatcttgtgtgttatttgtcattttgttaaactctctatgtcatttggaccctttgtggtcttgtaatagcctatgttttatttgtgagcccttgatgtggtcttaatgtgaacttgtgctatgatgcatggttggagttacattgatatacttgtgaccatcttatgcattcggttgattcatatgtgaagttcacattataatttgcatatgtgttgtgctatgttgaaatgtgaaattgaaatgtgcattggctccatatttgctatttgtaattgttatgcatatgtttagggggagcttttgcttgtcaatgcaatatatgtccatctgctctatgtttgattatatatatttgtggtgtttgtcatcaattaccaaaaagggggagattgaagcatctaggcccctggtgttaattttggtaattaatcacaagcgctaattgtggactaaccgttgtctttgaactatacattttaagttaggtccacatcatatgtgcacatggatgattatcgatggattaaaattgacggcgcaaagcaaagggaaagaagacggtaaaactagcgctttaatttagaattaatcgaggtgtagggcgatcaaatttgctagtttatttttagtttcgccgtactattaagaggggtaatgacctagcaaagagatgattttaattgccacattaggtcattgcattttcacttgtgctcacattttcatcacacacacgaaaatcactttgcactttcactgggtttggcctgaccagggatggtcagaccgtccacatagcggcggtctgaccggcgtgccctggccggtctgaccggcgcataaggccggtctgaccggcggcgcatgcccggtcagaccggccccctggaggccgagatggtgctgctcgggatggccgatacagagccgacggagccgtagtcagtcagaccgagccgatggcggtctaaccgagccgaggccggtctgaccgcccactcaacgccggtctgaccggccaggccgatggggccctctaacaacacttcaacggctagttttctagccgttgcagagtagcacggtctgaccggccacatacctccggtcagaccggcagagcacaaagttgggggatttcgcccccaacggctagttttggtgggtgggagtataaatactcccccaccagcagcaaggggactctcttggcactcaatttaattgcatacaccccttgcacctctctcacactcacttgagctttgtgttcatccatctagtgtgttagagggttgattagacaagagtcaagtgcatttgcttccattgtagagctagtgtggcacttgatcatctccacgccgggtcattacttgttactcttggaggttgccgcctcctagtcggcttgtggagaagttgcccggtgacctctccgagaagattgtggaggaggcccggtgccggtttgtgagtggtttggagttcactatcttcggagtgaaggaagaactaccctagtgatcgaggcttgggtagtcctctctgtgggccggctctcgccttgcccaccccttgacgaagggggcgtgcggtggcttcgtggttgagcggtggagttgggctcgcctcaacggggagtaggaaaccggcgagtttccgaacctcggtgaaaaatctcttgtttccttgtctcatttgattgtcgcatttacatttgtgcaatttacatttctagagacaaacttgagatcatatcaccctaggattgctaaacattgacataggagtgtgatttactttcctagagatataattgagccactatcaccctaggtttgcaaaacataacttagttgcttagttagagttgaccctcaccaagcctagcaacttaggttagttttgattaggtgtcatttagttttaaatcgcctattcacccccctctagtcgacatctcgatcctacatttcatcggggttttagccggtgagttatctggacgttgcatcggctcataagaattgcacatacatataagttggatttagctgatgacaacaaaggtttcactgtttaatctaatcttgtggatttcatgacatcggacctccagccgatgtgcgctttaaccttcggatcgatgcttatttatcatatcattgccagccgattggtttatactggattatattgttattttattacatcatcatcagccgattgcttttatatcatcatctacattggacatatagccgattgcttaaaccctattgctatcggctggtatcagcatcggctattatcggctatcagctggaactactccatcggcttgtcagccgatcggctgttctgatctactatttgcatatcttgtcagttgcaggatcaaactgactggcacgcccgcatctcatcaatctttggacctgcacgggagcttagcagatttcccaggccagtgtgttcgattttttcgtcaacagttacatataaatgtttctattattttgggataaaatttaactccttagatttatgtgacggagggagtataagtaatataagtctatctttaattagatgaagtagtatcattagctatatttttaatagaaaatatctttcattaatatataataaaattaaattgttccttaaagtcatctatagcatacaaaataaaaaatgttatataagtttggaaactccacaaatgtaaaaaaaaataatcactcatatatcgtacaaatagatatgcaccacctccatcattgtgacatattttttttctaataaatttgagcatatacggtttcaactaatatgcccaaaccagttattaacggacccatgtttaaaatagagtcaaaaataaaaattcgtattaaaattcaaacaacattaaacaaacttacacgcgcgtacgcgcgggctaccttcgtagtttttatagtagttaacatacatttatccatacattcgtagtaaaagcacgttgcaggtaaacataaagtaaaaattttcccactagaacggaaaagcgtaaaaaataatccgaagatttgttataatttgaaattaacagtaaaagcaagtttttaggaaggtttgtgtcgcagcgaataaaagtcttatgcatatttcatctttcatctttttaattgctcgctcacaagaagtatatttcaagaattgctcgctccaataaaagtcttaggcatatttcaactttttaatttcaaatgagattatcatatttgtaatgtatatataataaattaaaatgcatttatatttggaaaaagcacaccgaaggtccctcaacttatcagcgagataaaaaagtcctcgaactgcaaaaccagatatgcggggtcccttacctatataaaatcggtcgcaataggtccctcggtaattttgatcccagttttatccaacgtggcgctttgaccacggccatcggcggctgagtccacgtaggacccatatggacccaacatgtcagcgtgtccacctcaccttcctctctctttcccctcttctctcccttcctcctctttctctttctctcaatcttctctctggggctttgggcaggccaccgccgtcggtagacggggcgaggcgggagaggaggtccgcagccggtgacacagcggcgacgcgggagcaggggagcaaggtggcggcagggggagctgtgactggcgtgggggagctatgcttgcccggagccgccaccgacgacgaggccgagcggcggggagtcgtcggcggcggtgtcgaggtggcctgctcgacgaagcagtggcgcgagtggcggcgcccgagtccatactagcgcgccgctgcgcggctcgagggagagaggcggtggccaagtcggcgaagggaatagcgagcaggcggggcgtgatgcgggaggcgagcaggcgacggccctttccctgcccggatctgccaccgccgacgaggccagagtcgtaggcgccgccactccgcatccacagcggcggccccatgggaggaggacatggcggcgcgcgatgcgagagcaggaggcggcatcttcgatggcggtggcgatggaggtgaacgccgggaggaggaagacagcagaggggaagggacatgcttcgtcgccgctctcccttgtcggccgccgcgcgcctcgcactctcccccggccgccaccgttcttctccccagcctgctcccgcctcgccgctgctcttctccactgctggtcgccggtcgccggccgtcggacctgctctcctctcccacctctccatcctcgtcggcgcctcaccaagtcgccgccgcatcgtccgtcatcgatcaccagacaaggagcaaagtgagagaaagagaggaagggagataagaggggaaagagagagatgatgtggcatcctgacatgtgggacccacatgggtcccacgctgacttagccgccacgtaggacaaattcggcgtcaatactgccctgggacgtcaggtgaccggtatagttaatggaccccgcgtatctggttttacggttcgaggacgtttttgtatctcgctgacaagttgagggaccttcggtgtactttttcatttatatttatagtgttctgggccggcccgtaggcacaaaagcccaccatgctcttaaatggaaaaaagttcatttttatccgtcatgtctttgggttgtctcttatatggcttagtaagtctattgttcgtacctcatctctttgagccatgcttataggctggaataagtctattttgggtcccttaacgattttgcatcccctgatgttgaaccgggccggcccatggtgacgaggcccatcacgggcccgacaccagtcggggcgtgtcatgcttgggccggtccaaaaccccatgatatgggccgggccgtggggccccgggccttttggccgacggtgtgaatgtgtggggaggaaagtagcagagtgaaagctgatagtggggttgaagcgaagggcccacacggtagacagagataggaaggaaaagcatcccaacgtttcgaaggcgaaaattcgaaccatcccgcccttcccaaaaaccaggtgggcccactaccactacccactgcaggtggggccaccaacggttgggcccactcgtcatggtcacaggtaggtgcgggtgcgggcgattgattccgaaaattttgggggttcccgctccggcttccgcccaactcccatctgaaatcgattcgaatcctccctccttcgatttcacgcggatttcttcttctctccatttcctcttctccaggttctcctgctcctaaacccatccaaaaccctagcaagaggaagaggcagcagcagccatggcgcccagctccccgtcctccgccgccgcgcccacgcgtaccttcacgcgtaagcgcgccgcctccgccttcgccttcgccaaggccaccgacgagccctccaccaagcgcacccgcaggcccaaggcggagaccaagcccaggaagaagaaggacgaggtaaaggaggaggagaagccgcccatggaggacgacgcctgcggggaggagccggatgcggaggagatggccttgggggaggaagccgaggccgaagaggcggaggcggagcaaaagcagctggacgcccccgcccccggtgtggcgaggaagcgggtggcgcagcccagcagggtccgacacggcagcgacggcgaccacgacccggagttcgtcggcgaccccttccccgccaaggaggcgcgcgacaagtggccgcagcgctaccagcgcaacgccgccaccaggaggtataacactcacgcatcccagatctggcctcctcaccacgtttgcatcctcctctcaacgcgtcctctgggttggtggcaggcccgatgaggaggaggacatcaaggcgcgctgccactacagctccgccaaggtcgatggcacgctctactgcctccacgacgacgtctatgtcaaggttcaccaccccatctcaatttccttccttccttcctttattacgtcttgccatgcttcgtgtctatgctttaatttattgcgacttgcttgtcattaattgtgtcccacttaactagctcatctggatctctaacacatccgcctcaccctgatttctttcgttgtgtgtgatttttgttgcatcaaacaaggatgctcctttcaattatcaattgtatggaatgccccacatttccacttatatcttattgttaactgaatatcctgtcgtcacaattcagtctttgcatatactcctttttcgtgcttgtgtatttgtcaaataatcacaattatgtggccttgctcgatgaaattactttttctctaaagtagtacatctccatttcgtttgcaacaatcataggctgaggaagataaggccgactacatcggtagaattactgagttctttgaggggactgaccactgccactattttacctgccgttggttctttcgggcggaggatacggtgtgtatcaaactctactagagtatgctttcctttctttttttttggtgtgtgtgtgtgtgtatgtccaaactctaacaacgtacacatctgggaactatctttgaaggtcatctcatccataatgatggagaatgctgatgatgaaaagcatgatctcaagcgtgtttttctttctgaagaaaagaatgacaatgtgcttgattgcatcatttcaaaggttaaaatcgtgtatattgatccaaatgtaagtggtctctctcagaatcttgtgctacctcatgcttgtaatgttccacattgtgattttccccttcatttcgtttagatggaatcagaagccaaagctcgacggttggctgattgtgatctgtactatgacatgtcgtacaccgttgcttattcaacatttgctaatatcccacttggtaaattgctctgttcttgttgctagctgaattaagatgacctctatatatattgcccaatatatatttgtgaactgtttcaaatagaagcactaactcatattacttccacctagaaaatggagcatcaggcagtgacactgcatcagatatttcttctgatgatgtggattcttccaaaggcaaagttgtctctgattcagaggcatcttcagtgggaaaggctacactccttgatctgtactctggttgtggcggtatgtctactgggctctgtttgggtgcggcacttgctggactcaatcttgaaacggtattattcttccctcattcgtctgggagaacttttgcgatatcagtactaaaccctttttttttctgctatgtggccagcgatgggctgttgatttcaatagttttgcgtgcgagagtctcaagtataatcatccaagaactgaggtatgttgtgaactgcattgatctatttgttttcagtgttgttttatgatctgctaactctaacgagctaatcattggatcaacgtgctatggattgtgtaatcaaatttggcatactgtgaagaaaccatttggtaatgctagtaccttttttttcctgaatgcaggtccggaatgaaaaggcggatgagtttcttgctcttcttaagggatggcatagcctttgtgatgaatatgtcaagaaagatattgatttcagttcagctggtgcctcagagaacgaagaggatgatgatgagcctcttgaaaaggatgagtttgttgtggagaaactagctggaatctgctacggtggcagtggtagagaagatggcctctatttcaaggtacccttgtctcatcatttgcatattatttatgggttcctgcagtattctgtgagtgttgcttcaacataattcttttaacaggtacaatggaaaggctatggccgtgaagaggacacttgggagcctattgagaacctcaggttggtacctttctggctggcatataatcattaacaaggtttatttctgtttgaaataacctaatctattttttaataacctagggattgcccattgaaaattaaagaatttgtgcaagaaggatacaggagaaaaatcttgcctcttccggtgagtatttgctttccttttatgctcttttctgctatatactttgatctgctgatgccatctatgtttaataattccatagggtgatgttgatgtcatttgtggtgggccaccatgccaaggaataagtggtttcaatcggttcagaaaccgcaaagagccactaaaagacgagaaaaacaaacagatggtgacattcatggatattgtggcatacctgaagcctaagtatgtcctgatggaaaatgttgtagacatactgaagtttgcagatggttaccttggacgttatgccttgagccgtctggtggctatgaagtaccaagcacgacttggaatgatggttgcaggttgttatggcttgccacaatttaggatgcgtgtgttcctctggggagctcttcctaccatggtttgtttccattgcatttgtgaacatttggtagtgtttgatcggaacagtgaccaggtgcatttgttaatgtaggtgctgccaaagtatccgcttcccactcataatgttgttgtccgtggtggtgccccaaatgctttttctgtaagtctgaccataactctaaattccattgaaagtctccgtattctgactagcttgatcttgcttgcagcaaagtattgttgcatacgatgaaacacagaagccaacattgaaaaatgcactgctgcttggcgatgcaatttcggatttgccagaggcaagtgtttcatcatctattaatacgtttcttgacctgcaactgcaatcttaccccttatcttcaggtaaacaaccatcagcctaatgaagtgatggaatatggttcttcccccaaaacagaattccagcgctatatccggcttagccgtaaaggtaataaaacaacctctaatagctatcatttgtgtgctttgaatatgatgggtgggtttatttttgttatcaatgattttttcccttacatttcaccctgtacaccaagtttaattcattttttccccaaatgttctagaaatgctggatagttcttttgaagggaaggatggtccagatctaggcaagcttttggatcaccagcccttaaagctaaataaggatgaccatgagcgtgtgcagcaaattccagtaaagaaggttgtcagttgtacagctttggtcctttgtgaacttgtccactcattctttctgcagtcataatcaatttactgtgtttcagggagccaacttccgggacctgaagggtgtcagggttggggcaaacaacatcgtggagtgggatccagacgttccccgtgtatatttatcttctggcaagcctttggtaagtgttccgtgctctccccattgttgtgaattgtttgctgcatctagtatctgctgcttagtatgcagctagtgccatgctgtttgcagtcacaaggggatgtatttatattcaggggagcacgtttacagttgtgatgcatctattactttgtggggacaaatttacaggcgccctaggtgctgattagcccttttgaattatgctccctttgttttgtattgtcaggcaccttgattttttttctaagtcaattttttttaaaattgatcaagtttatagaagaaacgtagcaatattttcgatactaaacaaatatactatcaaaatatattaaatattagatttaatggaattaatttggtgttataagagttgccatattttttctattaacttggtacacttatagaagtttgacttaacaaaagacaaagtgtcttatgattgaagcggagggagtatattgcatttttaggaaaaatatgttaaaagtattagaaggcctgacaaagtagctagagaatttctaggagtggagtttcaaaccaaagtaacaaagcatggcatcctctaaattttcatgaactttgttatgaggagctcctagcttcctaatcttctattatatactaaaagtccatgaaactttctacaaacgctcctaagctgccatgtagtattcctagaaacactcttaaatcgccacgtggcattttaataagttggtgggcccattattttcaatgaataaatttatctttagagggaaaaaaaaccacaatccctcccaaataccagtcccactctcaaacaaccctagtcggatgtacatagtcgtacatggtacgactatgtacgttcctccatctgataacctattactctaaatataaataaagataattcaaaccggtgaactcattaaatttattttaaaaatacaaactctactaatttttaaagtagaccgttatccctttcatgacaaactaagtaagaacgcaacataagaaaataacaatatttattattttatattaaattcattttatataataaagattgattaaatcaccacatgtcacgttttaaacttaagaaaagtaattaaaagaaaaaaagaaattgatatacctattatttttaaccattagatcattttcagaaaatcttaatccaccacatcatgtcttaaaggttaaaaaaacattgaaatctaaggaaaaaaaacattggttttcacttagatatctgcaaatcagtcctccaccttcacatcctgccagtccatcacatgtgcataatagtgcccaccccttgccatctctcaatcgagcactgcactatttattcctcaccagtccctccctatctagttttagctatcgaagtaaaagagaaacaaccaataattatagatattgaaaagaccatagttttaagctacacatattatttctaatccaactcttgctgtatttatatttaaaacaacaatttaaaatccacatgtctgtattttgcaatataaaatatatgacatttaggcacactccaccagtgcacttggcatgtcatccaaatagcaacggattattatataaattgtcgagacatatttcattactatacatcagtctacaaatgctgatagctatactaaatcaatagtacccaaacaaaattggcaaattcatgttccaatcattgtttttatcgatggacaacacccttgctattttacatgctattggacttgccttgaaaaactatgaaataattcaacaaggcacgttgctccatcatatattgttttgcaaacatgcaaaactaaactagatattcagtgcataagaaaaagatagctgaaattttaatagtctaagctactacattaaaaaataattcgaagggacaaacaatttaacaaacataggttgcatcattatacattgttttgcaaataggcatagcttaacgagataaacaccgtattatgaaaaagaactatctcaaatatgaagatgcagagttgctattgtattaaaaaaaatggtgcctgacttatagaaaacaatatgattacttcgtattttttaaaagggacaagtttgtgcatttgaccctacttttcaaaattagagttaccgtctcaccctgttttgaaatgagtaaacttaaaaaatagcgttagtagattggtatttaggttttgaaataggccaaaatggacaattgtcctttttaaaaaaactaatatgctcaaataatccaaatgttcttcctattttctgtgtaccatgttaccctaaacaacaattttaggcagtcacttgacactctaataaattagagaaaattctagaaattccgagaaaagaaaagcaaagcatcttgccatccttttatcacttaaacaagtggattcattatttccaatcattacatataccttatatatatatataaaaatatcacatccacctccaccttctgctacctatcatattcaagcatgtattcatgatagatcacattccaaaaataatattacccaattatatttagccgtccaaccatattcaccataggctacgtagagcctcatgtcccaaccaatccatccattaataaaaattgacaacttatataggtaatcaattaaaaaatgaaaaaaaaaaacaccacttttctgttacactaaatttggtagacatgttttctaaacaaaataagtccaaaataagacgattacaaggattataaaaaaaatgtttatggggattgcttaagtaagcaatagaaaaaaatggagaaatcgtgcttttgaagcatagcaaatgttttccagtttatattccgccattgtaagtgtataaaataacactatacgatgcatgcccgcgcagatgcgcgggctatcttcctagttgttacaattgctgaagagctagcttgtctgtgtggctaggttcctgactacgcgatgtctttcatcaaagggagatcactgaagtaagttgcacaatatctctggtttcttctcctgcagtaaaatttggagtgcgatatatttcttacaaatgttgttgtaggccatttgggcgcttgtggtgggatgagacggttcctacagttgtgacccgagcagagccacacaaccaggtccgattgtcaagaaagtatagcaatttctacatctgtgcatcctttctcaacgtgtctgaatgtgcttctctgcagattatattgcatccgaatcaggcgagagttctgaccgtaagggagaatgcaaggttgcaggggttcccagactactacaagatgtttggccctatcaaagagaagtaagctttgtccctttcacatcacatattatattgagttgcaccgtccatcaacaatggtgtcaactctaaatgttgggttctaactggaaggctgtgtttgatggcggttgcaggtatatacaagttggcaatgcagttgctgtacctgttgctcgtgcattgggttactcccttgggcttgcataccagcgtgagtcggaggggagcagccctctgttcgtcctgccagacagcttcacggaagtcgggcgacaggcggcgccggcaagagcatcctctgttggtatccctgttggcgaggttgttgagcaatagaacacttgggtagagtagagtcattatttggttcgattcgaaccgatccgggagaatgttgtttaaaatcactgatcagccaccttggtgctgtcatgtgatcaccatcaatgttattattgattgattgaatgttgtaaggctggtggcactcctgcttgagtgcttgttgtacttgtagcataaggtccaaaacattcattcatatccttctatgggctatcttatgtctgtatcctgatagattgtttgtgttcaatcatcatctcacattgtataggctgcccctgatatcattgttgcatcaaccttgtgcttttttggggcttatttgttagtccctcaatctgaactagtaaagttgaagtttggatgttgaaatggattttgggcctagagttctctttggtgtattgctggtacaaaggcgctttgcgaaattctatttgggtagctccctttggatagctagtttgtcctagggggtgttttggttgtgtcatgtttcacgatgtgtttttttcttgttttttttttggtgtttttagagaggtcctttggatcactcggttatatagtttatcttcttaatgaaatgaagcgtagttctcttgtgtttttgagaaaaaaaaagcaacagtcactagttagatagtgtgatggatcaaggtgccagttgaggctaatgacgactagagccaaaccaggtatcaagtggatatgcaattaaattgtttgctcctcttttgtgcgtgttagtacattcttttttttttcaatcggaaagactactactccatgcattctttctcacatactcccttcctaataaactgagactatcaaacatacttgtaggataaaagaaagatcttaaaacaataggtcttgcctagttacaatagttctactagttctttttttgttgtttctttgtagttatgtaaatatttactctctccgtactcgtaaaggaagtcgtttaggataatgtttaagtcaaaccttgggaatataaatcataaataactctcaagttgttgagtttaaaaatgtaaaaattatatgaatagatttatcttgaaaaatactttcataaaagtatacatatatcatttttcaataaatatttatagaaacaagaagtcaaagttgtgttttggagaccgtgtcaatgtcctaaacgacttctttaatgagtatggagggagtacaactatactgagtattgtctagtcagtgttcccttaaaaaaaagtccaccattggatgaaacttgcttttgaatgtttataactattaaggccctgtttagttcccaaaacaaaaattttcacactgtcacattgaatgtttggacacatgcatggagtattaaatgtaggaaaaaaacaattacacaaattgcgtgcaaattatgagacggatcttttaagcgtaattgcgccttgatttgacaatgtggtgctatagtaaacatttgctaataacggattaattaagcttaataaattcgtctcgcagtttcctggcggaatctgtattttgttttgttattagactacgtttaatatttcaaatgtgtgtctgtatatccgatgtgacaaccaaactcaaaaattttccccaactaaacaaggcctaaagcttgttatttgcgtgcatcgtacaatggcaagaaattgtacttttattgtataaaaataactaataaagttgtagtttgtaccttccatcacatatatgcatatgtgggtttatttgtagcatggctaaaaatggagaatggcatggagagatatatggcagtagttggaaaggatgacgagaattgcgtgtcaccctcttccctttggccctgttgcccccaattcgccttcgaccccttctccttctccttcaacatctaatcatcacggagaaaggataaggtacattacccccatcacaatacataaaaaagttgttttttattgcatttggttgaaacttgcatgattgttgatctagcgttcatgtgacatgtttctctaatgttttgatgtgcggacgacatgtgtattgatcccttgacatttgtatctcaaattaaatggtgatttgctcatgcgtttgattcacatgctttgattattgcctttcgtttatgaaatactttatctatttcatattataagtggtttcgactttttttcaaagttaaatttgatcaagtttatagagaactgtaacaactcttataacacaaaaattagtttcattaaacctaacatttaatatattttggtagtatatttgtttggtgttaaaaatgttactactatgtttttttcatttaaatttagttaaactttaaaatatttgcaaaaagaaaaaaaatcaaaagaaacttaataatttgaaatggagggagtataagaatgcacgtaaatatgtgatgcacctccacacattcaattaaaccgttcactttaatgacataagatactccctctattttatattataaattgctttaacatttttcatagtcaaattttatttagatttgactaaatttatacataaatttagcaatatcagctacaccaaataagtttcattaaatataacattaaatgtatttttacaatatattgaatatgttactatgttttaagttgaagtaagaaaaagaatatattacactcacggtacaacaacttggcgggtgtgtatgatatagtgcaagaacttaagaattaaaacgttcgagtgcaataatttgataagtgagtgcactctagtataagaacttgacaatttagtatttagtgcatcaacttagctaaacatatgctaggtgagtttttctcatgatgtcaatataccattacaataaagttaaaacgacttgtaacggaggggtaacatgaacaaatcaactcacaacaatttttcacctgtcctaattttatccgttattgattaattaaatttaactttttgcaggggtgggttcacaaattttttcaattgtgttcttatttattagaggtaattaagtaattattattagaggtacaaattaaggtctctgagagagaggggccggggtgggccctagctaggtaatggcagcctcgccggagtcgtctccgtcgtcggccaactccaccaccccgtcagcaccgtcgccgtcttcgtcgttgtcaaaatcaccctcacctccctccccatcatcgccgccgccaccagcatcgacgaacgcgccaccaaaatcagctggcggcgtttcatcttccacgcaagcgcaaccatcgtcggaatcatcgtcggagtctacgactacgccttcggcgccagcggagaggaagagcggcgggtcctctcgaggagagtccgggcggtatcgcggtgatgtgaccgccggcgtgtttgtggggttatttgtggtggcgatggttgcggtgttggcgggtgtggtggccatcgtggtgtgctgctgtataaagataacgaagaagaagaagcggccgccgccgccgaacatgcccttcttcaccgacgagaagggcaacgtgtactacgccacaggcggcctgcctcccatgtggcagcagcacggcagcagcaactacagcatcccacctccgccgccgcccggctggcacatgtcatcgtcggcggggggtttcagcggcgagatggggatggggtactcgtcgggaccgtacggtccggcgctgccgccgccgtcgccgaacgtggcgctgggtttctccaagagctccttctcgtacgaggagctggcggcggcgacgtcggggttctcggcggcgaacctgctggggcagggagggttcgggtacgtgtacaagggggtgctcgccgggaacgggaaggaggtggcggtgaagcagctcaagtccgggagcgggcagggggagcgggagttccaggcggaggtggacatcatcagccgcgtccaccaccgccacctcgtgtctctggtgggatactgcatcgccgccaaccagcgcatgctcgtctacgagttcgtccccaacggcaccctcgagcaccacctctatagaggcggcaatggcgatcgagttctagactggtcggcgcggcacaggatcgcgctggggtcggccaagggtctcgcctacctccacgaagactgccacccgcggatcatccaccgcgacatcaaggcggccaacatcctcctggacgccaactacgaggccatggtcgccgacttcggcctcgccaagctcaccaccgacaccaacacccacgtctccacccgcgtcatgggcaccttcggctacctggcccccgagtacgcctccaccggcaagctcaccgagaagtccgacgtcttctccttcggcgtcatgctgctggagctcctcaccgggcggcggcccgtcgacacctccaactacatggaggacagcctcgtggactgggcgaggccggtgctggcgcgcttgctggtcgccggcggcgaggaaggaggattaatccgggagctggtggactcgcggctgggcggggagtactcggcggtggaggtggagaggatggcggcgtgcgcggcggcgagcatccggcactcggcgcggcagcggcccaagatgagccagatcgtgagggcgctggagggggacgcctcgctctcgctggaccaccaccacgacgacgacttctccgcctcatcggagatctcgcggcatcggcaggtggccttcgacagcggcgactacaccgacgactacttcaccacctccacctccacccactcctcccgcctcccacccaagcgctaatcatcactaattcttttatttatcgatttaaattataattagctggtttcacaaatcaccctacactcgtggagaaaccatctttactcccggttggatatccatttaatcccggttttccaaccgggagtaaggatccgggactaaccgggactaaagatgtatccttagccaccaaccaggactaaaaagaagggatcaaccgggactaaacagacaatagcggtagtgcagatggtccctttttctttttctttttttttattttctcccgaatcaagtaggcaaatccccaaatctaactaacatcccaaattcacaacaccaaatccacctcacaaatcataaagttacttatacacacaaatcaaatacatcacaatatcctaagaaattactcaaatacatcacaaatccaaacaatgaatcacaaatttgtaacttctcggataaatacatctcagtgaatcatcacaaattaaaaaaaaaagaatgccgctgccggtcgccacgaacgacgggcgcggccccgccgcccgccgccgcccgaagccctgccgccgcccgccaccgggcgcggccctgccggcctttgccccgctgcccgccggccgccgcagcgcgcggccccgccgccgaccggcccgccggatgggaaggggaggccggccgggaaggggaggaggaagggagagaaggggaggagaggaggaaggggaggagttggagaagagagttagagaggatagatctgaggggagggggtgagattcgatctgttaagttgtaactgtggaggagaggataagggatagggattatatactacgtgtttaattttagtcccggttggtactaccaaccgagactaaagatcatcttgatctttagtcccggttggtactaccaaccgtgactaatgtggtgatctttagtcccggttattgacaccaaccgggattaaagatcttcggccccctgacatacatctgacaggggatgaaccgggactaaagatcatctttaatcccggttggtgttaccaaccgggactaaagatcaaaatttttataaccgggactaaagatcatctttaatcccggttggtgttaccaaccgggactaaagatcaaaatttttataaccgggactaaaaacaatctttagtcccggttctttttggatccgggactattgtggattttgccggaccgaccaaagatggtttctccaccagtgctacgaatcaaactcgagtatacttacttctatggccatatatgtgtattatatatagtcgtttggatttaactgcttgtgtataccatattcttcattaacacatatacatacctatatataaatcctactccctctgtcccaaaatataacggattttgaacggatagaatattttctagtataacaaatctgaacagagttatctagatttatagtactagtaagtgtcccacaagtccaaaatcccttttatattttgggacaaagggaggagtatataagtagccccatagttatgatttggtgcagtcacgtcatctgtattatttcagccattagatgaggggagagtaggtgtcatatgaaccgttcgattaaatctgagtattggatacttgtataattgttgccccaactttacttttcatatataaggatactctcatttaaaatgataccacaaatcactgctccactactctaaatattctctccatttaagctactccctccgtttcacaatgtaagtcattctagcatttcacatttatattgatgttaataaatctatatagatatatatgtctagattcattaacatcaatatgaatatgggaaatgcttgaatgacttacattgtgaaacggagggagtagaaattaaccaagaggtcaccaatgccataaatcctaaacgaccgttaccactgtcattttatctccatttgcagtttcacatgcatgggcttaatcaagaattaagaacatatctttatatataagatagctttgtttacctaagaattctgtactacctgcttaatgctgaatataccactgatggaatcaaccaaggatgggtgccaattaaaaataggttagtatgctcatatttcatcattttgcatttttgtgtgatcttcacatctttttccataattacactataatttactctatttttttacttgcatcacatttctaatcccttctcttttgtccaaacgagtttgcatgaaaatgtccctctaggacaggagcggatccatcatgggagcggcgggtgtttgaaccttcaatactggcgtgaggaccatgggagtccctttaaagcatctacaattttttttgccatatgtagatgggagagggggttatagctttgttctagtatattcatacccctactatttttttcatggatccgccactgctctaggatgtcacttacactatgatatgcgtggctcaatgttttctccaagggatatatgtttgggatcgtcggtacgagagtatatgcgagattgaggtaaaagagatgaagacaaggattttcatacaggtttgggccccttatatatctaattggtaatagccctacatcctattggtcgaaaccggtgttgctcttattcatctgaaccacacaagtacaatatttgggataacctatctagttgtcgtcgacttgtcggcatggataaccaactcgtagtcgatgacagggtagtcttcctcctcgaattcgcactcggcgagatcagaggtagcgctagatccctcttgttggcctccgcagacaccatattgggattgtttaggcttatctctgatgtcgatatccgacggcttgtcttggcgtatgttggcttgtgtattgtgtgcaacatcttgtggccttgtggcgtgtccctctccttctaggaggccttgtatttataaccatagatatccccttgtctaagtagaactaaagagaccaatatggatacaatccgagtagtccttgtcgtttcctcgtagaactccatttgtccttctatatacgaggtatgattccatataagacttagtatgtggtgtgtcccgccgagcttaatcgattactattaattgagtatgtgatatctataaccctaacaagacagacatggtttttcatagcgaatgcatacataataaaactttgtttcatcttccaaaacaaaacataacaaaaataacaagaatagattaccagccaacactatattacggtcattgcgccctttacgttttattcaggagaaaatatgctatatcaagttattctatttttaccacaaaatagagtaataattgttgatggtatcaacttattatcatagcttcctcctttgttacttgatgaatgtaaagttttcctaataaaatttcaaagttgtacgtttcttcgtttacttaagctgtactatattttatacgcacaccaatccaatgtcacttaattttatcttataaaatttgcttatgtcaatttcatacatattttcacagcaacacgcgaagtactatctagttaatagatgactactccaccaactcctctgccgcgcttccgcccaagtgctagctaaacatatattgcatctttaaccaactagaatttaatttaatcgattgattaattaattagctgatgctggggcatgcctttgcgtgccgcttgtacaaaggatcgacacgctataatacactagttgattgacaatgaataccttcatgaatccttcaaacatatcttgaaatttatgaagacgctgcagtcgtctcactatcgatggttatgtcgttaattagctataaatacaagcacatgtgttaagtttaggacttgaatccgagtggatagattccaccaccagaaatccttctaattggcattcaagtagtgtagaccataaggatccaccctcatttggagcttgaggcgatgttcattgcttgaaagctattaatgtgcaatggagagggagtaagagtaagcagagaaaacttgactagagaatgattcggttgttgaaagatatttgtcatctgacatgacagatttttattacactcatttttttaaaatgtgaagtgcataaaaagttgatcatagttccttgttcacacgctatgttgcacgtaagataataatgattttgtaggcacctctctaattaatatgtagaatcaaaggtttctaggctctgtttggttccatgggctaatgtttagccatcaccttttagcctcaaattagccttcaatgatccaaacatgtgggctaattttgagctaatatgaattagctcccctcaaaacattagcccctccaaggggtgctaatggggctaattttgtgttgggaccatcaaaaagcaaagcagctctctctctctctccttctctctcctctctttctactttctctccaccttttagctttgaattagcccatggttccaaacatgccatcgtaagctaatgtttagcctaccaattcatgactaaacattagctctcaaaattagccctgggctaatcttccaaacaggccctggtagggtgcccaacgattgaaattgatgctacatttattgccatgcacatagactatactttggtgaatcctctcaacatgtgcttaggtagatatttaaaacttcatgaagtttactttcaaacccatatatatgaactatgaagacatgattatcaaaaattaaaatttgggcttagagttaacaacactgaaagtctcatttgtaggaattaaatagtcatgaccatatcatatccttcattcaaccttggccgccacaacttcaaccgtatattgattataatgcttcctctgctatggattaccacattcttctcgttggtgatgttgatcgatgtgcctccttactactgagtggcatctactatcaccaatagtagtatataccattgtaaaaatatgttttatcataaaaaaatcatggtcctaggttcataaaaaatgaatgaattttaaattgcgcatgaaattttgatttggaggtcctcataaatagaggtagagtgagcatgtgagtgtttatagaggtgagtgtgcgtgtgtgcatatgaggctatgagcacgcgcatggtgttttcttttaagaaaatcatgtttcgtccgttttataatataagttgttttgactttttcatagaaaatttagcagcatctatgataccaaattagtttgattaaatcaaaaacattaaaaatattttgataatatattattttgtgttaaaaatgttattgtattttaatataaacttgatcaaacttaaaataggttcagttatgaaaataaatcaaaacaacttggaatatagggagtactaagctagctcatcgtgactgttcagatttgtggtattaggatatgttatatatcatagtagattaatgtgggacggatgagtagcaatgtatggtccaattgagatcctacagtactgcatgtgtcacatgtctgtatccggtatggtctgttcaaacgcctgagcgactagttacttgctggagttgttgtattgttacagatagacccttgacaatcaggcggatacgagcaaaagcaaaggcgatatttgaagaaaaagatgagaatgagagtgaaattttagaagtcggccattggagaagtaggaaattggaaggaagagggtatgtgaaggccgcaggtggcaattcggcccaagaaagcagaaagtggggtggcaaaattgtagaaaggcccaacaaaaattgtagaaaggcccaacaaattgtgcgaaaaccaccccacaaaaatatcgtctcctccgcgtgtgcggaaaccaccccgcataatttccaaaatacccccgagccctaatcccctcttccccttcctcctcgctacggcggcggcggcgacggcgaccgccggagccgacccgatcccacccgagtccttccctgtgcgcgcaccgctccttcctctacttcccgaccgccgcttcctcccctgttggtgtgggcgcgggcggctagaggaatcgaattgaaggtatacgtcctcttcctcctctgcgtcgtgacttggtggattgaagggccggccacctgcgtgttgtagattgggaatccgtccacttcttttttctcttctggatcgatttctttctttcttccccttcaatctcatgactctgcttctggatttctttgatgcggtgtggggtggggtggggtggggtggctggtgtagtactaccaggcaccagcagcagcttgtgtttcatcctcctcctcctaagaaaaaaaaagaaaatagaaccaacccatgctccatgttaggtcagccccttgggcttcttgttattttggatctgttgtttcttctttgcaatacatctcaaggccatgtttttttttcattacagataagctggggttccttttggtgcctgtcggtccataaaaatagtttctttggttcaccgaatggtcaaaaaaagtagaattgggggaccaaatgtgtgattcgtatgtaattagggggctttccattatatatatttggggtgtgtttcaatcctcttagcacccatgaaaacacgactgtttcttaaagtattctgtttccaagtgtaaaaaggaaaaggaagatatgtagcaggggcatcctgattcaaaatctaccttaggtttggggtcacgcaaaattacaatgttgaactgttaatttgtttgcttacagttcatttgcttccattttgaactgttgcatatatgttttgatacagtggaacagattacatcttcagtcttggttctttttttttggataatcactggaggggagagattccccacctgaattttccattgataagagatttcattacaaaggaggttacatagggcgggcagaacgacagtgccgttgccattacatatgttggagttgcataggacaggagaaaatttctttccaggctgaaaccacaatctgatcagggcgctggatacgctcagcccacaagttagcttcatcaagacagcgtcgaagaagtcgtcggagggaaggttgctcatttctgaagacgacatcgtgttggtggttccacagacaccatcagcagagcaagaagatggtccgatggtgcgccaccggtattgtttcaggggggtaaatgcaaccgacatctcgtacatcagagattccaggatgaacagagagggccgcccagaagtcgcaggtgaaagggcacagcaggcataagtggctggctgtttcatcgtcgagtccacagatatcacaagttggggattgaacagaacacttatctattctaaaccactaatataaaaaaagtatcacttgcgttcttccctacctccacccaaaagaggtgtacactgaactactacagtcacctgccttcaatcaaatccaacgttccaacattcaccgttgcaatacggacaaactatgcaattaatgcattaattacacataaatatctaaggtagatcataaaacctgctaaatcctcaccctaaataatgcccatgaacgtagttaacatatactgctattttgttctgcttgggaaacttgctcgctgaatcattcttttttttaaaataaataaataaatattttagcagggccataattcacgcttctgtagagttcatgtatcagggatatcgatattattgggtttcatttaattttggataataatatttatttcatagtgacgtggattctttatgtactacttaatttcttattgtactgtcctggattacgcatgcacattgatttatttcctaacatgtagattacggaacaactctggaggcatggcagaggggtccctagttgttgccatttgccagtatggtggagagttcacttctggccccaatggcaatttgatctacaaaggaggagaagcacacgctgttgacgtcacacgagagatgtcactagataacttcaaggatgaggtgtccaaggtgtttcatgttgaggtttcagatgtgtcactgaaatactttctcccgaacaataacagaactcttatcacaatatcatgtgatcgagatttgcaacggatggtcgattttactgctagttctgcacaagtggatgtttttttgataagtagagtggagaacaggtatttccttttttacctttttgtgcagccttttggagtaacttttgcaagcctacagaaccttcgacaaagttatcttagaagtacagattcaagccgtaattttgcgataccatggcttaaacctatagttttcttataaattgagtgttaaatctatactttttttatactatatcttaaatttctagttttgcaaaatttactattttttgagtaaatcattcatgttctgttttgattagtatgtttctcttgctaggagtataactcagactggagcctccactgctaaacctgggtctaatgcacgaggtgataaaaggaaaacgccaacttccaaaaataagtaggtgccactgttccagttttctctatctgatgttatttatagccccgtgcttttccatgttatattgaataccatctttctccagggcatcaaaaaacaagaagaagactcccagtgctactggcactgcagttcaagctaatgccaataatgtgaaacagccaagacaagttgttaccgaaaatgatgacaacaggtacataattgggtttcatagaattgccacatttttgcatgtcttctctaattttagatgttacatcattttattttaatgaccgtatcatgcccaaatttatacggttgctacttttgttaaaataaactagggtttttccactggaatttgggagtgatattgcctttgccaatacagctggagctggttccacagctccagacatcttgaatcagcaaaagcttgctcttgttgataacacagcgaggtaattgtttgactaattttatgttcttcatcattcctgcaagtttgtgaagtatgagttcaacggatgttggcatggcttttgcagggaatcagttgggctttttgatgattcagtcaatccatatgttggctctgagatcacaacagaacctacacagggtcttaacaatcctattgtgttttgggatgatattatcaaaggtgtcggtcaagaatttgataatgtgaaggattttcgtgctcagttatgcaagtatgctattgggaaaggatttgtttatcgattcattaaaaatgaaaccacacgtgtcactgtaaaatgtgttggtgagggttgcacatggcggttgcatgcatctgaatcatctcggaacaagaaatttgttatcaagaaaatgacagacgagcatacatgtggtggaggaagtggagagggtcagcggcgagcaacaagacagtggctgactactgtcattaaggagaagctgcatgagaatccattgttcaagccaaaggaccttgtcaaggaaatttatgaagaatacggagttatgctgacctattcacaggtttggcgaggtagagaagtggcacagaaggagctttatcatgctatccgggagacatatagccatttgccctggtattgtgaaaggcttttggagaccaatccaggtagcatagctttgttgtctccgatggtggatacaaaattccgccgcttctttgttgcattccacgcttctttgcatggcttcacaaatgggtgtaggcctctcatatttcttgacaaggttccgcttaaagcgactaatgagtacaagttgctggttgctgctggagttgatgcagatgatggtgtctttccagtggcatttaatgtggttgaagatgaaaattatgagagttgggtttggttcttgatgcagctgaggtatgctctccagaatcacaactatccttacaatgctatgacatttttgtccagtggacaaaagggattggatgctgctgttccacaagtgttcgaagaaagtcaccacgccttctgtttgcatcatatcatggaagaattcaaaggagagctgaggaagggaccgtggtcacaacagataagagatgggatggttgaggatttcactcgagcagcccaagcctgcagcatcgaggattttaacgcatcaattgagagcataaggaatatatccactgaagctgctgattggattattgcaagtaagccggagcattggtcagatgccatcttcagaggctgtcgttatgatcatttctcctcgaacattgttgatgcttttaataactggatacctaccaagaaggaaggatcaatagtgctgatgatagactctctgagaatgaaaataatggaggtgatagaagcaaggcgcgagtcttgcaagtcctggtcagggcctttaactccttccatggaattcaaagtgcaggatgagatgtccaaagctgggaagctgactgtgctgtgctcttctgaaaccgtgtttgaagtccggggcagtgcaatttatgttgtcaaccttgcaaattgggaatgcacctgtcgaaggtggcaactttctggccttccttgtatgcatgctgttgctgtgttcaacagggttgggcgatctttctatgactactgttcaaaatttttcagaatagagagctaccatttggcttactcaggagcaatattcccaattcctgacatggataccgttgattttagtgctggggcaaatttgattccacctcctaagccacggacatcagataaacccagaaggaagcgttttaaccccaacaagatacctactgttgtacggctctgtagcaggtgcaagcaagcaggacacaataaggcaacctgtgaagcgattttgtagacaatggaagttctggattatccagtatgcgtagaaggtatgccttcagtccgtactccaaccttttcgtctcctaagataacctctttccttcattatgaagtttgaaatgtgtgagactgaaattcgatagtctgtagaaatccgacatcttaaacagttaaaatcgatatgccagttgtatctataagtataactgtacagaaagagagcttgttgactgaaaacatctaaatgtcaatatcatggtctttcatatgccaaaaaaggatatcctttatgtaaaattcatatatgccaaccctccaattcaggggcaatgaaaatgcaaatggcttgtattcgagaaaaagaaaatgcaaatggctttcctatggtattgcctattcttccgctgattttgattttacattctagattgtgatcctgggtatcaatttcctaatttgtaatggtatggggaggactatatgtgcattcccatgttttcgccagtagaaaataccgatatttatggaatgtaacagtagatatcaatttgctcacaagctattgttcccctctgaatatgttttcctctgttgaatttactactttccactggtagcatggaaccatatacatattggaggagctgtgctgtactggtgaaatagtaatttgggcgtactgaaaagtagttggtgtagtatctgttgatctttgtctgaaatgtttgactaatcacatattctgaacattttatctctgtttgacgattacagggtgaaaggtctgaagctttaagtggagtagcgctggtgagaagccgtagattttgttggatggatggaagaacgatgagatatgatgaatgataccaccgttttgtaacttaatattatattataaatgggggtggaaagatgtagtaatttaaatgtcaaatcttaagaagaagaggaatgaaggatgagctttgttagtagatagattatggttagcggtttagaagtcataataggtagcatggctgttgaaaatgatgatgattcaagtgtaccagtccatgattttaaacattgtctttctagtcttctattcagtgttaaggatggctatcaactagttaccttctcatgttgtggttctactatctgggtacatgcaatgtttcttttaagcatgcattattggggtgtggtcagtatatcttaatagctgcgtgaggcttactttggaacggaaaaatgttgacaaattcctggaaagaagtcgtaaaatttgtgcgttccagaaagcccctaataatctgatgttctttcatactacctaaacaaacaatatattagggaggggttttttgtggcaatattttgtgagtaaattgtatcggcaatctagtactactgaatttgtagaagtgccgtttttgatgtaggacttgcgtaatgcgtgtgaaccaagactaaagtggctgatctttttaggatgccacataagctactattaaagagaacatatcctatacacacaagcttttcacgtacactccgtgcgcacaaactatcaaatgacgaaaaattttagaaaaaaaactggacacatacttccaataatattacatctacgtgtaaaatcttatcatcaaattcattatattttagctggaagggtctacacgtcgggcgcccgatcaggattgggaaaaatcggactctgacatcagcatgacatcagcaccacgcatgcatgcaaaaccactttaaactgatttttctcttaaattatttatccaaatcatgatccgattacacaattaaattcattgtaattaaatcttaaaaataagaccacacatggatatatttcgatgaaattttttttagcttattattgaattatttttaaatgttgcacgatgttccaccacgtatattggaattgttttactacgtagatcgaaaatgtttcaaccatttaaatcgggtgttatttcaccttatataaaaacaatgtttcagttcactgcaacattagatttatacatagtgaaacattgtgagtacactaggtgaaacatttttggtggaacaaaaaatgaaacgaattctcttaatagagggtttccaaaatatgtgggtgatttgttgcaaaagaatgtttcagttcactgcaacattagatctatacatagtgaaacattgtgagtacactaggtgaaacatttttggtggaacaaaaaataaaacgaattcccttaatatatgggtgattagttgcaatggagtatatggtggagacacatggtgggcccaggaaggagacacgtgcgcatcgggggggggagggagggggggagagcgtccgatccgtctccccccgcgccggttgcccggtaacaagcaatttcgattttagctgtaacaaaaaataatacaaaattctaataaatttttacctataaaactgttagatttttcacttttttgctacggttaaaatataatgaatttgaatatgatactttgcaaatatatgtagtactattaggagcaaatgtctaatttttgtgggacatttgctagttggtgtgcacggagtgcgcataaaaaacttgtgtgcataagctatgttcccctattaaggtattaaggtatgatagttgtagagagaaagtagctgtttataagccaatgaaagatatataggctgaggtcttttatttgagtcctagtttttcccgcgtacgtttttcaaactgctaaacggtgtgtttttttaaaatttttctatatgaaagttgctttaaaaaaatcatattgatccatttttaaatagttagctaatacttaattaatcacgcgctaatgaagtgttccattttccttatggggaggtggagttcgtagcctcacctcccgaacacagccatagtatgccttagaaacacttaaagagattattcaaagtgttactccctccaggctgataatacttatcgttttggataagggtgaggtcaaactttagaatctttgattatgaatcatttttaaaatatttgtctttcaaatatggtgaccacatgtatagattagtcttaaaaaatactttaataagatcatatatttgttaataattttttacatattatgatagaaaataatggtcaaagttgtttttttaagaccgtgcccttgtccaaaacgacaagtattatcaatctgggggagtacacacatcttttcgcttatgtgtatagttataagctaaaatttgagttgattttgtgtttttctttatcatagtttattttatagcatttatttttgagtcgctagcaaaacatatataaaagttttattcattgttcggttgctaataagtggtaagaatatgtataagattagcccaaacaataactccgtaaatctttagttagcacactgctacgcaagggaagccgattttctgacgttgctgttcaccttgactgcatcactctagggcccacatattaaccgttaagttggagggagatctcaatccttgtcaccgtaatcactttagtccacctttcccaactcatttttcacgcacacattttctaaacggctaaacaaatacataattaatcatacgttaatgtttaatgagtagcttcattttgcaggtggaaggattagttcccaaccataggaggtagcagttgcgtttgttatgggctttgggcccatgagatagataagatcggcccactaatcatagccgcgggtggggtgtggcgtgttgtgttgttgcctccgcctccgccgccggccgctcgagcctcctcctctcccgccagccgccgccgccgccgccgctgcttgcttgcgatttttcagatggagagcccgaatcagaaccagcagcaggagagcagcagcggaagcagcgtgatgtgccagctggtcagtcccgaaggagaccaccttggcgccgccctctacttgcctcacaacgtcggcccgccgcagctgcaggagatcgtcaaccatcttctccacaacgtaccactatctcttcctccttactcttcttcttcttgcctgcctgcttgcctgcctgataccttttttttttaatttcatattgatattggcttagggaccaattttatttcttctcctttttttcttttcttttataaagaaagaaagaaagaaacattacaatgtatcaatctgcctatctagacaacacataagctgtctgtactcgttcctagggcccatttgaatcgcaggattgagaaaacgcaggaataggaaaaacgtaggattttaataagaatgaagtgtaaaacagatgattgcaaaacgcaggaaaaatacaggaatgaccgtttgattgaaccgcaggaaaaacgcaggaattagatgagagagatagactcaaacgaaagttattttttcttgcacaactctttggtgagagaggaaatccctttaatgtttaacaagggaaaaaatacaaggttacaattcattatgacaagtttaattataatatagtaaaggggaaatatttgagctaattgtcacgttgcatttatcttcacctatgtaatgtactcccatttggcagttgtcctgcatacttacttgtgtgacctcatcactctaaacatttactttaggaggacaagctgccatatgcattctacatcggagatgaagaactctctgtccagcttggtgcttacatgcagcaaaagaatggtgagactccactcacaagttcatcctacatttcttttcgtcgattaagaaaattaaaacaaactaggtgttgcatctcatttctgatttctatcttttgatttttgttaaatgaagcaaatgttgaggttaccctgcgcatagtatatcaaccgcaggcaattttccgtatcaggccagtcaaccgatgctctgctacaattgctggtatgtataccttggattacgttcatttcattgttttctttttccattacaattttaggactcttttatttgacatgttctcatattgctgggattacaatgggaatatcatcggacagacaaaccctttgcatccttgttttatttgtcattgacagcaccagtaccagcctcaattatgtcgattttgagctttcttataccactgcgaatgatgtaatttatcatctgcaggccatacagaagctgtactagcagtttccttcagtcctgatggaagatgtttggctagtggttctggtgataccactgttaggttttgggatctgagcacacagaccccattgttcacatgcaaaggtgaatcttagcattcttgcatacagataatttcaagtcatttttctcataccttaaataagtcgaatgcccgtaattgcattggtgcttgttttatagagttacaccatggttattgttctttacggtaacctagtgcttaccaacacttgattaacaatttctcatgagagagatcttagatgattgatgcaaaagtgtttagcaactcagtgcttatctttatcaatatgtcctaactcacaatagacctgtaagttactttcagaattaatcttttttaatggtagacctaaccttaacatgtactggataatcaaagcttaatgtttgataccatagtatacagtgtttgttccttttagatgaatttagtaggttgagactattaaaagataacataatttattacttgtaattaacacattacataaattgtttatttgtcgatattggatgttcagacgacctaataggagtttactgttgtaacattgtgataaaactcatgtttatcagacattacttccagtgcatttgagtataattttttggtactcttagtctcgttgacagttccatttgcatatcggtatatccaatgtttttgagggtgataccattaatatttgaaagttatcaaataacaccgcatcttccaggacacaaaaactgggtcctctgcattgcatggtcgcctgatgggaatcatcttgttagtggaagcaagtcaggggaacttatattatgggacccgaaaacaggcaagcaattggggactccacttacggtaagattatgacatctttgtctttcaacctgtagtttttgtagaagtatgaaataagaattattcagttgcatatttgcagacctaactgccctatgtgtcaattcatgtgaacctggaaaatatatgttagttacttagttgacttgaagataactgctccagttcttttttcttagtaccatggattcacatacacttaatgttggaaatagtatatggagttgtactttatatattgcagaagtttcttttttcttgccatgcagtactcattgatcattgcctttactcattaggggcataggaagtggattactgctgtatcttgggagccagttcatttgcaatctccttgccgccgttttgtaagtacaagtaaggatggtgatgcacgtatttgggatatgaccacaaggaagtgtgtcattgcccttacaggtcacactaattcagtgacttgtgtgaagtggggtggagatggtttgatttacactgggtaagactattacaccttctgtttctattataaggcgtattttgtttcgttaagacaagggtttgactaacaatttctttacaagtaatatattatttatgcgttacaaaagtgtaatcataagtaagtactttcaaatacgaatctaataacatcaattttgtgtcacacaaactataccctaatggagtaattattggtcaaagtcttgtcctaaagaaacaaaatacatattatatttttgatttttcaaaaaagggagacatacataggcagtcctttcagcattttgaaataaaaggataatgactttttttttcttttgtacttggtcacttttggttattgccattggatttgttaaaataggaacaacaacaaattttataatgccatcatggcaccattattccatggtgcaagaaagcactaggcgttagtcgggtggctgggtggcgcctagtgcctaataggcctaggtcagaccaactagtcaatccaagaaactagcaagcatattacataaaaaatagactatataacactgagatagcaagaaaacaccacgcaaggtagttgagtcacctaatgcaccatctaatgcgctacccagcgcctagtgcctaatgggttaggcagtggctagggctgtgttttagaatactgcattatttaggattgaatcatataccagcgttgtgatacagggaatatatttgtagtaaaatcgtattgcgcctgcatatatatgatgtatgaactctatttctgtttctgctgctatgtttgacagataagttaatcgagatctcaaaccactgtttgtgactagaaattctgaacatgacagattcagttcagattctattcaatctgtattttagatggaatctatttatataggaatgcttactgcttctactttggcaattgtgagaaagaactatcaagatagcttccagcaacacaggccacaatcctttattggtgccatacagacaattccctacatttattgatatttatttaattgagttattgtgagaaacccaatacgtaagtgacgttccgttagccaaaggatacacttttgctggtaggaataggccttgatcaggctaagagttccagttacttcccttttcctcatactccgtttactattttgtttatttataatagacagctataacttgaggcaaaagtggtcgagttcttcctagatggttaaaattaagtagctgaaagcatatgcgtaatcacttagtctgttatctcatttatcatgaatgtttatagtgttgcaaaattaagtagctgaaagcatatgcataatcacttagtctgttatctcatttatcgaatgtttatagtgttgctagaaatgatgtttaatgctatgctgtatgtttatttgtacaaaatgctgtattttacagatacagttcttaaaatgctatgtacaattctaaaacaaatgtatgtgtactgcagttctgaagattgttcaatcaaagtgtgggaaacttctcagggaaaattggtcaaaacactgcaggtaatgtaccagcatttcagtggacattcaaagatttatgcaaacttttatgctcccaagttggctttgctagtattgaattatgagcaaaatagcaaatatcacacaaccacatgctttatgaataaagtaccagagaactacaggttttatgatcaattccagagagatacagattttacgggaagttgtattgggaaatggcagattctgcagcttctgaggaattcctggcctgcatgttctacatatggacataaatgggtctggagatgctcaaacactagttaggtcccgctgaactttcaactttgcgtgggtttgtagtgtaactattgtaggggactgatactacacacgttctagtcatgcatcatccttacctacagaataagcacatgtgaatgcatattctttatgaacgacatatctgaggcaaacatttttatttccttctaatgttgatggcaatgatagtttaatctaggggtggaaacgagccaagcctggctcggctcggcttgcagtggctcgcaaaaaagtaggcctggcttggttcggcttggttagggaaacaagctaaaacttgagctcggctcggctcgttctggctcgagctggcttgcaagccttcctgttgaaatatctcttcatatatattttataattattaaaaaaagtaaaaccaaatcatcaacatgtaaactttaaataagtttatatattcaatacttcaaaatcttgatgataaattttaagttgacaaattataatgccatataaagtaaaataatcgatataaacacacgatgacctaggctcgcgagccaaaacaagtggctcacgagctagctcggctcggctcatttcagcaacgagctaaaaaggaggcaagcttggctcgtttggcttacgagccgagccaagccaaccaagctcgagccaagcccgagctgagctcacgaacccgagctttttttccacccctagtttaatcttttaagatgcaagtagcctatgaaaggccatacaaacttggtttgggctcaaaaaacaaaatagcaaatcaaatttacaaggatgcccatctacagcattctaaggccaaaccccgataccaattgctttgtgaattagagaattcattgccatgtagttgatggtttactctgaccagggggtgttagaggaagaaaaaaaacaaaatttactttggaagacgtgtgcatgctatagccatgaactgagggagtaattttgtgtgcttaattcatgaatcgtaccaaataaattatacattctttcaattgtgaactgtcagctatacccaggaaacaattttgtggaatatctttgatctgattttgcctgttttttgcatgtgctggacctattattttggtagctgtgaactattaccttgctttcaagtcagctattctatgctagttgtcactgtcatcttgttaaagtagttacacacttacactgcatattcagggtcatggtcactgggtcaattcacttgctttgagcaccgagtatgttttgcgcacaggggcatatgaccatactggcaagacatattcaacagcagaggaaatgaaggaggtatgatgtgatcataaattagtgttagaactgactcttaatattttcatttgttgcttgctgaaatgaattttttcacctgagaactttggatatccaggcagctcttgcgagatacaagaagatgaggggcaatgcacctgagagactagtttctggttctgatgattttacgatgtttctctgggaaccaacaattagtaaacagcccaaagcccgcatgactggtcatcaaaaggtatattgtcctgacagctccatgaaatgttcttgcatttgtatcattgtatgtacattttgacttgtttatgcattcagttttgtctcactgaatactgagaaaagattgaaaattctatgagtttcctccctgaaacttgaaaataataatgaatcggtgtcatttaaaattaatggtatgagtgtttccaaactccaaacccatctatagaacagattattgttgaaatcattaggacttgtgtaagttgtcaaatggcatgaacaagttgggagcgctagataaaaaccattcgatattattgcaagtcgccctcgcgcggcggctcgggggcgaaaccctagccgccgccgcccttcttcttccttcttcgtgcttcgccgctgccggagcttgtcaccggcaaagccgggcgacgcgctgggatggcggcggcggggccatcctcctcggctccatctcgccccggcgcgggcgtggcgacgatggcggcgggacggcgaggtcgcggcgacggggacggcgcggcggtggggctctccacggcgcggcggcggggctctccgcggtggtcggctctggctccggcgacgggtgacggagtcgctagatccggttgcccctctggccggggcgaccggcgacgggctcggtcgacgccgacgccgctcgggcgtaggcggatggccggtgacgggcttctccggcgtgggctcgtcggcgacgacggcatcgggtcggcggcggctcgcattcgtcggcggcggctccagtccggctctcggtggagcgcgcttcggcgccggctgccgctgacctggccgggggctgccgatctgctgcgattttgccggcgacggggacggcgcctccatctccctccctcctttttctccagatccggttcccctcttctttagttgttcttcttccagtgctcaccggcggtgcggcgcccgctcccctcttcttaggggctcctcccttcttaggctaggctacttccagttgttgccggggagctccttggtgcggtaggggtggcgtgcggagttggtttccggcgtcctgtctcgctggcgtcggccgcgccgtaggtttgctgcagttgggttcctgtgtgtgaggtggtctctggtcgagctgcaatgtgattgactgttgaggcagagtcggagctgcttgtcttgcaagctcggcaacgatgaccctcaatagacgtccaggcaacgcgatgagggtttggaggtggagcattttgagagagtctcgggtgaaaaccttgcctagtgtttttctaggttgatgatatcgacgcctgtgggtgccgtttcctccttggaggtatcgtcatgatggctctctctcgctttaggtgaaaactgggttccttttggaacgggcgttgacagcattcttgatgttgttcccttgttgaaggcttcgctcagaaggtttctgctccactagaggatgtttggtggttctggagaccttgtgcattatgttgtcgaagctgcttgcctttggcaagctcggcaacgatgagttttgtgaggtctcaatagttgctttcttttccttttctgtataggttttcgccggtttcccatttaattaaccgtgcttgttcggtttttgggcccggtttcccttattaactgggccaattctcttctataaattccggcgggagaaactcctgtcgtcggttcctcgaaaaaaaaatattattgctttttttaccaatgcagggtaaatttttttatttaagtgtgcttggaaatgattttgtcatttgcttttctttgtgcagctcgtaaaccatgtctacttctctcctgacgggcagtggctggcaagtgcctcctttgacaaatctgtcaagttatggaatggtattacaggcaaatttgttgcagctttcagagggcatgttgcagatgtctaccagatcaggtcggtttttctatcttgctgtttccattgtatgtacatgccgcaatgcctaatatcatcatttctgtccatagctggtctgctgacagtaggcttctattgagtggaagcaaggattccaccctaaaggtatctatctctgtctccgcttagttctctgtcttttacctaactggtcaccgacatgccattcagtctgtatgttgtcaatctggcactggaattcattatatcagaatacttgtctttgaggagttaattctgtttgcttgagtagtcatccgaaaactggtgaatctgacataaatattggttggaactgccaagtgtgactggtatcatacaattgtttttaggcatgcccttttaattatgtttctattaacttggcttgtaaagtccattacttgcatagcatggaccatggaactgatacgttatgctcggtctctatttgttggtacgattcaggtctgggatattcgaacacgcaagttgaaacaggatttgccagggcacgcagatgaggtacatgcatgcatattttggaacaataaaaatctgaattgaaattattatagtgtagtaacaaagattatgtatatatatataaatgtaaggtgtacgctgtggattggagccctgacggcgagaaggttgcatctggaggcaaggacagggtcctcaagctatggatgaactagttcccttagagttaaggtacttagctagtagcttcttgtcatggtggctctctcttgttcttggtgagagattttgtagggttgggttggcatttcttgtttttattttgcaaccaaaggcttgagggtttatagctggttttttttagataatggaatataatattccggtttttgttcaaaaagaactacagccaattattacaaagatccactccagaagagagtgtagtttaagacaagttgaacacaccaaataagagaagagataacccaaactgagaaaagcaaaacaaaatgtggaggctagaaggccttgtcaaggcttaggactgaagtttgaagccaatgcatagatcatattctcattccccggttggatcaatatatatatatatatatatatatatatatatatatatttgttgctaacttcaattgggtgtatacgtatattatttcttcctcctactgtaagggatgtaaaagacatgacaaaaatggttactccactggttagctagctaccatgggcattattatattaattaatcggatgtgttaacagaaagaaaataacatgatatggttgagctcgtttgagtggccttggattaggctgatctcgttttggcaactagctacggcaaccataagcatgttttgtacggaagtttttctatatagtagtatcttaaaaaattaaataaattcacttttaatttataataattaatactcgattaatcattgtgtcatcgaagatccaaatgaactaagccttacacgtccaattggcttgcggtcatgagttgggaagagagttttttagcatgtggatcgagatgaccttacctatgtcacttttccaaaagattaaagatgatgaaaaacagaagcttttctcccgatttgtaaacaaaaataaagacaaaatcatcagagtatacaaacgcgtacagagtatgaaaattgaactaaattgaaaaaaaaaagaaacaatggctaaagcatcagagtatccaaattgaactaaatggaaaaaagaaagacttgtaataaaaaaaataaaaaacaagctcacaaagagtatgaaaattgattataaatgggaaaataaataatattaagtaaaaaacggaatgagcgcgccaggnnnnnnnnnnnnnnnnnnnnnnnnnnnnagnnnnnannngnnnnnnnnnnnnannnncaggcgcttgtgatttcatgatgatacaaataatatttagcctaaaacaaataaattcaaagaacttgcagacacaaagaaaatacatacattatctctatgcgcaacagaacaacaatttaattacttcccccatctgtacaaatatttccggctctccatacgatctgccactttcacctaaaaatttctgagagttgattttagattcttcacaagttctacagtggtacaagatgcattatcaatctgcatgcaaattaatgaataaaaacatattattaatcttcaaaaataccaatattaaactcgagacaatcatcatcctatttcattatgtacttttgtaaaaaaaaagagttcctacacaagttatagtctcctctaattggtaaaaaaatatttgacgtttaggacaaaattcggataaacttttgaaacttttatcatcaatttacattagaataagtttgtaaaacataataagtttttatagtaattttcaacgcaaatctttgcataccatttcttaactaagtatttgagaagttcttgacaattacagacaattacagttcttataaaatttgatcaaatcatgttaatatctatatctatactatcttaaaagaatccataggtggtggtgccattgactgtggaatctacatacttcatctcctttatttgctctcaccaactccaagtcacaggctctcttaattcttagacttctaagaacgtttgcaaatcacggggattttggacggatgggatatttgctagtactataaacctggacagactccccgtctagattcattgtactaggaaatatccaatacgtccaaaatcctttatattttaggacggagggagtaaaatataatgggagtaagttatggagtacctgtgctgtaatggtgatgtttagtgatgaatctgcaaatggcacaacattagtgttcatggtggacaggccgagcttctcgagctcggtcagcagcttgatcaacacccccttcttctcagggcacacaaccctcagcagaacagtcgtcccctgtaaatttgcctcaacttttatctccacctcattgttgttaccatcatcgtcctcatcatcaccggagccggcacggctgcgagcatcggaaattgggggttgcgtgctccccatgctttggatgtcctgcaggatcttcaccctctccctaagatggtgcacatactcaatggtgctgccgagaacggagaccttgtccgtctgagaaaaccaggaaatcctgacggcattagtcatgactgtcgttacgaatatgtggcggcattgttattatctatcgaccgttgtgtcaactgctccctcccctaaatatttgacgccgntgacttttttaaacatgtttgaccattcgtcttattcaaaaacttttgccaaatatataaacctatatgtatacataaaagtatatttaacaatgaatcaaatggtagaaaataaattaataatggcttaaattttttgaataaaacaaacggtcaaacatgtttaaaaaagtcaccggcgtcaaacatttaaggatggagagggagtatatatttaccttagtgatttcggggacgatagatgctagagttgtaaactgctggtgcatcttctctcgcctctttctctcggcgataacatgttcttgcatgctcgaggtcgccctccttccgcctctcttcatctctgacagcggcgagcagaattttgtcatgggaccactatcctgctgctgctccagcgccgagaagttgagtgagctggacgagccattggtgagggagaagaagctgtcacgaattgcagcagctgctggtgtgtggccctcgggcttgttaatatccccgacaaaggggaggaccctcagtgatgggttatggtatccatgctgttcttcctgttgttcttggggctggttaaaaagctcgttggcaagggattcagcgagttgctgcatgctgagagggtccagatgctcaagcgctctaggatcatcatcattctcctgcataaaaacaatgcacatatagcgcccaatcagtaaagtacctcgtctgcaaaattaacctagatgccaataaactagcacaacatataatagattcccttgtgataattaacacaaaagattgataaataacttagggttcttaccagttctgcaagccattgcttggccgaagaatccatattcagttggagtttgtgcaatcctggaccagaaccaccataagaccactgatatatagtttgtgatacagttaattacttgatgccaaattgcaaaccttgatggctactttgatgcccttgatcaaattaattcagagtagtcttgacaagccacacacacagcgaagaagaagaagaagaagaagaagaagaagaagaagaagaagaggataaggaaagaaccaagggaggacgaggaggagaagcagaaacacatcagcagcaaagaagaagagcactaggcactagctaatgtaagagaacaaaatggaagctggatcaaaaggctgtactactatataccttctatactgttgctctggtaccaagagtgtgctactgtactaattattaactggctgttagcttcacccacgagcatcctgcatatgaccaaactagtttattagcatcttagcttgtattgagttcaacaactagaacatccataaaaatgatttttttttaaaacggtccataaaaaagatgatttagcaactgtggattccaacttttgagcctccatggcatctgcatttgctagcgactatctatcaaaaaaaaaatgctttctaaccttgcttcatcatatataactgttaacgttgacaaagtactgaaagtactacatgtgttttagctgagatggtttttctaaactagaaagcaattgcacacattattttttaagggcccaacactcgatctgtggttgtcaagttttccttgacaacaaatgtaatgaagttaattagttatgtttattgtttcacaaaaaaatgtattaatgatactatatctctgcaggtccaggtgctcctgaagtcctgttcttttgttattcacctaaaaaaattatgacaactgattttagattcttcacaagttgtatacggtggtggaagatccattttcaatgtgcatttccaattttccatcaagaatgctttaattaatattattatattttcgtagtgcgaccgttatgaacatgtttctatgaaaattgtagctaagactttcacaattaataccatgcatgttggagtatcattatctataaaaaaaacatgcatgttgaagaataaaactgctctaatttagggatgctcattatctatcaagaaaatgcatgttgaagatagaaaacaaaatgcaagttgaagtctgaaactgcccttatttagggatgcaagtaggttttgaagaactaaataaacgaaaacacctgattagtggagtaggccatttcttggtttgctgcaagcctgcaacactatatattggttagattttttgtctggttgcaagttgactcctctcgttgtctttgagagatcaacccctatctcatgtactccctccatttttcaatagatgacgccattgactttttctnacatgtttgaccatttgtcttattcaaaaaatttacgtaattataatttattttgttatgagttgttttatcactcatagtactttaagtgtgatttatatcttatacatttgcacaaaatttttgaataagacgaatggtcaaacatgtgagaaaaagtcaacggcgtcatctattaaaaacggagggagtaatagcaattacattaattattacaaatatgtactagctagcttgtgcatgtgcagtcaaagcctcaaagataattaaggtgatttttaatccctcaacaaggcccaattgctgtactttccgcactttaattaaagcaccaaagatgaagtgtttgtgtgaataaaaaatggggtgggttgtgtgtgtctatatatatatatgaatattaatagcctgacattaattagctgcgggcgtacaaccagtacgctgcacacgtgctaactcttaatgatctctggaccgtatcacagcttaaattccagtatatcacagcttgatttatgaatgctcaattgttcatatacaagagcaattagagtcgtctgttcttgtatcatctactaaaaacattcggttttgataacatccgttttagtcttcatcctattggggtggggaagcacattttgtgtgatggtagagttcacatgaagaattcatgcttatgtgcatactaatgcactaggttgactacgtataattcgtaagccgctgaagaaacaacggttatatatgcagttcctcgccaaccatagatgaaagtttgttatttccatctttagggtggtgttctaataagtatttttctttattttaatcaaattgtgattttgtaattcgtagtcttttgacctggtacctcatataagtatgtaatcaaggaaaataaaacgtttgcagcaaatcaaaggagaagatggcacggagagaatcatatgcatgcagtaagggaggggtgtaacatgtgtgtgtgacggccaatccaacctgagattttctttctgaagaaataaggtactctcatctggcatgttacgttgcagcttctcctagcttgtagaaagcgaattattcccctacatcatgcgtgttcgctggcttgtgattacgctaataaatgcattattaattagttccctccacatattgatattgccaaacaacagtagcaggatgcctagctacatacttgcacccacagtttggagtcaaaaccacctgggctaagtcaattggagcatatgttacgtatatgcaatgaactggatagaaatatttctatgttgatacatcctacatgatgttgaaaacctaaattaacctgatctcctcgaaaaaaaaaaaaaccctatcgtttatatatacattgctagctataggtttatctatgaattcaatctacagttatgtaatcaagctagtagttctagttgatcagggcttaacctttcttccagaaccataaggcaaaaaggcacaagaaggagctttctacagcagagtatctcctttctttcatgtagcacactaatcaagaccttaggtgcaaattgcaatgggatggtgcaaactctaagtaagcttattaattagctactacatgccaatgaatattgcatttgtgtgttttcctacaaaactatctaatggctccttgcaactaacactaatctcatactcctttagttcccccaaaacatatattacgtggtaaaaccaaactattatttcttttttgtcagttgactagcattaataaccaacatggccaacttgatgaaactgcgcctatgggtcatgaaaactgctgtacgtaccatttgttttttatgtgctatatatataaagatatatacacaaggaatagttcatatatactccctgcttcttgttaatgtttggccttgtcatacattaactgtgtcatttagaaatagggaaaatacatctagactctgaaaacaaaagggaactgcgatattattctgtggcatttcatctggttgagttattctttgtttgcaaagcttgtgaaccactcttacttgttcatctttcagttgtttaaaaaatctatataccagacggaatcaaacagaaagaatgtaatgtattctcctagtctaaatgaatttggattaaaaagcaacaaaaattaaaaccagaaaagtaatgtgctttcgttgagagtcgaactcaagacctcccgcttactaaacgnnnnnnnnnnnnnnnnnnnnnnnnnnagcttttgcagcaaattattatttataaatatttattcttttacaatcagaatttatgtttttagataatgtcagtagtttatgtaaatttgatacattaatttacgaacaggcctcgcctccttgtaaataaaacaagagacagacctaatgtcacactggaccaaaattatgatttacgtcagaacgttctttagaatacgaattcagaacgaaatctactttatttcctacctttcaaattgctctgcatttcctgtaattctctacagaaattatgcctctgaaacgagtattccacgtactaaatatcttacactagaacagcaaaagttaaagactggaccaggagaatagtgggctagaacttaaaagacaattattatgggccgtaatccatcacaatctagcttagcctgatatgcctgttgattgcctttgtctcttctttctcataacatgcgtaagttagggcccatttgggaggaccaattttgtctaaattcttgcccaatatggactcccaaacgaaatgttaagagattgggaaaaaaatgttaaagtgatggattcccaaacatggagaaaactgagatatacgaccctgcaatcagatcgacctagagagccagcagccctgcagagaagtgttttggcgaaatcgacgttatcagcaacaccaatctatcacctatctgccttagcagaatataaatggctctacaaaagatcattgttaatgcaggaagcagcttggaaaattggcaggtaagtaggagtagtatgcaagccaaaaaatctgcttagaagacattggccctgtgagtggatctgttgtcgttagcactttcgaagatgctaacaatctggaaacaaaggaatgccgcttcaccaatgagaggtgtggccgcttatctgtaactggcaaggaatgacagatttttccaaaacaacatctggctggcaatcgacatcagagagtggtaggagctgatcattatcaaatcaatgccaaagagtatactaggaaggaaaaactgggagctcttctaataacttggtggaacatttggcttgaacgcaacaggaggatctttaagaaaattttgtaaaatgaaactcagggtgtgtttagttcacgccaaaattagaagtttgattgaaattggaacgatgtgacagaaaagttagaagtttgtgtgtgtaggaaagttttgatgtgatggaaaagttggaagtttgaaaaaaaaattggaactaaactcagcctcaggtgtcctttctcatgaatgaaaacctagatgaattcgaccttgcgctggcgcttagcccagatcagatggcttctatcccagcagtagtgttttcttttatccctgtaaataggctctgagtttcttttcctgttcctagccatcttttagtacacatattgtattaaggcttgttggccaatttactccctctaatatatttggcaaatctcctgcggtccgttcttcaaaacaaaataaagaaaaaggttgtaaagagatactccctccaccgttcttaatacctaaactatgtcatctcagtttggtattaagtaattagattttgacaatgaaagttgtatgattatattcgtgatattatatatttcaataattaatttatcgtattttcaagtatttataatttttttgctaaaaatggatgtggtcaaagcttaaaattgaatcgtgccagtgcaaattattcaagaattaatgtgggtaggatacaaaggtaaaatgagcgcccaatcattatcttgaaaggaatcgaattgatgtggagttaatagaaatattgtaatatcaggcattcattcaggtgcccttaagggatcacatggatatatcaattgtcaacgattcccatttagctcaacactcagctgttgtggtcctagttcatgttgctttctttctttctttctatccttgcatcattctgtctcttcgaatgaaatggtgttaaaatgtcaaactagctaggccagagctgtttgatatcatatatatatacctttttcaacattttcaaacatcagagctactggatagccattcctttgatccaaatgacaacataggaacatttttcataggattgaattcctccaataatcctttgttcccaacgagctctaattaggattacaataattactctgatgttttcttcataatttttttagcgagaaattgagaacaagctgttataattaactatttcccttaaatttattgtacacactctgcatggtctgtgcacatggtgcacaggaaaaatatgtttaatatttatattcctgtaacatttataggcaaaatacttggggtttaagaatgcttttttagcgatgagggcttaaaaaatgcttaatttgcttttctcagacaaaattctgcataaaggggatcattcctggcttaatttattggaaaccagggtatattgaaggaaaaaaatagagatttgctccggtccaacaaaaagtacctcaaggtaccgatatctcacgataccaaatcgtttccgatcgttggatctaacaatgcccatcctgcccagctagatccaacgatcagaaatgatttagtaccgtgaagtaccggtacctcgcggtactttttattggaccggagcaaatctaaaaaaataacattcatacatgttcttattttcttaatattaaattgagttatatagtactccgtaagtgtttttccatgaaataaataaagtctagtaagaagatatatgctacttcctccgtcccagaatatagcaatataggatgggatgacaacgaatctgggttagggacggagggagtacactccaacaaataaacaatatttttttgagcgatacaagtaaataattaaatactacctccgtcccaaaataatttatttctaggatttaaaatttgtcctaaaataatagtaattctagagtactaattgccccatcaatcatctctcattcaaatttctctctattttaccctcaaccatctttccactctcacataaacaccatttaatgaggagcaccatagtctttcttatcaaaccttaatatatgctaaacaacatagaattacaattatttggggacagaggtagtagcaaaagtgagtaattaattaaaacgaaataaggatcggagaagcaggcatgcattgcatgatcatatggtgcaatgatcatggtattaatatatggagtatatatatatatatggtgcatgcaacaattaagtagaaaggttgatatgatgggcagctaattaacagggggttaaacactgtagttgatatgcatggaaaagtgatgtttgcccttaattaatcggtgtatgttcctctccattcaaacttcatcactctcattcacgtgtgctcgatggttaccgcgcatacatacacacaatcacaccagaacgaacaatatcaataattttcactttgattaatttagtacgtagtatatctttttggacggtggataccaaatctttatgtgaaagatacaagcacgaacacatatatgcatgtgcatcacctgttacctcgatcgactttcaaaagagtaaattccaacagaagctttttccagactgccaaaatcactgttcacatgtggatgtagcaaccgcctaaaaccagatgtcagatttttattaacaagcctcagaaccagaactatatatatatatgtgtgtgtgtgtgtgaaaatcgattttcatagtcgacgacacctcctaaaggtatgtatgttaacaaaatatcttttggctgaaaaagaaattgaaaaataattaataatccagaaaccgttgctccgatcgatccctagaaaacaatttgcagaaaattccacattggtgaaaattcatcaatgaagccaccgctgtcgctgcaatatatatatatatattccatcgccagtgcgatgaagccatgcatcgttgttgcaagctgccattgtcgctgcagccgtagtgctagctagatttggaggcctgccatctggatacacgcaatgttgccattaattggacgatcatctcctcaactgtcgtggatccagaaggccctgaggtcaccaacgtcggtgcctgagctcatgagcaacgtacgtctcgtccctttctcacgtcgtcatcggccacaagaaggaggagatcgatgggaaacatacatgagagagagggaggttgagcatgacggggctaaggggacagcgtgagcgtgaggggggctttgagtgattttcacaagcggttaacttacaagcaccgcctgtgacaatatcaatatggatatatttcacacgagcctcctaaaaggcttgcctgtgaaaaatatcagatattcctcctaaagggacgactgctagtgaaaatcaaattttatgggcaggtcttgatgggggagtccttttcattttcacaagcaactcttcttttagctcgcttataaaaataaaggcaatatgtacaaattaaaaatggttttctaagtgatgttaatttacatgtcggaaaataacaaaatatcaaatcaaacaagttcaaataatccagaatttcgtattagcccagctatttcattattgctttaataatttccatcggttagggacgatatagagttgatatacatgacgcgtacagttttgcatacgtgagtagaggagccccatatagcagcaaggttgtctgctaattcgtataagagcccgtacaattacaatgtatagtttattttacatccactagtgaaaaaaaacagatgtacacaataattcatgtcccgcgcttacatctttaattagacccaacattcgatctcattaaggagcactggtggagaaaccctttgtagtcccggttcgtaacccccctttagtcccggtttgaaaaccgggactaaagatcgctatctttagtcccgggtgaaataaccgggactaaagatcgatctttagtcccggttggtttgtttttttgcatcgagatgaccttttgttttgcatgaccctgttgctgcatggtttatatatataatatatataaaccatgcatatatatgtttcagtacatatatgcatatataatatatgcatatatatatattatattatatttatatatgtttcaatacatatgtatatgtatatatatatatatatatatatatatatatatatatatatatatatatatatatatatatatatatatatgaccaaaatatatttacattatagaaaatgtgtacacatgcatatagaaacatatgtagtcatgtattaattacaatccattatatgtcctagctagctatgatttcgacgtagtagtagtcgctagctcagaagctaaggacctatgaattgtgtttccgtcgtagtagaattcacccttgggatcaagaatttgttcgttgatgaattccatgagttgttcttgaaccgccgcgataaattccttgggtgtggtcaggttatccctcatgcgaataaactatatgaatgtatgaaattgattagtaattaaacaagaaatcgatacgtaatgaaattttgaatttatttgtacgtacatttagctctcttgtggtgatgatttggtctgcaaggcagtggcaatactcgcacacgtaatagccacacaagttagttcccttcttttgctttgcgcactacaaataaatgacaaacaacgagagatctaattaatatacacttgtatgtatttgaatcggagaaatataaatgtagagcatgtgtactcacaggaaatttgaaattccgcctaagtctttctctccatttgccgcggaccaaatgacggaaccgataccaagccctacatggagtttaaagctatgattcgtagtagcaattaacataacaagattttcttaattaacagaggaacttatgatggtatctgtctataagttcgaaaaccttgtcaaatgtagactcctttttatccattaagtcatatacgttgacggtgcaggccgacaggtcgaagagtaaaagcacccagtggaatttgcaatgtgcgtgggatgcattacatatgaaacacttagcaagttcatacgggaatgaaatttggtataggaagacagtaaaattaaactaactctgtgttgtacggcaacagtatgaacgtcttgtaatgctgcgccttcaggagatggacgagattgtcctctgtggcttgcggatattggtcgagcattgcgacgtttactttccgagggtcgatgaatccagtatcgaaaaccccccgctgtcgggccctttgaatctccattctacaacgataaaagggagtatattattttctatagtctacttatatacaaggacctaattaattaaaggagacgtagtaagaaatctaactgaacgatatacttacaaaatccagcaactcataatagagacgtcgagggcgtccagctggtatagttcgtagattcccttgaaattgatccagagaatgtcatctccttgcaagaagtccgtgtccctgatcctcgctccgatcatctctctaccggtggcgctcatctccatgtacagctgatggaacttgtacatttgtgtgggtagggactgcaacagctcaggcttgacaagcggtttaccgagttcgtacatgtatttcacttccgccttttcgattggtgcgactcctagcaattgatccgtagttagaccggtgtcagtaataaattcttctatcatcatttctttaccggtcaccaacggctcgatctcctggtttggttgctctccaagctgagggactggtttggactttccagaagatgctttcttcagcgttcgctcatagtccgatagcttaatggcctccttggcaggtgcagacatacccctgaagaagttcatgacactcgggtctataggaatcttcttttctggacttcgaggcttgaattgtctcttgacttctaatgccacgtaagcgtcaagctcctcttgcgtgcaatcgtactctggatccttgttcttggcggcgtcaacttttcccttcttcgttgcccttgtgtgggcaggcagtggagcttggggggcccttgactttgaaggtgccggaagaggagcttgcggaggagtcagtgcaggagcctgaggaggagtcggtgcaggagcctgaggtggagacggtgctggagcatgaggaggagacggtgcaggatcctaaggaggagatggcggagccggaggagatggtgcatgagacgccgcttgtcgcccagggaagatgatgtaccgcctgcgccatagaataatggcatggcttgtgtctcgtagatgcgtctcaccgtctcctccagggtaatccagctcgaggtcctcgtacgcgccttcgaccaactcaacttcgaccttggagtatcctgctggaatcggcctgcagtggtaaatacctgaagggtccgttgggatggccatgcccgacgccaccttcatgtggtgagaggttatttattagtaatcaacatatataagcagcaactagcggaatgggcaaatctaaaatatataaactacgagcttacctttattgataagttcttgaaaggaatatgcagctcacatggtgtccgctgagtgatgtcatcaacgaggcaggtggattcgtcctgggtttgcatggcgtccatgctctgtgatcctacctgccccgttgaggcgtagctgctacggtttcctgacgggctcaccattgcaggaggaatggtcggctggggatcattggaccgatgtgcggccatgcgttcatcaaataatcttatatgctaagactaaatgaacagtcatgtatgctaagtgtaactgtcgtatattagaaccctacacaatcttagaagctaagtctaattacaaatctaataatcttatactaaaactcaaatagtgatgatatatgctaagactaggtgacgtatattataggaccctagctagtcaataattatatactaagtctaattacaaatataataatcttatattaaaactccaataatcttatactaaaactcaaatagtcatgtattctaagtgtaactgtcgtatattagaacactacacaatcttatatgctaattaagtctaattacaaatctaataatcttaattgcattacaaatataacaatcatatatatataattacgtcacttgcctgggagaattccttcgggggctagctctaccactccggcttgagggacgactccgacaatgtcttttctgcaagatacaaaaagatgtattaggataaacgcgaagtaacatatattgcatttgacgttcacgtttcgttcacgatatcgttcacgtttgcgttctcgttaaggtcacgtttcattcacctacatttgttcgttcacgttcattaacctgcctataattgcatttcacgttcatgttcgttggctcgttcacgttcgtccgacaacattctcattcacgttcattcaccttgttctcgttcacgttcattctctcgttctcattcacgttcgttggctcgttcacgttcgttcgctcattctcgttcacgttcattcaccttgttctcgttcacgttcgttcgctcgttctcattcacgttcgttggctcgttcacgttcgttcgctcgttctcattcacgttcattcaccttgttctcgttcacgttcgttcgctcgttcacgttctcggtgtgacggcaacgaaacggcggcggggcggctcggcggcggcgtggcgccgcgcgcggcatcgggccggcgcgtggcacggcggcgtggcgccgcgcgcggcatcggcgtggcgcggcgtcgtgtcgtgacgaggtcggcgtcggcgtctgaaactcgagagggagagagagagagatcgagatcggagagagagatcgagagggaggcggcgcgcggcggctctcaccccagagatgcggcagcggcgaaggaggcggaggcggcggcgacgacgacgagcgcgagacgacggcgagatacggcggcggcgtcggcgtggggatgccctaggcagtggcggcgaaggagaagccgagagagatcgatcgggcaaaaacttctaagtgttggtggagatgacgagggcgcgcatcgggaatatatatagccctagatctttagtcccggttgatgagaacaagcgggagtaaagattagatatctttactcccggttgttgagaacaaccgggactaaagaaaagatgcttactcccggctcgtctcacgcaccgggagtaaagatatctttactgccggttgttctcatcgaccgggactaaagatattttcccgctgtttctaaattctttttaaacttggttagggttaagaaccgggactactgataagcgcactgaatattattttccattacatatgtttttctaaaatagaagataatgcattacaattatttaaagtataaagattaatgacaattacttcgaaaaattattgttgtctgtaataaattaagtggataaaacgtaataagcaaatatatgatttaaaattaataaaaattctaataatcatatatacttagcatatgaatgatattattaaattggtaaaaactctaattaacatatgtatatacatacgacatgatttaaaattaataaaaattgtaatcatcatatatacttagcataggaattatattaaattaaattgtgaaaaactctaattaacacatgtaaatgccacatgcatgatttaaaaattttaaaaattcgaatagtcatatataattagcatatgaatgatagtaaattaaattgtgaaaaactctaattaacatatgtaaatgccacatgcatgatttgaaacttttaaaaattctctagtcaattataattagcatatgaatgatagtaaattaaatgttaaaaactctaattaacatatgaaattgccacctgcgtgatttaaaacttttaaaaattgtaagtatcacatataactagcatatacatgatttaaacttgttaaaacctctaataatcgtgcgtaattaacatatgccatacatcaattgatttatatggataatcaatacatccaaaatagtttacatcgtgtacacaataattacggcaatacatcgacggtgacggttgaccgcacgtactttctcctcactattgttccctccttgtgatcgctacgtgagtaaggggtgtcttcatttgataggaggatgctagggtcaattgtcaccgtgaaagggggttgcccatccaactaatcgtaatcctcgtcagtcttgtcctcaactctgatgatttttcttttgcctgggagaaccacgtgacgcttagactcgtcaggccctctgcccttctttcctttgctagacatgtccttcacgaaaaagacttacgttacatcattggcaaggacaaaaggttcgtccgagtatccaaccttgttaaggtcaaccgttgtcatcccactgtcatcaatcattacgcctccaccagtcaacctaacccattggcaccggaacagagggaccttgagaggaccatagtcaagttcccatatgtcctcgatggcaccgtaatacgtgccagttgttccatcgtgtcccatggcaccgacacgaatagcgctgttttggttcgtactcatcatgtcttgggctctcgtgtagaatgtgtacccattgatctcatatccctggaatgtcgcgatcgacccagacgatcccctcgctaggaaggcaagttgttggttgatcgactcattacccatgagatgttgtcgtatccacgcggggaaagtatcaatgtgatgccgtgtaatccatgcatcggacttaccgatgttcctggcgcgaactagagccaagtgctcctcgatgtaaggagctaccaatgaagattgttgcagaactgtggaatgggctttacgaaataaattgttgtctaccgtcattattgctttccttccgagagttccctttccccgtagtctcccttcatggcgtgattcaggtaccccgattgggcgaagatcttcgataaattctacgcaaaattcgatgacctcctctgttccataacccttggcgatgcttgcctctggacgagcacggttacgaacatacttcttcagaacgcccatgtacctctcgaaaggaaacatgttgtgtaggtacacaggcccgagaatactgatctctttcacaaggtgacaaagcagatgcgtcattatattgaaaaatgaaggtggaaatatcaactcaaaactgacgagacattgcaccacatcattctgaagggcttctaatatatccggatcgatgaccttctgcgaaattacgttcatgaatgcacatagctttgttattgttgcccggacattgtctggaaggataccccttattacaactggtagcagttgtgtcatcaacacgtgacagtcatgagactttaggtttgtgaacttcttctccttcatgcttattattcgtttgatattcgtggagtatccagacggtacctttatgctctccaagcattcaaacatgctttccttctctgccttgctaagagtgtagctggctagactcaagtaatggcttcctttcttctttggttccgggtgaaggtcgccgcgttgttccatatgcttcagatcattatgtgcttccagtgtatctttcgactttccgtatacacctaggaagccaagaaggtttacgcaaaggttcttagtgaggtgcatcacgtcgattgcgtggcgtacgtccaagaattcccaatagggtaactcccaaaatatagagttctttttccacatcgccgcgtgaccatcttcgctctctataggctggcttccaggcccctttccgaacactactttaagatctttaaccatagcaaacactgttttcccgttgcgatgtttagacttcgtacggtggtcagccttatgttcgaagtgcttgcctttcttccgtaccgggtggtttgctgcaaggaatcgacgatgacccatgtatacaaccttcctacagtgcttaagatacgtactttctgtttcatccatacagtgagtgcaagccttgtaccccttgttggattgtccggataggttgctaagtgcaggccaatcgttgatggttacgaacagcagcgctcgtatgttaaactcctcctgtttgtcctcgtcccacacggggacaccttccttcttccacaacagcttaagatcttcgaccagtggtcttaggtacacatcgatgtcgttaccaagttgcttgaggccttgaataataatcggcatcattatgtacttcctcttcatgcatagccaggggggaggttgtagatacacatcgtaatgggccaagtgctatggccgctgctcatctctccaaaaggattcatgccatccgtactcaaaccaaaccgtatgtttcgtgcgtcctttccaaattctttaaattttctgtctatgtttcgccactgcgaaccatcggcggggtgtcttagcatcccatcctgttgacgctcttcagcgtgccatcgtatcattctagcattccccttgttcctgaacaaatgccttatctgtggtattatagggaaataccacatcaccttagcaggaattctcttctttgttagctgcccgtcaacttctcctggatcgtctcgtctaatcttgtattgtagtgctttgcaaacagggcatgcttctaggttctcatactcaccgcgatataggatacaatcattcggacatgcgtgaatcttctgaacttccagtcctagcgggcagactatcttcttagcctcgtactcgggcaatttgtttccctccggaagaatgttcttgacgagtttcaataaatcgccaaatgccttgtcactaaccccattttttgccttccattgcaagaactccagagtggtatccaactttttgtgcccctgctcgcaacctaggtacaacaaagttctgtggtcctctaacatcttgtccaatttatgggctcccttttcactttcgcagtccttcttggcgtcctgcaacatctgaccaagatcatccgcaacgtcgttaccatcagcatccctttcctcctcgcccgtttgatttccttcaaatccaacgtactgagcaaaatccggaatattgtcgtcttccatttcatcttcttccatttcaacaccttgctctccgtgggatgtccaataattatagcttggcatgaaccctgactcaaacaagtggaaatgaatagtcctggatgcagaatactccttctgattcttacacttattgcatggacaacaaataaaacccctttgcctgttagcttcggccactctcaaaaaatagtgcacgccgtcaataaactctttggaccgtcggtcagcgtacatccattgccgatccatctacatgagtcgaaaaaaaatcatacaaaaataattattcttacaataatgacagtcatacaataattataagataattacaaactgtttcaacagtcatacaataatgacatatctttattcatacaaaaatcataaaatattacaccaaataattcttatttactatttctaaagttttaaactaattttaatgtgttttacttcttttaattttcagtttagtttgttttctagtattcaagactaactttcactatagttttccttctcaactattttataaaaccttctttagcaaatcaactaagtttctatatattctttcttccccacacaaattttctccctcatcaacttacaactaaattttggagacaaaaaagtgtgcaaaacatagctgcaaatgtaatatgaccaaaaaaaacattggaggatgaagttgcaaaccttttaggcacctccgatttgtatgtaatcaccaaaataaattcactagaaattttggcatgacctcccctcttttttgaagaaattttgaagcttgctcgggcagctggaggaggaagaagacatatatatataggggtgggactttagtcccggttggtattaccaaccgggactaaagttacgatctttagtcccggttggtgttaccaaccgggactaaagatcccggggggcctgacaggccctgacagcatttgacccgggactaaagatgatctttagtcccggttggtgttaccaaccgggactaaagatcaaatatgcccgttaccctttttaaccgggactaaagatcatctttagccccggtttttattgcatccgggactattatggaattcggccgaccgacgaaagatggtttctccaccagtggaggctttgctgcgaaatatatatatgcatatatatcaaatgttgtacaaatgatggatatatttatgttgagatgttgtagaaatgatgtgaggaatgagattta

SEQ ID NO: 17289 - DNA, 783 bp, Oryza sativa
  unsure (1)..(783): unsure at all n locations
cgtcccttgaaagtgatgttgctncgtctgcaannagnccancacagtatgatgttactaagctatgcgactcttttgtgcggatccttattatccgccgctcttctaatgattagatttcgaaagaatttagatttcttttcgaaaaagaagaaaaatgttttgcttaaaacatttttctttaatgagattgaatatttctatgcaaaaagaagtgctttaaaaagcaccttttttcctttatttccaaattattacaaatatcaattaattgagcgtttggattcttggagttatcgtgtcattagtctagggtttacccttttaaccataggtattctttgtggagcagtatgggctaatgaggcgtggggatcctactggaattgggatcctaaagaaacttgggcatttattacttggaccatatacatatacatatacatatacatacatatatatgtataatgtatataaattccagaaccctttgcgatcacttacctgagcgacaagacaattacaccgactaacaaattcttcaagcatcccaacgggaatcttattgaaggatttgagattgtccaagatgtgcccatcattcatgacgacaaagaagcaatcttggaatcatgtctttgaaatccatgaaattgatggtctaataagcctccatcgaaaaacttttataacaccctcggtaggccgcctcaaatttttttagaggggatgagtttcatcccattcaagcatcaaggtcgcttgactgcctccattctgaaa

SEQ ID NO: 17290 - DNA, 797 bp, Oryza sativa
  unsure (1)..(797): unsure at all n locations
aagcataagagcaaagtggggggcaatatacaatatgcaaaagaagcaaccatggtgcaccatctcaagccacattagagaagtctatgacaattaactcattcctcaacttgcaaaagcgggtttcatcaagaggcttggtaaagatgtcagctagttgatccttggttcttatgtggctaatgactatgtcacacttggcaacatggtctcttaggaagtgatggcgtattgtcaatatgcttggatctagaatgttggaccgggttattggctatctttatggcactatcattgtcacataggagtggggttttggtgaaggatatgccataatccaacaagatttgtttcatccaaagcaactgggcacaacaactacccgccgaaacatattccgcctcggcggtagagagggctacggagttttgtttcttggatgaccatgacacaagggatctaccaagcatttggaaactacaggatgtgctctttctatccactntgcaaccggcataatccgaatcggaatagccaacaagcttaaatttagcaccttttgggtaccacaagccaatagtagaggaatgcttaaaatatcttagaaatcttttcacggccactaagtgacacttcttaggagcggcttgaaaccgtgcacctcgggttcaaaggtctaaacttacacatggggcttgttttataggtaattaacgacataaccatcgatagggagaccactgccgcgttttataaatttcagaattgtgttaggatcactgagggtttatttgcaa

SEQ ID NO: 17291 - DNA, 831 bp, Oryza sativa
ggtcaccgacatgccattgtgtctgtatgttgtcaatctggcactggaggttattatatcagaatactgggcgtttgaggagttaattctgtttgcttgagtagtcatccgaaaactggggaatctcgcataaatattggttggaaactgccaaatgtgactggtatcatacaattgtttataggcatgcccttttaattatgtttctattaacttggcttgtaaagtccattacttgcatagcatggaccatggaactgatacgttatgctcggtctctatttgttggtacgattcaggtctgggatattctaacacgcaagttgaaacaagatttgccagggcacgcagatgaggtacatgcatgcatattttggaacaataaaaatctgaattgaaattattatagtgtagtaacaaagattatgtatatatatataaatgtaaggtgtacgctgtggattggagccctgacggcgagaaggttgcatctggaggcaaggacagggtcctcaagctatggatgaactagttcccttagagtaaggtacttagctagtaacttcttgtcatggtggctctctcttgttcttggtgaagagatttgtagggttgggttggcttttcttggttttattttgcaaccaaaggcttgagggtatatatgcgggtgttttttagaaaaagggatataaaaattccggtttttgttaaaaaagaacttcaagccattatttccaaaggtccacttccaaagagagtgttgttaaagaaaagttgtacccccaaataagaaaagaattacccaactgggaaaacaaaacaaattgg

SEQ ID NO: 17292 - DNA, 9945 bp, Oryza sativa
cggaagaagccaagcagggtattccgcttgccaaccttgaaggccttaaaccgaaacctcgggaacggcaaggtaatcccttccccgaccttctgcgcgcgtgcgaggaggccgaacccgccagaaccgccccaaggccgcggccttcgccggccccctcaacaggccggcgtcgtcctgttcttcccgaacaaggtttacctccaccccaacagggtcagctcacccccctccccaacttacttgtttttttttccaaaattttttctctttctttttttggatttgtggcgtcgcccctcggcgattcgtgggacttggccgattcgaagtttggtgtgttcggccgacagcccatgttagcttcctgatcgattagatttcgtttttgttttttcggtgcaacccagagatttgtttggcgcatccccaattcggccggagaagcatatggtccactaggaacagatcactccgcggttaacggctaaagtacagatccttggccccctggtactgaatttgtgatgttgatatgcaacatttggtagatctcccgcgagcagaagtgcacttaaccatcggtggtccaatgctgcatgcatctcatgcaaactctggcccaagtttgacgccctaattttagtgggttttgcctaatggcatccaaatcgctctaatgagtaattaccccccatatttttaacaatttaatccatccatccatcttcagctttgttgtgtagtaccgtttaactgctgatgggaactgaccaaccatcgtggggactggccgtactgtttggacctcttggcaaatccacctgttgcaggaaaaggaaaggtctcgcttgcttctggacgcggttccaagtggtggcatctggtggctcactgcgtgcgtgcaagatgcaccgcgcaggtgtgcgcacgcggaccgcaccggtgtaaaagccgtcctcgtttcttcgatggagaggaattcttccgattaagtgtgctgataaagaatctattgaatgcttttctcttctacctttctttcctttgccctttcggtgtcatatgggatggtcgatggtgggtcactggctcattgccgtgtagaggctgatgcatattcattacagtgctttctagtcttgggctcttggcctctcgggtccctgttagttaattactgacttgttagtagaagtagatgagtgcctgctgggtctgactaggtttatccaacagttcttttcattatcatgtagtatgagacaaccaatctatcatgcataacacttgtttgatagcaagccccatttcttggtaatgagcaaactgattcactaaaaggtacttcctccgtttcaaaatataagactttctagcattatctacattcatatagatgttaatgaacctaagcgtatatgtgtgtctagattcattaacatttatatgaatgtgggtaatgctagaaaatcttacaatatgaaacggagtgagtaaattgttcgtctgtgcagtattctgtgttgtgtctagttgtgataagtatgaattagtttttacgattttgcatcaaatctatcagtgcaggctttaggtttgcagaagttctctacgcggttttactctaaacagcaagcaactttatctgatatttaactttgcattaacttgctagcaaaataataataataataataataataataataataaagaaacttagcactaactagttccttttgtttgtttcttatagatcgtggatcttgtaagaaaagctatgccactcgcgctgacacctgaggatgatccaagaaaggaagaactcaagaagctgcagacacagttggaagatataaacaagctcgcacacaagcaagttcgtagaatcctctggtctgggctagggttcttgatcacacaggttgggctctttttcaggctcaccttctgggagttctcgtgggatgtcatggaacccatcaccttcttcaccaccacgacaggcctggttgtagggtatgcctacttcctcatcacatcaagggatccaacttaccgagacttcatggagaggctgtttgagtctcggcagaagaagctgattcagaggcagaacttcaacctggataggtacctggagctccagaggcgctgtaaaggtcctttggagaagatgtgtggcacaaaccaaactcccaaccctgacatggctcaccttcacgagttgtccgttaacaaatgacaaccttcgctcaaacactaatctaccattgcttcttttcttgttcaattttcttggagtaatgatcaagaaaatactagcaaagctgatattttgcattgccgaggtggacatatttcttttgcgaccctttttatggtcttccattatgcaaatgtgtaggtttaatagctactataatccttttttgtaacaatgctgaagcacaagcacatgatagttggaaggaaagctttacatgtatgatcatatgaccagaagctttaccgagagctgtgtatctctgcagccactgctaatctactgtgcaatgtggacagattcattagctttatggtctttttggtcgatttcgaatacttgccatatattttctgtattgtgcctgatctgctagtgtgtgatggtgattactgttcaaaacaggacagaacgataccagggcattctgatggtgtgtttgatctcccatgagttgtaaactaccgtgacattaccatacaaatgcaccttttgaaaccaaagcaagagagaactgcgattcatttcaagagaatgcaccggccggtcctgaaggagaactccacaaatgggaaaaagaaaaagaaaagaaaatgagaactccacaaatggtcaaccagtctacatgcataagctgaaaataaaatagtctgatcgcaatcaggctgagattcattttctaatgaagggccttgcagttttgagccgatggttccatgtgatgaaagcaatggtccaaaagcagacagggtcgtcgagcctgaaacccgatgcccgcgcacggcggatgatccgctccgccacccacaattcttgaatataatgccggcgccggcgaggcgtaggccagcatgtcccgcgcctccacggctctagcctctagctctactgaggccgagtttagctccaaactttttcttcaaacttccaattttttttatcgcatcaaaacttttctacacacaaactttcaactttttcatcacatcgttacaatttcaaccaaactttcaattttaacgtgaactaaacacaccctgagactgagttcagaactccacctccccgtactgaaaatggtgttacccattaacacatttaattaagcattaacctaataaacttaaaaatagattaatataatttttttaaagcaactttactataatttttttttaaaaaaaacacaccgtttagcaatttgaaatgtatgtgcggaaaaataagaggtgagttagaaaagaatagggaagaactcagtctgagccgcctggccaggtgacccaagttgacatcagtttttggtttaagtcaagatacttaccctgtttgcgcacgaagatgcctggcatgatacggcggccgctgctgctaagcgggacgtcgctttcttggaatcaagatggcaagattcaggaatcaagaattccagatcgctgtgcctgtttctgcttggatttgtctgatagcgaccttcgtgtaatcgcattggattatgtttggctgtttgagtttgactgagatatgctcgagataatcaattttgcgctttctgcccactgctgtttggaacttcgtggtatgcttagaaaaaacaggggacgacgctcaaatgtgcaacacgtttaaaacatatcggttcctgaagactgcctttgggtgttttgggtggatcagatactcgaagttgactggccgaagttgtgttccaacagttacaaagaaaagagtacaagaacaggtcgtccttaaactgggaggcctgtgtgaaatttaaaccgagccctatttaagtggcaaaaataaatgataataattcatatgaattcatgatatattttatagcaacgtaaaatagaacaatattttacgatgcactgttgcacttatcaatccatactattttaaaagactttaatggtagtgaactgccaccaccatcctatcgtcgacgtgtgggtcctaattatcggtgtgtagcatgtgccctttagattcaaaaactgccttctgtctctcatgggaaccagtttctctgacgttactgcacagcgtgacatgaacactaacatgtgggatccattatctatggatccacatgtcagccaccaaatctctctaacatgtcagaggatctctctcctccctcgcgtaccttgctcacatttgtccgctcacagactgacaatggtaggcttaaggctagcagctagtccccttgctgaatgattttgttataggcactaatgttccaatcactctgtaccaaaatatatcatagccgaataaatattatttataaaatcaatttattttgaaagaccttagtacacattttctccatactcgagacaatcaaagtctacacagacgattgtagcactataatcatcggcaaggcaatcaactttattataatcaggagcctctaaagtgcaatgttcagtgacaaattgtcttcactgcgatatactgacaataatccgtcgcaacttatgtgtattcagctagtatctaataatttagtaacactaaagtattaaacgaaattaaaaacaaaggtggcgcttgccgctggcggccttgcgtgagtcgtattctccgtggtctatgcagtcacacggcactacatgacaacgtcatggagtatatgtagaaacaatcagatatggactggagcaggctgctattgcaaccagtctttaccttcgaatcataggttagtgacttaggccgagtttagttgcaaacttttttttttaactttcaacttttccatcacatcaaaactttcctacacacaaacttccaacttttctatcgcatcgttccaatttcaaccaaactttcaattttgacgtgaactaaacacacccttatcttttttgcaacacttcatctaacccggcgattccggcggcggccggtaggatgacaacaatagcagtggaggggccgagacaaatgtagtggtacacacgaattgtagcgatatttttttcaatttgataaagttttaatgatatgaatctaattaacccttaaatcatatatgtatggagcagaatacatattataaaaaatgtgtaatcttcttgctaagtacattttatttctaagttaacacaaactatgggattgccccacggcaccacgtgagctagataattcgagcccatttgataaggctccaacttctaaatttaacttcaggaatagggtctaaagtaaagttgcgaagaaacctaaattcagctccatctatctagtttattttgttagagcacttcagctagctccacttccttcttcggtgaagctaaacggttgggttccagctctaggagagatggagttgaaactagacccatgccaaacaagccttagatttaatatacaactctgaaattttatttctactagaaaaaatgctcgtgcgttgcaataggtgaagtctattttaatcttattattgttatatggtttagttaagatgaaattcactgtgggagtttgcttggatatatatatttttagaaaatcatgagctacagttaggagtccgatcgtctcaagttagcattcgagttttttttaaacagatttcttatatgattccttctgtattaccaaaagtgaatgatcttaaaaaccgacttaaatacggatatgtatttccaaaagcaaacgaacttaaaaacctaaacgaattaaaaaaccgactcatacacggatgatgtaccaaaataccggcaaaaacatcttcaatttttataatagtaaagatatagaaatcattatatgtagaaatatatttggatttcatatacaactattagcttctatttctatagacatagatttcatattaaacttttaacttctatttctgtagatataattgtattttatatacaattatattgtattttatatacaattatatcaagcaatccataccgttacaatccggacccaccatgatttaacgattaagatctttttttcttcgattaatgtggaaatatgtagtaaccacaatgaatatgatgcgctctttcaaagctgttttaataattcaacaaggaacttgagcaagagaacatctcaatattagctagcttgccagcacaaagaaaaaaaaaagaagatttagccaatcccagttctctgatctctcaaagcagtgagatcaccattttcatcttatcagtcatcaggtctatcatctcgacctcctcagcgcgataaagaacttttcagtgcaccaaattaaaaatgatttgtaaaggtaatattggtgggaaataaaccaatttcgatctaaatatcatgttgtttcttgtggtccaaagcaccgagcaaatatcagctaacaaagcggtaaaaaaaactctgatttttgaatggttagtgtttttggttggcataaaaaactcacggaaatccctgggattgatgcccattagctgggtggcccgcccaattgcgcggctaacacccaaacaaaatcatatatttttttaagtatgattttacttaaaatttattaaatagctatctcattgtcttaagactttgagagaccaaaccttatcatcctcgtgtttctaattatatagttcttaaaagtcacaccagttgctaccccttatgtcatctcctttatttgcttgctcgatctaccactatttttattcattctttttggaacctttaaaaattggattttatagtttttagagtttattgtcacgttgtgtttcatttttataatttctagatgtcccgtcaaacgttgccattatactcctctacgggctgtccactgtctcttctctttattgttattgagattttaaaaatcgaacataattatcgtttgggttcatttttactttctagaagtcctgccaaaccgtcagtagctttgccattgtactcctctacggctcgcccgctgtctaccttctttattgtcattgagattttaaaatcgaatatgattatcattgttttttttactttttagaagttctgaacctttaaaagttggacttgtagtttcattttttataatttttagaagtcctatcaaatgatgccactatgcccctctacagcatgttcgccgcctacttctttattgttattgtgattctaaaaatggaatataactatcgttgaaatttattttttattttctagaagtcccgtcaaccgtcggtggctctgcaactatactcttatacaccccgctcgctgcttctcctttttattgtcattgagattttaaaaatcgaatacgattatcaatgcggtttgtttttttactgtctaagaagtctcggcaaccgccttactcatttgcttcacggcctgcctgacgtctcttctttttaatcgtcattaggattctatttgatgttttattaacaatttttatatgtcgtatcaaccgccaccactccactcctttataggcctgttacttaatttatctcgtcatatgttttagatggtcttttctttcaataatctttatttttatcaaaaatttttagttatttataaattgtattcctaattgaaatcttatttttctttttctaatttcagtatttttttaaaaaaattagttaataccaatatgttcttttaatgtttttattttttattttcaatttcagttgtttcaaaattatattcctaattgaactctcttttaatttttccaattttagatattatttttatttttattctaaattttaattaatctcgtattgggttgttacgtagatttttcgttcaatattgcttatttttaattccgaatttaaactaattttaaattgtattcctacttgaactcttattttattttcttttgctaattttggatttatttatttttattccaaattttaattaatctcgtattgggttcttatatgaaactcttcttttaatatttcttatttttaatacctaatttcatctatttttaaattgtattcctacttggactctcatttccttttctaattttggattttattttatttttatttcgaattttgattaatttcgtattgggttcttatatggaaacttctttcaatattacttatttttaattccgaatttcagctatttttaaattgtattcctacttggactcccctttccttttctaattttggattttattttatttttatttcgaattttgattaatctcgtattgggttcttacatggaaacttctttcaacattgcttatttttaattccgaattttacctatttttaaattgtatttctacttggactctcttttttttttcctaattttggattttattttatttttatttcgaattttgattaatctcgtattgggttcttatatggaaacttctttcaatattgcttatttttaattttgaatttcagctatttttagattgtatttctacttggactctccttttctttttttttctttttctctgattaatgtgggaatttctagccccaacagcgaacgtggtgcctccttttctaaattttaattaatctcgtattgggttcttacgtggattcttcgttcaatattgcttatttttaattccgaatttcaactaattttaaattgtattcctacttgaactcttattttattttcttttgctaacttcggatttatttatttttattccaaattttaattaatctcgtattgggttcttatatgaactcttcttttaatattccttatttttaataccgaatttcagctatttttaaattgtattcctacttgtactctcatttccttttctaattttggattttattttatttttattttgaattttgattaatctcgtattgggttattatatggaaacttctttcaatattgcttatttttaattccgaatttcagctattttaaattgtattcctacttggactctcctttccttttataattttggattttattttatttttatttcgaattttgattaatctcgtattaggttcttatatggaaacttatttcaatattgcttatttttaattccgaatttcagctatttttagattgtatttctacttggactctccttttcttttttttttgtctgattaatgtggaaattttttgctcccacagcgaacgtggtgcctcctttcaaagctgttttaataactatttttagattgtatttctacttggactctcattttcttttttttttctttttctccgattaatgtgggaattattagcccccacagcgaacgtggtgcctcctttcaaagctgttttaataatataatagatagatagattaatacctgaagatgttgtccctaaaattcaaaaagcaaaaagatagagaagaagatatggtacatttatggattcctaagtaaccctgcagatgaggtacctctaccttttcgatcaaaggcttcgttcgagaagacagattggctaatctttttcgccgcatgcaaaacgagaataatcattagcatgactaattaagtgttaactattataaacttaaaaatatttttttcaaaaagagaacttttaaaatatacaattttgcacagaatatattgtttggcaatttgggaagcatatgctaatga

SEQ ID NO: 17293 - DNA, 1923 bp, Oryza sativa
tggcgcgtcgccggctatcacccacgatccagcctcactgctcgacttgagtttttcgtttcaatttgttatcaataatcaatatatattagattgatttctaatctcagattaatttcttgctattttttgttgttgttcgcatataattacgcggcactactgaggcgaacgatgttggtcatggactcaaggcatctcagctttccggtcaatcggccgcgagtccactccgccggcttgtcctcgccaccgccattgctgatatcaacaacgacttcaccgccggcttgcctccatcgccgccgactggtgtctccgcctacacggctggcctattatgccgccgttgttgggcgtctacgacttcaccaccggcttgccaccgtcacggccgactggtgtctccgcctacacggctggcctattatgccgccgttgttgggcgtctacgacttcacagtcggcttgcctccgtagccgccgactggtgatctcgcctatacggttggttggtcacaccgctgttcatgggcgtccacgtcttcaccgaccgaccgccacgtctgccgccgactggtgctttcgccttcacagctggcctattatgccgctgttgatgggcgtctacgtcatcaccaccggcctacctccgtcgccgccgactggtgtccccgcctatacggtcggttggtcacaccaccgctgttaatgggcttcatcatctacaccactggcttggttccactggcgccgactggtgtttttgtcaccattgatggactgctttattcccacatcggctacttctgctgtcatcgagggaatacgacaaagctaagtcatcatttattttattctttatatgatattttgtcttttcctttgcctcactacatcaactggttcgccgttgactagtgagtcgggggctatagatgttatatcgtattttttaaacaattttcataatatttatcttgattgcttgcgacataatctgagtacaaaagtacctatcgagttatggagttctatcttcctatgctttccgtttggtttgccaatggatggttgcctttgggccgattcctagcacccgggggctcgttggatggaccgagtaacgcaaggtgctaagtattattcggaataaatcaaaagcatagagatgagataaatttattttctgctcttaacaattgcaaaagtacccgagtagtaaactctgatccgtgaaactttgttccattaatgacgaactcatgtcactcatatgcatgtttgggaagtgcctaggccgactcccgatgcttggtggttatgactagtcgggcagagtgtttaaacgtacagagtcatctgctcggggaaatcaaaattgacaagaggagaaatacatatttataaatattttaaaatacttgattttttctcgagtattatatttatatcagatactactcatcctatatgtttgttctgcaggatccagatccagatatgcataaaagggattcatggctttaagcttatctcttacgctccaggaatggatcagtcagaacatcaccaccggctcgcctcgaccgccgccgactggtgtttccgcctgcacggctggcctattatgccgccgttgttgggcgtctacgtctttaccgaccggcttgccttcgccgccgccgactggtgtttccgctaggggtggatatcgagccagctcggctcggctcggctcggctcggtaaagctcgttaggataacgagctggctcggctcggctcgttatcctaacgagctaaaaacccagctcggctcggctcgtttaaaagctcgagctagctcgttaagctcgcgagccaaaccatccaaaaactgcccctagccctcagcaacagccaacaccgcaagcagccaagc

SEQ ID NO: 17294 - DNA, 2129 bp, Oryza sativa
ccctcagcaacagccaacacagcaagcagccaagcatgcaatgatagtatgataaatggttacatgaaaatatcaaagcaacaaatcacattcacatataagtaatctactcaaagtcttggattaaacacatttcacaagtacataaacgtccacactccagtactccacagtcacaatgacacattctgagttactgacatagtgacatacatcatcagttcatcacatattgcaattaacttcaaaatagttcaacaaaagactgtaattaaacataggttcagtccagtacaataatccatgcttcaagttcaatagttcaatacttcaatacaccaatatttagcataagtgcataactagtaaagctgcagcctgcaaggttcatcattttcatgatttcatccaacacagttgcacataaacacaaaacacaaatagcatggcaattggcagctccctttctcccatagtcccacactccctttctcccatagggtgtaggcttgtagcctgcaggtaaacaaattatagagtatgatataaatgggtgaaagtcataaacttattaaataaatataaattgtccctactagttgcttgccaccacacaattggggaagtccactatttcgatgtcatcatctccattttctccctatgaaaacagtccaaagtgaacattttatacaaaagacttgacaaaaataaagaataaaaaataatcattgcattccataccacagggataggtgcactattgtcattttgagaggctcttatccagcttgaagcacaaaccaaagcctgaactgtttctggcttcaaagaactccggtagtcatcaagaattcttcccccggtactaaaagtggactctgatgacacactgctagctggaacagccaagaacctctttgccatgttggacacaacaggaaacctatgggcatttaccttccaataattgagtaagttgaaagtgctatcttcgagggacacatttggttcatctagatagatgagtaactcagactttgaggattctttagcatttgactgcaaaaaggattgaaatccacttggaataattgaagccaatgaggtggtagtagagattgaggatgaggccgagtgaccattgtgtggactgttcccaccttggttgtggcgacatatccgctcatactttctgtagagtttttccatctcatcagttatggcagcaacctctgttacacaccttgtctcaccaaaaaattcactgaagcaccatctaatgtacctcattttgaacctagggtcaaggattgtagcaatgatcatgatattgtttgtgttctcccaatatttattgaatttttccaacattgcatcagccatagtcaccagcaatacatcattagggtcaggttcataaagtccagactgctgccctaaccttgcagcttctaacagtgcagtttgtgcttgtgctctagaagctaatattgcaatcttaactttagctatgtatggatagaaaacattggcagtggggtaggttgaccctgaaaatgcagtggttgcaccagacattgttcccaagattggctgaattttctcaaacaaatcccattcagattgtaaaggtagccattcatatttggtgtctgattcagcataataatcaaaaccatttctatactcaatgcatgtctctagcatccgataggtcgaactccaccttgttttaacatcaatagacaaccctctaccaactttaattgaataagtgttgcacacacccacaaacttatacatacgggctggagacttcttaaagtacttcacagtgttcctaacattggttatcaaagattgaatttgttgcaggccatcattaacaaccaaattaactatgtgggcagcacaacgaacatggaaataatctggatcaaactgagcattctttctagcagcaagcttagacttcaaatttgaaacagcggtgtcattgtttgaagcattatcaagggttattgtcatgacctgtcctctattttccaatcaaccaagcaatcaaaaatagcttgagctatgacaataccggtgtgaggaggcctccacctaaacaaatttaagac

SEQ ID NO: 17295 - DNA, 555 bp, Oryza sativa
cctcgggcctccgccgcttccgcgcgagcaccctccgcacgcaggacggccagaggttcgcggagacccgcctcgcctccatccctcgccgccccgccccccgccccaccccacctcgccgccgacgagcaaggctcagacgcgggtgggcatctcgccggaaatcgaatgggggttagggttcgaggcctcggctcgcgcggagtcgagctggcgcctcctcggtctcgtgctacactgtggttgccatcgaagtggagtagtaggtgtgcttcttttaatttggagtacagtgaaaccgagagcctaaatggaaaattaccttcgccgtacaatgtccgtccgacggtatggattccataccatggaagggctttttcgatgggtgagataaataaaatgaaatgtaaggtctttttccgaaaactcgtgtcatgcctcgatcttagccgcatatcgttcgtctgacggacaatgttagccatcaggaatacttgcaagttgaaggaatagaaaccttttgcactgttgaccatctttgtagaataagcgaaa

SEQ ID NO: 17296 - DNA, 6547 bp, Oryza sativa
aaagtcaaaataacttagaacctgaaaaggaataatcttttttgacaaaagagtactattatttactccgtgttaatactaaaacaatgattctaaatattttaaaacatctatattctaatgttttggacctacaataaatttagtcgcatgtaggttataatatcttagaacaggttataatatcttagaacaaaagtactctatccatttcatttcatattataagatattttgactaaagtcaaactgctttaagtttgactaaatttgtagataaatatagttatatttatattatcaaattagttttattaaattaataattaaatctatttttaaaaaaattattttgggtcaaaaatattattattatttttttataaacttggtcaaacttgaagcagtttgactttgaccagacttaaaacatcttataacctgaaacggagggagtagtaataaatttcttccatatgccattatgcaaatagtggtaacaatatgctaaatagtcaaaacggtgacagagtatgacgatattgtttatgctcatggcaaaattcaactctaaaaacgtggcatccaccaaagggggaaaggaacaaaggcagacgatgtagtggtggaggttagttcttgtctttatttcagaaattttccgtttaatcccatatttgttttcttaatttttgtgggggagcccgtctttgtatctttattctgttttcaaaagtttagtattctgttttctttgtatggctctatctgttgatgtaatcgtctgaaattaataaaagcttcctttataaaaaagaatcgtattcgtccatatatgcaaatatacttgctgttgagtactcaacgccatcacaaattatataagagcatgtacaacggtttttattagtggtctctctctattaccatgcaagtaagtttggtaacatggaagaaagagaaaagaggaaagagaaatatagttgttatgcatgataataactgttcagcaaattttgttgcatggtggtgaaaaaaagaaaagaagagtaagaaaaagtattttgatacattaatagtagagaccatattatcttcaactgttgtaggacgttagtctctagatagtatagagcttatacctgtctatacctttgtacatgcttatgttcatatgcaaatagtgataacatagaataagcaataatgcaaatagtcaaaataattgcaggacactgttcatactcagaccaaaattcaacttaacgtgactcctactcagggaaggaaagaaagacaaacgtcatgatggcaggcgttaacactttgtcttcccttttatttcaaaattgtccttcgcccgtattcgtttctaaattttgtttcaaaacgctcaagactagagtttaaatcttatcataccagattttagaaaacataggtcacgtatggagagctagaaattggggttttagcacctacattctcctaaaatttacagctttctaaaccatttggattctcatcgaccatacaaaatatgtagtgtaaataacatataaggtgtatggcaaaatctattgaagagaaagtatctctacaatcagattctcattttttgtcaggtctcataaaggtcaaagataccttcttagatatgagttcttatattgtaaataataggaaacaaataaggttttgggaagataaatggctaggaaatctggcttttaaagacaaatatccatctttatactctattgtccgaaggaaaagttctactattgctaattttatgagatatgttccactcaatgtttcctttaggagatcattagttggttagaatcttgcatattggcatgaattgtgtgcttctattgtacatattcaattgaatcaatcctctgatagctttagatggaattatcatcagaatagaatattttctgttaggtcgatgtatctagctttaattaataatggttatattaagagaaacaagattatttggaagcttaagatgccacttaagattaagatttttatgtggtacttgcttaaaggggttgtgctaaccaaggataatttggcaagacgaaattggaatggcagtttaagatgttgtttttgtatgaaaaatgagactattcaacatctttttatagagtgtcattatgcaaaatttgtttggagagcagtacagttctctattggtttatagcttcctactaccatatctaatatgtttgatggttggctcttgggggtagacaagaagaagagtaaactcatacttgtaagagcttctgccatatgttgggctctgtggttgactaggaatgatatggtttttgacaaatcatcatctatctcatatatgcaggtaattttcagggcaacatattggctccgattttgggcacagctgcaaatgtgtgaagatgatcgagagcttatgaaggttgcatgtcgtaggcttgagacaatggtcatgcaactccttgcaaactatggatggagattcacaaatagacttgaataaatgtgctctccttatcttagtttgatcttttattttgtgggttgtgtttaattcatttgaactacactcagtgtttgggtgttacttttgtaataattgactgtaactctgatgagcaaaggccgggatgttttattccattatctaaaaacaataacttatatattgtggaaatttaaaaactatcgtagataggatgtgaaaattaaaacgtatgatatttttttacacgtcaccatgagtgaaaattaaaactgactcttgaatttacatcatactaagagttaatttcacttgtaatgatgtagacgaaatctcaatcattcaattttgcatcgtacagtagttttttaagtttctactacatataattttgatcacatattttgccctgccaaactttttccaggattgatttctatagctatctacgcgctttacctgaccatccggacgatgtttccacaaagaaagagaggggaaagcgagattcggaggccaaagaggaactaccattaacagcaggaggaaaaaaacttggaaagcgaaacgctcccggacggagtccactactggtcgacacgtctttgacgctgcgctcgcatgttccgcggctaaggcaaagctcacgcccaaacgcttggccattttttttctaccaccacacactgccactgccattgtcacccctaattgtcgaggaggtttcatcagatccactaccaaccccacaaaggcccgaagcaccaaactaccaatccacaggttttataacaagagcaaatgatttgattcgttcaaaaaaataacaaatgatttgcttatcgatccacgaaatgcacgtggaagtccacgaaaattgctgcaagttgccgacagttcgatagtacaatattactgtgtgtctgtaggtaagcagctccaagcgaggagtgacaatgctgttataagatagtgtacagttgcctggatggacgattaaaaagaggagaggttagaattattgtagtgactgcagtatgcaggctactctacaataaagttctcacactcgcaggcaattagaattgaaaagatatactactaatgaatagaaaacgcccaaatgtaatgtaagtacaaaggatgtttaactttgatttgtcgaaagttagacgcactaacaataaaagtgaacaaaacctccttccaccttccttgtaagttctactctgcctttccgttttcactttgctgtctccttttagacagggtcttcaacattcccttgaatatcttccagaaccaaaataggttcatcactgccagcgccggtggcaccgtcagtatactgtagaagcccagggggaagatggacttcacctgaaagtatggcatatgcgtacagagagcattagaacagaaatgtaacaagaaaaatattgccggtaaaatgtaaaggtagatgaatttaatagctatatttgatttgattatctgggaaacctggtaaagtcatgcatacctgatcaaaatggaagtacatgtgagtgaagaaatatatgaacaagattacccgagcaacctgcaaaccaaccaaaggtttgtaaatcacgtgtttcaaaagagcaataggagagctgaaaatttgattaattatttaaatcaagtcatcatgggttataccagccatccgacaaacagagccaatccattgtataagtaaaggttatgcgtcttcttaccagcaacctccaaatacctgcagcagaccatcatgaattcagaatgagcaaaagcttcatcaggataaacagatttaatagaactggacattaccatctaaggttcacaaagggagtggtggcttcagtaaagagaaccatgagtatgtacatgtgtgctttgccactcaacagagcaagacagattgcatacatcgaaagtccatgatgcaggagctgagataaaataaatcctggtcagggagaaactgagacaacaagttttacagatagccagtatattcacgtgcactcactctaacagtgtaatacttacatattcctttccacctaaagaggggaaataccacagaatcatcaccaaatctgtcaaaaagtaaccaatcgagacctgcacaatacatgaatttaaaatgatacattatacggttatcatttgcatgttgtgccacttgatgcaaagaacaatatgaagaacattttttagattttctttttattttgttctgaaaggtgtgcataattaaattatatgagaaaatttaactttctcagaacagagcaggaaatgaacagcttaccccaaacatggcatcagatagccatgagtttctatcaattattatgttgctatggaagaggtcagatatcacaaccaggtaaaaagaaacaacagctgcaaccaatgcatggaatgtagagaaacccctatcaacaagtggcatcatgtagttagactcaaaatggaaaacaagcaacaataatgacagcagataaataacaaaaattgtgttggagaatatcttacctattattccattcaacctttttcattgggcttatattgtcataacccttgaagcaatgagagctaaccttttgagttatgtcatatacctggaagggcaaaatgatgagtgttggtagcaagatacaatgaattctaaaagagataaaactatctgcttcaacattggtagcaagatatagaatatcattttcagtttaggagacagtagttaacgaaaataagaggcagctattgccaccattgactattgaatatatgatatgtaacctaagtaccactcttattcacataagacataacccataacagagcatatttttcacacacctttgatgtgaaggaggatggcgtatactatgaagaggatatcacgtctaatttcagcaatctgtacttttaaaaataaattagcactaccatgtgatctagggaacaaactccgcaacttctgcatacggataaatattcccctttgcagatggcatgtactcgtttatatgcttcatagaacttacattgagatctgtaaatctcaacaacacaaaggacaatgctcaacttggttaaataaatcgatacatgcatatatcttgagcagatttcttttgttaatgcgtgaatgtatctccaactaacctcacattggaggatgcatgtctaattgagggaaacatactaccttgcataaataaattgcagcataagttttcatgatattggtattaggcacattgagaaaaacaaatacttattccttttcgtgcaaaaaaaaatccttattcctaacagaactgaatgtgcccggccaatgtttccttcttttccttctatgaagtacagtgcagagaaacagaacagaacacgacaaatgacgagaaacagtgcagactactccaaaataactagagaacctttgccagagcacacgagttatactgactgcactaactagagaaattccaacaggagagcagtaattacacgaaaatgagatatttcgcttaagcgaaaactattcaacaatcaacactgtcttgctcagctcagcacggttgaatgtcacattcttgcattgaacctacggcctatcaataccaggcagccacacatcatgaatcagttatcaccaattgacaagtataagcaccatcatccagacttccagagctgtggccacccgcattaatttcaccagctactaacctcttatcttcctaacgatattgacactttaacagtagtatttggacaacctccatgcaacacagaaagcaacatgcacaactaatttcatagagaaaaaaaacaaagagtaaatttcacaaaactacatattttttttatggttcaagttgcagaaaaccacacatattttgacacttggcacttaagtacatatattttggtagtttatttcacaaaaccacactatcgataaatggattcacttgtgatatgacgacgtgg

SEQ ID NO: 17297 - DNA, 2300 bp, Oryza sativa
gggtgaatctatacatcgatagtgtagttttgtgaaactacacgaccaaaatatatgtactcaagtgccaagtgtcaaagtgcgtgtggttttctgtaacttggaccacaaaatatgtagttttgtgaaatttactcaaaaacaaaaaaccgagaaaagcatgaacatggcatcaaactagcagatagggatgaaaacggtcggaaacgatcggaaaacagcctcaaccatttccgtaaccatatttttctcggaaacgaaatcggaaacggtaaagtcggaaatgaaaacgatatcggaaatatcggaaaaccggaaacggaacaatacggacggaaacatgtcggtacagatcggaaaccggtaacaaatacggaaacattaaactataaaaacatatatttaactttacataagtatgttatatatatacataaattcaagcttatactatataaattataaattaacttcattttagccatgtacaaaagttagagattttattgaagagtcattcaatctataagctgtgggtcaagtataaacatgtcctataatattgacatatttagaatacggtaattaccatattataagaaacggtaatttccgcaagaatacggtaaatacggaaacgatcggtataacagcaaaaccatttccgttttcatttccatattttttaccatttctatttttgtttcggtcgattaccatttccatatggctcggccggtagaaagtcgaaaatgaactccggtcggccggtaattaccgttaccgttttcacccctactagcagactaaaactgagcgattgaagtgctgaaaactaagccagaaaaagaaagagggttaacgggttaagtggacatcttaccgcggcgcacatggcgatgccggcaagaaccgacgccggccacagaatccgctcctcgctcccgaaattcccatccatccctcctctatccgctcaaatccaatctaacagagttaataaagagaagcgaaatttcaaaagagactcctccaagaaaacaacctgcactcccgaataatccggaaacacaccgctcgttctttagttctcttgcaaaagatagattcgccatgggcatcaagaatttggtgcgtacttacctggatgagattgggatggggagtgacccgcggcggtggtcgcgtctctcctcgtcgttcgcttttgcttctgtgcttgtgcttcgcgcgggttgggttttcttcctcgtcctgctcggctgctcctgcctcttcgttggggggttttaaaaggggaggagacacacacctcgaggcgagtggcacactagtacacgaccatctggtccatctcctaggcgctacgggggattgatttgtcctccttgactccttgtgcgtgcactcgtgctggacctggaccatgggagtcgtcattagaaatttaaacggaaataggatgtgacgtacggcagttttttttttttctctttcgacagagagtgatggtgcttttttttttccaatcttctttcacgtattttggtcgagctaagctagagcaattaagaggtgctttctaggttcatgtgcgatctcacctcctccatgtctgtcctaagtaaataaaagcacgtaatggtgaggtaccatatttagaattgaacataagagtgttgtgctagctagtgtcaccaactaaagcgcaatgcatcatagtatcataccatatgcagatatgctcttcgaagtcattaagggcctattcactttaatgccatttcaaatcatatccttttttttttttgctaaagttaacgaaaatgtgcatctgtttagtttcttatcaaactttggtaaatatactaaaaatttggcaactgcacagtaatgatcaaaatttagtagcatgtacgttggtaacaaagtgaacatattcaaaatagttatcttgccaaaatttgacaatattactaaccttactaaaattttattattgctttggtaaggtttgaaatggcatcaaagttaatacgccctaagccaaactaattgtcaaatggacctcttggcctcattcctcattttagcaatatacctggagagacgtgttagaggcatcagcatataaaaaataataataatgtatgacatgatgtgaaaaaaaatcattagtcaactatttcaccgaactctagaaagaacctttgcataattcaacatattataattattggcgtggtacagccgtacagactacaagattcacagaaaaaaaagggccattccaatgagta

SEQ ID NO: 17298 - DNA, 1750 bp, Oryza sativa
ccggtcgtcgttggattctgagctgcaagtctgcaacgtgggtggatcccagcgtgcgcgtgccgcagcgcatcctcaccgactacggtggaaaggtggtctagaaccctcaccaccggtggcactaggacgcccaggcgagctcggctccatgactccggcaacctcgtgctcgagaactacagcggcaacgcggtgtgtcggtgtagtagagctttgatttttccaccgttgccttggtactcaatatgtactagcttgcattcagattgcaatatgtaccactccaaataaatagatgcaagaaaaggcaacagcagcaagtggtcgtgctctagctgctccgggtggtggttaatgaacccatccataccggacctaaccctcttgtggccgggcatgacggatggtgccgagtgccgatgaagccaccatcggaggcactgggccgttgtcgttggagccggcgaagagcgaggagagatcgccatggccattggagctgttgcagcgctcacacgtcatatcgcggagggcggcgatgccggagatggtggtgcgtgccaactggagcgctcgctcgccatggggtagcgtccgtcgattaattgagataggggcaaaatagtacttttcttgttgtttctcactcaatccacactggatataataaaataaggtgtttggtgtccagtagctaattaacaggtttttgcagtgtcctatagctaattcacttatttgcagtgtctcacggccaattacacatcttttaagtgtcctatagcaaattttgcctttggaataacttcaccttaagtgtctatcatattttgatgtcggatttaaattacatcattaacccaatgtatttgagatcctagttgatttaaaacttttaattggcatggtgagttgacaacaaccaacacagctgagtcagcatgggctccatatgtcagtggccaactcttcttccccctatcccctctctaccccatttctcattcgaccatctctcacccaacctattgcttcttcttcgggtcccatctccagcttcgtcatcatcccatctggtgttgccgcctcctcggcttgctggtcaacacgaagaggaggtcaataaggagacggatgagctctgtaggccatggagcgcgagacgtgagagtagaggaagtgaatagctttttgttcccctcgtggatgtaatcagatggcagtgaatggaagcaatcagcacagcaaggagaaggggaaggggaagggccagctgccaccctccaacggaaccatcgctctagctcaagctcctcacttgttgctgccgcccttcaccggaaccactactccaactctagctcgagcttcccactcactgccatcgccgcccctttcctcttcggccatcgtctctatccacgcctctcatcctggatttatggatagagttgggaaaagaggggaaggagggaagaggaggaagaagaggctgctgacatgtggggcgcacgtggtcccacgctgactcaactgggttggctgcaaaatcaaaaactacactatcctgggacctcatgtataccgattttgtaagttgagagacacattttatctagtatcgcggtcaaaggacacaatttaaactggatttttcacatttttgtccttttgaaaaacttatttcgcaaatagacccctgaaaaaacttatcctagaaatggtcctttttggggcgccagagtgg

SEQ ID NO: 17299 - DNA, 1446 bp, Oryza sativa
attcacggcgtgcatgcgatggcgatgaattcaccggcgttgtcagcgtaggccggggtggtgctcgggccgtcggtgatgggcaggtggaagtctgggcgaccatggtgttcccgcagcgcagcctgctgacgctggagacggtggcgcacctcggctgctctacttcctgttcctggtcgggctggagatggacctggacgtgatccggcggtcggggaagaaggcgctgttcgtcgccgtggccggcatggcgctgcccttctgcatcggcatcgccacgtccttcatcttccggcaccaggtgtcccggaacgtgcaccagacctccttcctgctcttcctcggcgtcgcgctctccgtcacggcgttcccggtgctcgcccgcatcctcgccgagatcaagctgctcaacacggagctcgggcggatcgccatgtcggccgccatcgtcaacgacatgtgcgcgtggatcctgctcgcgctcgccatcgccatctcggaggtgaacagcaccgcgctgtcgtcgctgtgggtgctcctcgccggcgtgctcttcgtgctcttctgcttctacgtcgtgcgccccgggatgtggtggctcatccgccgcatccccgagggcgaggtcgtcagcgacatgcaggtctccctcatcctcaccggcgtcatgctcgccggcgtgtgcaccgacgccattggcatccactcggtcttcggcgccttcgtctacgggcttgtcatcccgggcgggcagctcggcgtggcgctcatcgagaagctcgaggacttcgtcacgggtctcctcctcccgctcttcttcgccatcagtggcctccgcaccaacatctccaagatacgcgaccccatcaccgtcggcctgctcgtcctcgtgttcaccatggccagctttgccaagatcatgggcaccatcatcatcgccgcgctctacaccatgccgttccgcgagggcatcgcgctcggcttcctcatgaacaccaggggtctcgtcgagatgatcgtgctcaacatcggacgtgacaaggaggtacaaaacacatactagtatttgacacacgttgatctcctcctcttctaagctccgtaatggccgccaatggcgttcgttgtaggtgttggacgacgagtcgttcgcggtgatggtgctggtgtcggtggcgatgacgacgctggtgacgccggtggtgacgggggtgtaccggccgtcgcggcggctggtcgggtacaagcggcggaacctgcagcgcatcaggcacgacagcgagctccgcatgctgatctgcgtgcacaccacccgcaacgtgccgtcggtgctctcgctgctggagctctccaaccccaccaagcgctccccgatcttcatctacgcgctccacctcgtcgagctcaccggccgcgcctccaacatgctcgccggcgccgccg

SEQ ID NO: 17300 - DNA, 738 bp, Oryza sativa
caacagttgcaatcaggccgaaaggtttgttttgaaagtatgctattcagcttttgcattttagcagaacttctgttcacctatagggaagcatttcacaaagtgcattgaagaaaagcctatgaactgctcaccattagtttcccatcaaacacaggcaaggtgtatagaaaacatgcagctctcctaaccattgaccaaatatattcgaagttttgggggcatagcacttcaaatcaatttttttaaaaaaatctcttccaatgaataaaaaggcaaagcataatttaggttgtacaaatgtgaaacttaatcatgatcagcaagcaagaaagattcccttacctgatctttatttcttgaacattcttatcagatattgtatacaacaaagtgtagtttttcaagtcaaacaccttgtaagtactggttggaatgagaaaggaatgtcacaattcgaatgaggttaatcttctcgccttcaaagaaattagagctagaatacctgtcttgggcagaataagtcagcaccttcccgttaacatcatcaaattccacaaaacctggccatttcaaggactctgtctcgaaaagagggaaaccagcatctggcttcccccgtcgtatataccttaaaagacaaaataataaaaagattcatataaacaatataacactaccgtagcagaatcacaggaagacaagcttactctattcgagttgtcctgcatcttaagg

SEQ ID NO: 17301 - DNA, 671 bp, Oryza sativa
gttggtggtgatcatcatcggggagtagcagaccaccgagctggtggtcttggggcgcgccgcatcggtgatctgcgacgtcacgttcgtcggcaggtcgtcggcgatcagggccggtaccgtcgaggccatcttggcgcatggcacgtccgcacgcacgcacgggggcccctcaccggctcccctgctttgtgttttgccggtgttggtttcaggggagatggtggttgtggcgacgaggtcgagagatggcccgaatggagggaggaacaggtcagagggggggtcgatttcgacgtcgtgctgctttcttggccggtcgcccggggactttggagttgtggagggtctccgatttttcatgtccgcgttgcgtggtgctcgttgaggccggaaattgcatttgaagcccaaatctcgtgttatattttggcccatgcagcccacgcgttctgtacaaggcccataccatgcatgcatggattgaagacgtgccacatggcccaaaaacaaccctttgggccgtggtcttagggacacggaaaatgctgcgaatatgttcactttaggtcctatgtaggccgggtttaaattgctggatttttcacattttggtccttttgaaaaacttatttcgcaagtagacccctagaaaaacttatcccaaaaat

SEQ ID NO: 17302 - DNA, 37253 bp, Oryza sativa
acagttgcgcgcgcgtacccccatccaccgcgagtcgccgtcccgtcgtccggttcgcggtgtgcggcgcggtgcatgcatgcgatcgagcgatgggttgggcgtgtgagtgacggagagcgacggtgtcgggggacggaggctgtggccatggctttgtgggggttgggggacaggctgcctggttcgacgggggtaatccgaaagcgaaacgaaagcgtaccgcactgctgatcgatcgatcgatccgacccacactcgttttgatttaatcgcggctgggctcgctcgaacgccactgggacatcgaattaaggagagggattaagagagacgacaagaagacacaatgatgggattttttgcttagttggggtcctgcaatttggttgcccgcattaacccgcctgtcccctgccgccctcccaccatgtttgcacttgcaggcgatcgccctcgcccctatcggagtgtgaatgtgatcgatctcgcatttctcgcggtacgaccgtgttttggaccatgcatcatttgtcttaaccatgcaagcataggacccctgccgtgctggccgggacgtaccatagatgtctcccccagcactgcagagttcccagctgtttgggctagtttacctgctggagacgcctgcggcctgccatttgcgtacttcacaatggtcacattttctgtttcaatgtgtgctagtattatatatctatgcttggtaaaatatgatcaactcatcaacatgagaatctgagcaaaagaccctgctaattagttatatattttactatatagaggccactgtcgaaataaagatatatctttcgtctagtaggtttgatgataattgataaagtatttcttttccccctgttttatgaataaaacctgctactaattagatgtttagattttcctacagatgctacggtggaaataaaggtaggactatctttcttctccttttctttttttttttttgcaagaaaggactatctttgatcttagtactttcacgataaagtattttcttttcctttttctagattatgatgagcaggtctgcaggtgatcgaaagatgtttgcacgcattactagcagttgagagcagaagcaagtggggtgatgtgtgcactgagtcatgcaacctaaaaagtgtcagtttgaaaactacaaacaccattctaaaatccaaagatgaaaaaaagggagtgctgccactcatagaacttctcgagcgaagggtccgctggtatcgataacggcgagcaagggcttaatttcttaccccgtttgttgattgtgtctgtcctttagccatcgtctttctccatgaaaaaacaagactaatcattaatttatcagtgggtaagtgtgcgtgcctagctaattaatttatttgggttaaaataacggcatgaatattgtatccaaacaaaaaaaaatgtttcaaaatacatatagtacaagctttgccgaggttaagcagtgcgtacctttcttgagcaatgcaatgctggagtccactaattattgcaaatggaataacgtaattagcaccctaacagatatagatttttgctactgtatgctagttgttgtttggatttccagcttatttttcttgtcaaaagaaaatgtagcaaccttacttcaaatccatgatattttgcttagattcttcaatacacgtaccccccttatcgattacactacactattatacggtcctttagaagttgattgattaggccgggaattatggacaaaatcattgtgccataagcaccggtctcccccagtactgttcccaatcctaatcgagcatctcaccgagctaccaacggccgagggacagagggcctgattgctcaccggtttgatggacgcctcatcagcatgtatgtacatatactgctgcagactctgatgccccacctaaaccgatgtactacttctgtagaatgtacttgtatatgtataattaaatctcattgatagtattattaacataggaggaattaagtgggtagtttaatttgaagaatgtaaataccccttagaccatattcaaacggaactactattaaatcttcagaccaaggagtattaagtacaactactgtaagtcaggctttccgacctctcgtgccgcccctcccccacgggcgactgggaggcgacgacctcaccggcgctcgtctccccttccctcctcctctgcctcgccgccgcccgagcagccgccggcaaagccacgcggccacaaggacggcggcgacggggctttatcctcgcgctcaggcatgggagggggacctgctcgggggcggcggaaccggccagatccgtgccgcccggtaggatctggcggtggagcaaccggcggcggggctgaacggtgtggcggcggtgtctggtggtggtggcagcggcgtcaaggcgttggcggcagcggaggaaactgccagatccgcgcctggatctggcaggacggcggccggcggcgaggatagtgacggcggcaagggcggcgaggggatggcgtcggtgaggtgaacctggccgcgccggcggcggatccagcgcctggaggtctggcggtcgcgacggtggtggcgacgagttcgcggcgacagcggcgcgggctaccacggcgggccgtctgcgccgtgtgtcgtcggagctcgacgacggcgacaaggtgtgggaggatgacgagatggcggcggggatggaagggcaacaacggctattgtggtggcggcggaggtggcaaggggatggcgtcggtgaggtgaacctggccgcgacggcggcggatccagcgccggaggagtctggtggtcccggcgatggtggtgacgagttcgcggcgacggcggcgcgggctaccacgatgggcagtctgcgccgtgtgccatcggagctcgacgacgggagaaagggcgagaggatggtgagatggcggcggaatgaaagggcagcagtggctgcggtggtgccgaccgtcaccccggtaggggaaggcatggcaatctcgggtggctagccgggggcgtgccagacggccgcatccgccggcgcggcagtgtttggaggaggggttggaggccggcttggcgtagagaggcacaaccgatggcagcagaggccggctcggcgtgaggggcgcgagcggcggagatggaggccggcttggcgcgagaggcacggccggcggtggaggaggcgacctcggcgcgagggaggagctgccagtggatgtgggtggtctttgtcgctcgaaggctggccggcgggggggcgccggtgcagtgatcccacatggcggcagaggttgagtggtggtggattgttggtctagcagcggtcggtcacgcttagcggcagccggtccggtgctagccttctcccgggcttgtgtgttggcactgtcggtgtgtgggtggtggtatatttttttttcctggttacgaccctccagaattgtaatcttgtaatattttcctactctatcaatagaacttcgcaccgtctcgtacaagtcgttcaaaaaaaaatcttcagaccagattaactgactgtgtggcctagtgataaaacccggagatgtacactgtttgtattatctacagaaattaggtagcatagaaaagaagaataaacttcgtattagtaatacaagcttagctaacgtgtatcaaaatcgactgcacacaagcgtgggtgcacacttgattggttacagctaggacaaatcacacaagaaaatggcaaagtaatgttgcgaacaatttgatgaagtcaatcagtatacgtagtttctcaaattatggccacaaactaaaatacccacacttaccaaaattaatgaccaaaactttacctttctattttcttggcaaggtttgtattggctaattaaaaaccctaggtgtcttggtgcctggggtgaattgcaagtataaacccgctctcgtatactccctccgtccaaaaaaagacaaaccctgggtttccgtgtccaactttgactgtccgtcttatatgaaatttttttttataattcgtatttttattattgttagatgataaaacatgattaatattttatgcgtgacttgtctttttaatttttttcatatttttttctaaataagacggacggtcaaacattggacacggaaaccagcgtttgtcttttttttttgggacggagggagtacttgttgtcttattcaacttaactttaaattaaaattttaacacttaatttaaagtaaatgtgatgaattttttgtcgttgtttatttttaaaattttgtttttaaactgctaaaaagatggatttgttttgcccgtatatattttttgcgggttgtttagtctaattttccacatctcttcagccgtagagaaacaatcagagccctaaagattcatatcacacgttaaccttcttaaatatgttgagtcgaaatattaacatatataatcttcttagttgcgctcaactccattttttgtgctgaacatggccgtgctcacgtaagctcacaccagcttgttagtttatttatttatggcactatatctgcagctattatcgctaatactcaaatgccaggaatttctaatgattggctaaattacgaacgtacaattaatagtgatcctaatagcatgtacaatagtagactattagctggctataaatatattttaataagataaaagatgagagagaagagcagcgggctacaaatctgtagtcagctgcagcacggactccaagacatagtatgtgtatgacaggtgagaccatatactaataatatagtaaatagttattgtatgaattggctattagattggctacagataaattggagggctatactagtagttattgtatgattgctctaaatctctatattagtttagtttgaggagaccaaggcagccaatgaaggacatacagatggctctgatttactacaccgtactagtcagtctcaaactctgacttttttgcccccctccacatgaaagaaaaatcaagaacaaatacgacgtgcacagtcaactcccaaaacccggtctacaatcaaacaactgaaatgatcaacgtcgtctcgaatgcaaacaaaagaattgtatagctagctagctagctatagcagaggctggctcatcctcaaccaatcgatttgtgtctagtccaccagttaattaatcaccaaagataattaacatgacctaatttatccatcatcaatcacacattcacacgcgttccatatgtgatcagttcaccccactaatcatcgtgctgcttagctctgcaccaatagaactccttcaatctgcaataatcttaataatctttcgccgaccttacccttcaaggctctgcttctactcaaaatctacccacccaaagcctcgcgtctcgccgcgtgtcacagatccgggccccacccgttcatatttctacggcggtgcgttacgtatgcatggataacataaatagcgagaattattagggtcttaatcccggaccggtaatgcgtctacgtttgatgcgtagcccgccttatcgcccaaggagataaacccaacaaaaaaacgctaaataaacaggtatatgttcggtctcgtcgatcacacatgtgtagcacgcacaaaacgttttggtttgtaatctgtggatatatacatgatcggtggattgaacggtatactgcattacgtatgacatagagctatcctgcttgatatgcagagtggtaatgctccatatataaaaccaccgatattatattatctaagttacacaaaatcacaacgactttaacatatggcacatcattgacggtaacatagctttgcaaaaccatgccattgaccaatttggcttactaccttaccaaaaaataagaaatgatttattacttggatagctaaagcatgtatgcttggagatcaaagattttgtaaatttgagatttgattttagaactttcgtatgcagtggatcacattataattggtaagcagtatagttttgtgaaactctaaaatcataatacctatgccacatgctaaaacaactgtgattttgtgtaactcgagtcacaatatcagagttttataaaatttactttagcgtgagtttgaatctacatattcttatcttctacttcctcttttttcgggtatacgcttcccagactactaaacggtgcaaaaaaaaacataaaagttgctctacagacatattaatatattttaaagtcttttagctaacatttaattaatcatatactaataaaccattcctcttttttcttgcatataggagaggtttttaacccctgcttccgaacatatatttggattagaggatcttcacatgatttttggaggaatattaatgttgttcatatgattttttttcctttcctatcgtccggatcatgaaaattatttgtagaaaattcaaaggaaaatttcctccggtgctgatttcacagcagaagtataggaaaaatccatcaactcaagctcttttttagtttttgcttcctgcatgcaaatactagtcgatcaacttcatgtgatccaaatacctcaactttggtatttctttgtttttcattcttctactttacgcttaaattccttttctattcatatacattttatatcatatattttttaagtaaaatacatggccggtccttaaagttgagcgtgggtgtcacttacatccataatcttgtaaattgcacatctagacataccatcttgtttaagtgactcgttgaggtccaaacctcacttgaccggctctgaccgcagacgtggcatgccacacaagcaccaattttgcaaataagcccctccgcaacagtagcgccatgaacaacacaaaaatccccaaatcctccttctccgcgcgcgctcgccactggccaccccctcctcatcgcgcaccatggctgagggcggcggcgggtagagcagcggtgggcgagcgcatgggggcgtgcggcgaacggcggcgtcacggcaacgtcggaatcctgctgccgcgccgcccctcaccagctcaccagcacgacggcattgagaatggcgatggaggagtggaggacgacgacgaggacgacgctctggcgctgacggcggcggcagaggcggaagttgcttgggcggccgtcggcggagcggaggaggaggtagcaatttacaagattatggacctaaataacacccgcgttcaactttaaggaccggcagtatattttactttttttctatctaggtataatccgaacgagcccataattagcgtgcatgtaacgttgctatatgggtttctttgagctgaagcgtagtatatgtacgtgatggaattgattagaagccagccaggcaggggagggtcgttaagtagcatcccatgtcaccccctgcccccacacatgtcagagcaacatgcatttgcttccttggttttaattaattcaatttctcgcctcttttcttcctaggtgtacaagtgtacagcccctctctttttgcttatcacaattcagaaggtgtgtgtgtatatatatctctcctacctccagctacttcacttgtcaaatcccaaacacaaacacctagctagcctcctgagctcatcagcttagcttcgcctagctagctagcctgactgcaatcacctgattgatttggttgatttgtgggcgcgcgcgcgcatggcgaaggtacatcctaacgtggtgcccgtggcggcggcggcagggccggccggcggcgaacggcggggggaggaggaggaagaggcggcggcgctgacggtgtggcggaagtcgctgctgttcaactgcaaggggttcacggtgttcgacgccaaggggaacctggcgtaccgcgtcgacagctacgacacggagagcggcgacgaggtcgtcctcatggacgccgccggcgccccggccttcaccgtccgcaggaagaggcagctcagcctgcagggggagcagtggctcgtgttcgccggcgaggcggacggccggcggccgcccgtgtacgcggtcaggcggacgggccgcggcggcggcaagtcgctggcgcgcgtgacgccgtgcgcgggcgcggccgcggccggcgcgtcggcggcgtacgaggtggagggatcgtacgcgcggcggtgctgcgtggtgtacgacggcgagaggcgggcggtggcggaggtccggcccaaggaggcggtcggcactgacgtgttccggcttgttgtgcagcccggcgtcggcgtgtcgctcgccatggccgtcgtggtggcgctcgaccagatgttcgggaggccgtctctcctgaggagctggtcctcgtagacctctcctctcagtttttacttaaatttagtagctagtttctttctgtctgaattttttttgcccctatttcttggggttaatgaatatacatgagtgttcttgattcctacaaatgatcttatttttttttctatatacatggttaacatgaagtcccagatccggccttgtctatggcttttttggcagtagtactaatcaacttgaccaagacctctgtaaagatgttttacaggtgtgtatgtatatatgtacaaaaaaaaaagagaaatatcaagaattaacaatgggcagttattttttccccatacaattcttgggttcttgaaatgtcatcttatccattaacgctacagtgccatgttaatcatctcaacgcgtaaccatcgttcgcgatccatccagggatggggagtttgcgtcgtcttgtagtagccttattagccccagctctgaatgggggaagatggagatgggaatagcgcacttgatgagtcagtgttgtttgcatctgcatgtggactgtcaggatcgtgactccttgtctagctaagctcgggggaccatttgccatgcacatcgccatcctggagaaacgaactcgctgttttttttcagtcttttcgctcgcctatctgaagatttcagttattatgagaagggaaggagagaaagttgctgctgctttggtgcgttccaggtatcggggcgagtcagccccgctaggtaaaaatcccaggtggcaatgtgccagatccaatgcagcctgcaaatgaggtcgtgtgtgtgccgcccttgctttcttttgttctttgcatgtgcttgcgagctgggtcttttgcgtcactgcgtgtgaggcgtctgccaattggttatcatcagtagcatctcaccgttgacagcttacagaaatcagaggttcttgcgaggtctggccgtctggatgaagtactcctagttcatcttcgtctttggagggatgggatcgccagaaaaatggcttgtaacatcgtaaaaagacgagaacgatagtttacactacgttttgttgggctagaacagatgggccatatgtccagcaacacgtcccagccagaatacgtcaaagtttaatcggcatccttaatcgcaataccagaaattttaaacctttagtcacaaaaccggcttaaattagatcttccgagttccgatggtatagctgatagttttggctgacgtagcaagttgattcggtccactttgtaccgactaggtgattacgtggctaaaaaaagtaggtccaacatgccatcctcattctctcctcctcctcctcaacctctttctttccctcctttcctcatcgagtgcaccggccgctgagcctgagtgtttgcagcccccaaacacccaccgccacttctgccttcgagcagacgagcactcgtcgccgtcgtcgtttgcacctcggagcaactgccatccccgctcgtcatcgtcgtagtagcctgcacctcgttttttaaccaaagggcgcataagatttgtagtattgtgggttagggatgtcgattatactcgacgtaaagcataaggacaacaagtaaacttatttccatcccagccaaccagacatgggccgcatggccgacattgctccctaccaggcccaggatgtaccggccggcccaaagtagtagcaaggtaggctggccagagcccaagcgccaaatctgaccgactgccaccgtgccgcccgtgatgaacactggagtacccgtctcatggagagcgagaagaaagtacacagatgtcgatgtgcgagaagaaagcgagagcgccttcgggcgtatcgcacattccaactctaatggtttagcccccaggacgccggggcccgtggcggcgcggccaacacaacaccggagaggagcattcgttcggcgaggagggcttttcccattggaaaatctggagaaacccggcgaaaaatcccgtcgccgctgggaatatctcgatggaatatccaaacccagcgacggaattggactgggaccggactggacggtcacgatggagtctcgtcgctcccacgtgaccgccgccgccgccatcgcggccgtccaataccagcagcggccgtagtaataaaaaaaacaaaattggtggatcccgtcccccgtttgggctttgggatccaccaaatcaagacggagccacctatccgcgccgtcagatctctccatttctctccacgtggcgtcgagaggaccgtccgatggtaacgcgaccatcctaaacaaggtattcgcgtggaccctacacgtcgccgtcgcgctgcttattaatatcgcgccgcccacttcgtcatcctcctcgcgtactccgctctcgaaaaagaaaagaaaggctttcgtctcggtgggcaaaagcgcgagggcaaagcgaaggtaagggcctctctgatcttcctcatcgatggatgcgtcgttggttttgagcgcggtagcttgtttgtggttcggttgttcgccgatcgatcggtagatccgcctgtgcgaatctgatctgaggctcgaaatctgataaaattggcgagatttacagcgttgcttagtgttaattatgctcgattaggccacgagttggttcggattgctaaccctgatattagttgacttaattatgtgtagtttctgtacggatctgaggatttgctgcacctaactgttgtatctgagctttgcgttggtgtgatttggtaggtatagcatctagtaggcgatggcgagctccggtttctcatggacgctgcccgaccaccccaagctccccaaggggaagacggtagccctcgtcgtgcttgacggatggggcgaggccaacgccgacaagtacaactgcatccatgtcgcccagacgcccgtcatggattcgctcaagaatgtatgcttccttgccacatgattatgatttggggtcatgcaattttttctgcctttaatgttgttagtgattgcaaattgcttttcttgttttattttctgtagattaggcatcctgcttgtaactgtttggttatcccattgacaacagacagtttggctaagatgattaagtcgtaggtttagcctggacatatatttaatgaagttgcatccatgattccatgttgtgttgggttgcccttgtgctatgaatttacgcctttgcctgcactctagtttcagcagttaactctattttttttgtacattaaaagggtgctcccgagaggtggagattagtgaaggctcatggaacagctgttggtcttcctagcgaagatgacatgggcaacagcgaagtgggtcacaatgctcttggtgctggtcgcatttttgctcaggggtaagctgttgttgagttttgattcatttgggaactataggttggatcactctgcatgttttgtgacaagcgtgtttcattctcactgtagtgctaagcttgtggaccttgctcttgcctctgggaaaatttatgatggagaggggttcaattacatcaaagaatgttttgacaagggtaccctgcaccttattggtttgttgagtgatggaggcgttcactcccgtcttgatcaagtgcaggtttgttaagctctgatgaatggcgccttatattgcaatgtgttgtttatttactgtcaatttttaaattggtgtgttctgtttcactctatttcagctgcttctgaaaggtgccagtgagaggggagcaaaaagaattcgtgttcacattcttactgatggacgcgatgttttggatggcagcagtgttggttttgtagagacactagagagtgatctttctcagcttcgtgacaagggtattgatgcacggattgcatctggtggtggaaggatgtatgttaccatggaccgctatgaggtaaaatcttcatttagttatacgagttaaaccatcaacttttaatatttaactgtgcagatcgctatttttaagttgtttgatttcattatttctgaatttaataacatgttatatccatgctgaagtttaagtcttaaaaatgcacagaatgactgggatgtggtcaaacgtgggtgggatgcccaggtgcttggcgaagcaccctacaaattccaaaatgcagtcgaagcagtgaaaactctaagagcagagaccaaggctagtgatcagtatttgcctccatttgtgatcgtggatgagagtggcaaatctgttgggcctgttgtagatggtgatgcagttgtgactttcaatttccgagcggatcgtatggttatgcttgccaaagcactagagtatgcagactttgacaaatttgatcgtgttcgtgtaccaaaaatccggtacgctgggatgcttcagtatgatggtgagttgaagcttccgagccattaccttgtctccccaccagagatagagagaacatctggtgaatacttggtaaagaatggcgtccgcaccttcgcttgcaggcaagtacctggcttcccactctctttcctctgatactaaaaatattgactggtgacttagtaatttttgaggtacttaggccataagggagttgattcaaatcctctatactgagttttactttctgtgctaattttggtaccaagtttagcagggatatagtattttttgctttaattgtagtaataaaacaactcatttgatataaaacgactgcttgggtgcagaagaactgagggaattacctctggttgcctattagaccttccatgatgctattcgaccttaattgtggagtttatagttgtctattgtgcttatataaaataatattctgtcttagtccatttgtatttatgctgtaactcattgatttgtttttttacagtgagacagtgaagtttggccatgtcacatttttctggaacggaaaccgatctggatactttgatgaaactaaggaagagtacgttgaaattcctagtgatattggaatcacattcaatgttaaacccaacatgaaggcacttgaaattgcagagaaagccagggatgccattcttagtggaaagtttgatcaggtaggtaattgtttcgtcggtgctcagatgactgtttgcctatataaaatgttgcttaaaatttttattactcttttaggtacgtgtcaacctgccgaatggtgacatggttggtcacactggtgatattgaagccacggtagttgcttgcaaggcagctgacgaagccgttaaggtgagcacaaacaagacaaaatatatgcagacagttatttctgcaagtcgtcatgtaccgtaatggtaatccctcccctcctggaacagattattttggacgcgattgaacaagtcggtggtatttatcttgtcaccgctgatcatggaaatgctgaggatatggtgaaaagaaacaaatctggccagccacttctcgacaagaacggtggtatccagattcttacctcacatactcttcagccggtacgtgcaaatgttcatataatgctatgttttatgttgtgtgtttgttgattactgcgatgcaccttacatattcgccctgtaataccaagtagagtgctttttttttgttgttgttgatttgagtttttaatgcctatataaaacttgcaggtcccggttgctattggaggtcccggtcttcaccctggtgtgaaattccggtctgacattcagacccctgggctcgccaatgttgctgcaaccgtaatgaacttccatggtttcgaggctcctgctgactacgaaccaaccctcattgaagttgtggacaactaaaatagtaaaatcgcggtagcgaagttttgttcctatagtgttgagatgatcaagagtgatcatatcatttaataattgaataatttatgtttgcccgctcgctgctcaaactctactatggagagaaaagagtgtatttgacttgcagttctgctcttatctgtaactagacgttgtcgcgcaggctggcctgacgttttttcatccgctatatgcgataatgcgaggcgtcaaacatgctcttgtccagtatttaaagtttggatcgtgttaaaatcgcgtaatgttatgtgcaatgtgcttggttgcctcgctttgctccaagaaagcagcaaaaccggagctgcatcatttgatgacctttcgcttgtttatgcatcattttgacgcatcgcccatctgtacgcttcgccatcagaattcagaacacaaaacgacatctctgatcccgaagttgtacgcttcgccatcagaattcagaacagacaatgaatctcagattggaatcagatatatatagctcggggggtaagatggcacgctaacagtgacaaaccttccaaaacgatacatatggtaaacagtaaacacccttggagctacaccgatcaggcacgctagtatctccccgatgatgaactacggttgtagctagtatctccccgattatgccacgctaggtgaggattgctgttgcccgaaggaaagcttgactgcctgagcaactatcaatttgaccacacatggacaaggcctagtcggttgccggtgtatatctcctcacgctcttcatcgtagtacagagctgtgatgtcccccagtgcctcggaaggtgtactttggaacttagacaccctttgcttgttaaggttccctgcctttattttggccaagcattttccggttaagatctcactgatatttatggagcaagctgcaaaagaaccaaagtgaagatcatgttatgtggggacaatagatgcatcagcctcaattacctactgcagtaggtctgaaaaggacaaatttcttatcaactgcagcaagtctgaaaagcatacattttacgagcataaaaaataattaaaacgatacagtatataataagtgcatcagtatgtcaaccttttgaggcctcttatattttattgatattcaaagctgatatactcactccgtactcataaaggaagtcgtttaggacaaatttttaagtcaaaccttgggaatataaatcataaataactcttaagttgttgagtttgaaaatgtaaaaattatatgaatagatttgtcttgaaaaatactttcataaaagtatacatatatcacttttcaataaatatttttatagaaacaagaagtcaaagttgtgttttggagaccgtgtcgctgttctaaacgacttcctttatgagtatggagggagtatatcagaatgacaaagaggaatgcaataacaagaaatggcaacaaccaaaaaccagccaaatataagaggcagtagatctatcatcacttcactaataaataaacacacgggcaacacaagtttgattattaccattttcttctgaagaaggatcatttggatcagccttgcagtaagaaataataagatcttggttgctggtgatgtaaatactgttggtattgcaatcagggtgccacaacatatggtcctcaaaagatgtgactaattcaccacggaaattccaaacggatactgatctactacggaaggtcaggaacagctgcatctcatacagaaagataaacgcagaaggagtcacaaattcacttctgcttacttcaattgattggaagtttcttacctgcagcattgcacaaaaattaactacaattctacaaataaagagaggaaactgtgttgtttcatttgctgttatccataatctataccaagaaaaaaacttacatcaagaatttgaaggttctccccttcctgtttgatcagaagtttttcattgaattgctcaatgaaatcaacttttttattgcgatgaagaaggtgtttgaatgacttcaagcgtttaccatcttcaatagaaagaatgtcaaggggaatacagcccttttttcttgagtatatcaatagcattatgccagggctgttggaaggtagcaataagcaaaaaggtataaatttggaagctcgaaaatggaaatgacctccataagttacacatacaaaaatttcaatcaatccagccacatctcacttgacaaaaagcaatcaattcaccatatataggaggtcaccaagaataaacccatgatagctcaattggcaatagtatttctatgctctccacaaagctaaattacataaatgttcaatcagtaaagttgtcggtttagtaatcaacagttgccaatcaggccgaaaggtttgttttgaaagtatgctattcagcttttgcattttagcagaacttctgttcacctatagggaagcatttcacaaagtgcattgaagaaaagcctatgaactgctcaccattagtttcccatcaaacacaggcaaggtgtatagaaaacatgcagctctcctaaccattgaccaaatatattcgaagttttgggggcatagcacttcaaatcaatttttttaaaaaaatctcttccaatgaataaaaaggcaaagcataatttaggttgtacaaatgtgaaacttaatcatgatcagcaagcaagaaagattcccttacctgatctttatttcttgaacattcttatcagatattgtatacaacaaagtgtagtttttcaagtcaaacaccttgtaagtactggttggaatgagaaaggaatgtcacaattcgaatgaggttaatcttctcgccttcaaagaaattagagctagaatacctgtcttgggcagaataagtcagcaccttcccgttaacatcatcaaattccacaaaacctggccatttcaaggactctgtctcgaaaagagggaaaccagcatctggcttcccccgtcgtatataccttaaaagacaaaataataaaaagattcatataaacaatataacactaccgtagcagaatcacaggaagacaagcttactctattcgagttgtcctgcatcttaaggcactgaagttttcagaaccataaactgatacagtaatgagtgagtcattgttcttgttgtaaaacaaactgcgaatgacttcatctggtcttccattcagaaagcaaatccgctggtttgagactaaaacaaatacatctcagaattcaatggtaatttataacatcagtacatgaccaatcattatcgaaagttgtacctctgctgaatgcagcacatactcctgactgtgataaagcaaagatgatatcactggctccaactatctcaataatctcagaccttttcatcaagtaaggtagtagtgaacccatctccttgggatcatgagtatcaaactcttcctaattgtaagtgaaaagaatttgaagatgtgttataatcgtaaaaagaacaggtcatgctaactaaaagttagaaacaaaattttggtgaagatcggctgttctatgatatgaagggcactgaagtttcaaccttttccaaccgagttatgctccagagtatacttttatcacagtaaataccaaagagagcgaccacatctcaaaatatagcaccaaacacacctttcccctcttcctatcatcgtccataatgctaaaacagctgtactaatccagggattccgatatccgatggagaaactctccgcaaacagccaaagctatcaccatcattggggaatatttacgcctcgtgaattctttgaccgtaggcgaaagttcctcctcacaacacccacactacctatatgctctcgggctccaactcttcccgcaattgattcattcaaataatcattttttaaaaaaacaattatcctctctccaagccctaacctaccgacccactcctgccctctacgccatatcgatccagacctaaatgctgggagacagggtgtggggaggggggacgcgccgagcgggccggctgacctggagctggatgttgcggaaccgctcccgcgtggtgctcgcggagaacgcgcggcacggcagcgcggagatctcccgccgttgcagcttccgcgcgctgttcgccgtcgcctcgggcctccgccgcttccgcgcgagcaccctccgcacgcaggacggccgagggttcgcggagacccgcttggcttcaatccttggcggccccggcccccggcccaaccccacttggccgccgacgagcaaggttcagacgcgggtgggcatctcgccggaaatcgaatgggggttagggttcgaggcctcggctcgcgcggagtcgagctggcgcctcctcggtctcgtgctacactgtggttgccatcgaagtggagtagtaggtgtgcttcttttaatttggagtacagtgaaaccgagagcctaaatggaaaattaccttcgccgtacaatgtccgtccgacggtatggattccataccatggaagggctttttcgatgggtgagataaataaaatgaaatgtaaggtctttttccgaaaactcgtgtcatgcctcgatcttagccgcatatcgttcgtctgacggacaatgttagccatcaggaatacttgcaagttgaaggaatagaaaccttttgcactgttgaacatctttgtagaataagcgaaacgacatatttataaatgaaaaataatttgtgaataaaatttttataaatgtgtttttaacgatctaaaggcaaaggctgaaaaataaacttcgatggaaaaaacctcaaaatcaccttcaaatttaaggatggaaatttaaattttgactgataagtataagcataaacgaaaagatgaggtccttcttaacttgccatgtaaatgatgtagccttatatctaactcaggcctacctggaggaggttagcagttgtaacttattacaaaatcttcagctcttaaacaatgcataatatcatccatattccaaagaatcaaaagctaaagaatctataaaacaaactagaagctagaaaccggaaaaccaatttctctatattctaataatctggttaccgaccggttgattatcagctctccaaatatagcctcatttagatgatttgtgtttggattctgttgttttgtggactaacctactagagaagattagttccttttaaaacaaaaggcttaccgcgagaaggatcttaaatgtaaattttttgtttgcttttatacaattatcgttgcttttaatcaatataaatattaatactcattttatacactaaataattttaaatgacaaaaattataaacaacaaagttttagatctcatttagatctacagcttttatataaaacttgtcttcatcaaaggtcatttgaagtatatatttgagattttctaaaacaaactttagattttataacgaatatttggactctaaacgatcttaaatgaaaaagttgtgaaccacaaagctgtagatatcctcaactatgcaattttgatataaattttaatttcatccgatttcatatgacctattttcaaattatagaaatacaagttaacaacatatgcggtaaattttacatttaagccacttgccgctcttctagagggcgatttttttttagaaaaaatgccctcccaaagggcgggaagggtacagatctgtaattttgtaaacacaaaattatttttgtaaatattgtttaataaaaaattcaatgcgtcttcagtagtcattgaggctgaaggccttattgctttcagagtccacaaaatgggaccttcctgccaattggacttaaaagggccaataagatccaaacacatcgaaggcctaacaatttgctgggctttgactggaccttggaggaggctggaggcctggggcctacctacttataggctagcacaaaaggggttaatattcaatagagcaaatcctatttgtcaaaagttcacttaacttcagtattgctaccagtacagtcacagtaaccctctgaatctttgatagagaaaaaaaaagagagcgacaattctcatgttgtttacatcatataattaccaccacaaaaaattttcacattccttcaacgccacgtactacgtctgatttggtggtgcaagcttaaaatgctttaatcctgcctaagtcctaaccaaccgtgctgaccacagactctatattttactttactgcttattaatcctgctttattagcagtatattttactcaacaaacacagcatttacctagcccggttcatcgtcggcagccttcaaccagcccggttgtaacttacaaaagcttcgataggtgtactgttttctggagggatcgataattcgatgtagctccaggacaaattacgagacagtgatggcatttttgctacagacaacactgcagctgcacagagcttagttgcaaatcctcctatgccacagcgcacattttgtaagtatatagattaggtatacagttaacgatttctaaggctaagaacggtaggtagagtgcaggtggaacataaatttttttttccaaaagacttttagccttttttctatgaacatatatagtctctttttggaatggatcgaggtagtaagctatataaatggtgataaatctgaataatttctactgctaatagttagctgcttgatgtctgactgataaccaggtcactgcaaatttcccatttcgttgactgaaacagcgaaaaagttccagtaaccaaattgccattttcttcgaaaggccagttagatgaattgacccctggacgcctcaagtgccaatttagaagctgctactgctgaactaagctaaactctctgcgagattgcacaagctacgtacctaaaccactacttcttaggaaacagtaatccaaagtccttttctaggatcacctaactaacctctttaatttgtactacttcgtcagcgttactaaactctcttgcatgtcaaaattaaattaaagtagctacctggatcaggatgctagaagcctacaacagtcaatgttactagagatacttattactacatgctgctttcgttgatctccttgtgtcaatgttactgactcccaggtgtcaaagtacatcatccatctcaaaataagttaacattgtactaggacaacaaatctagacatactctatatccagatctattatattaagatgtagtatcacattctactacgatgggtgtgtttagttcacgctaaaattaaaagtttggttgaaattggaatgatgtgacggaaaagttgaaagtttgtgtgtgtacaaaagttttgatgtgatgaaaaagttaaaagtttaaagaaaaaatttggaactaaactcgatcgatgttggtttatttttggaccgagagagtacatgtcaaagtttctttttctgatctttttggccaagtgtaagaagttgctagctgcaggatcaggatgctactactcggcgccggatgcgcgtgcatcgcatggttaaaactgcgcgtgagagttggttaagacgcggccagctaaaaccagaactcggtggagcttaataattggccatacctgatgaccacctgtgagagtcttgatctttttcatacctcctgtatcgatcgagaagatgacaactttttttaaggcgatatgctgctgatttgggtgactaactgactatctgtccgtcttcccgaaggctgtactgtgtcgcacttgttcttaattcagcttgcctgacgactgtgtttgacaggtagactaatatgcaagatattacattgttttctttatatataacaaacgatgctagtttcttattctatacatacgcttctctaaaaaaagatcaaatatctttaagtttgtaatatttacaaaaattccagccaaaccgctggttggtctttattggtatactctctccgtataaagaaaatcgtttaggacagcgacacggtctccaaaacacaactttaacttcttgtttctataaaaaatatttattaaaaaatgatatatgtatacttttatgaaattattttttaagacaaatctattcatataatttttacattttcaaactcaataacttgagagttattcatgatttatattcccaaggtttgacttaaacattgttctaaacgaattcctttataagtacggaggaagtatatagcaagaataatcatggtatcatagcataacaatttgctattgggatagtataattttcattggtatagcatgaatcatgcttgcatatggcatggcataaacaatctccttttgggagcttgggatagaatagttaactacaccctcccgaagcaatttcttatttttgacccccctctttaagcaaccgaggtgaatcgttcctttcctggcgctttcgttgcggcgacggcgacatcttttgccatcttggaccttcgtcacagccatgcatccctttcagcgaagaaaatataaagacattctcacgatctgctcgagccggcttgggggagccaggtagtttaattatagccaaaccgcctgtacgcgcgtcccgttctcgtagctgcgccctatgctgtgatgatctgtgctacgtatacttgttactatgttatatatacgacgattgctttcgctaaattgtgccacctaattacacttaaggtttttttattgaaaccaatttataacctgccaaaattttaatagctgtaatagtattgtttgtatatttggggcatgtttaaattgtagccaaaataaatctcaccaacttttgacaatgctaaaattttagcaagatggcaatactaccaaaattttgacaggatttcttatgtattgactaaatttgagaacaaactaaacgtatactttttttttggtaactttacccaaaaatagtatggttgaaaataacatcaaagtgaacagacccttggtttaatgccaaattttacccatagtatatacacaaatctactaatgttttgtttcggcattatcaatattttagtatgacaagatgtaggcttcaaacgaaactaagcgttaatacctgtgatatgtatatccttgttatatatagtcaattaattttgctaaattgtgccacctagctacacttattgctagagatcctctagagtattacacactggtatatggttctgagggtttgtgggaaaatgcttcatgtcgtgcgtctgatcggaagacaaacatcgaacaccaactttctcctttgtactagtctcctctggacttggtttgattcaccttttccataactctaactttacatctgcacaattccttttctctctcaatgtctccttcttgcatgtagctagcatctattttgtttcttatagtctatgagtatatacatgcacgaagttctagttgtaagctttaaatgaatttttcttgaaaactatttatccaatttactatccgattgcacagttgtattcgttgcaattaaatctctataacaagatatcacatgattatattccgattaaaacatacatatgtttcaaccgataaacttggatgtttcacgtgtaagaaataaatgttttaatcagagtttggctatgttgcacattttaagttttatgttgccatgaatcttacaaaatgttccatgccatttgaagtttcaataaatatttttctgatgtttcactagtttatttgtgaatattgcacgttatattattggatatttcagtaagtattttctaatgtttcactaattcgtttataaatgtttgcacatgttgtttgggatgttgcaatgaatattttctaatgtttcgataattataactcgttgtttcacgtataatatataaatgtttcaattagtaatataatcatatttataaattttatcagaaatataaccaagtgagatcttattgtaaagatttaattataacgaacacaatgggtgaaatcggatggtagatcggataagtaatttagaagaaaaaatagtttaaagctctattggtagagaagatgaagagagagatttcatgcatgcatgcacgagagtagggtatagccttgcatcatagtagcttaactaggatggtttttttttacgcagttagacatgtgggtgaacaatgtccaatcttttgctaaatatcggacgtccgatatgtagcagtatccgagtttgtgggggctcagatataagtgagcagatgacccctgcatcccatatatctttatatactactccctccgtctcataataagtacagttttgcattattcacgttcaacatttgatcattcgtcttatttgaaaatttttttataattagtatttttattggtattagatgataaaatatgaatagtactttatgtgtgactaatttttttttattttttcataaaattttcaaataagacggacggtcaaatgttggacacggatatccacggctgttcttattttaggacggagttagtaatattaggttggatagttttagagaaaaccttataaaaaattagatagcaagatggctcgagttccataaatccgtacgaatggagaaaacaaccaactatctcatcaccatttaccaaaaattaccaatcgcgcgctatagtcaactggaacataactttgagattttattgctttgggtgtgtttagttcacactaaaattagaagtttgattgaaattagaacgatgtaacagaaaagttggtagtttgtgtgtgtaggaaagttttaatgtgatggaaaagttggaagtttgaataaaaagttgggaactaaaccatgcctttgtatagtgacgttgtcggagacactcacgcgcatactccaccgtctaaaaaaataaatataaaattggatgtgacatatcttaataaagtaaatctgaacaacgatctttccagatttactgtactacaatattctcatctaattctaagtttatttttttaaggacaaagaaagtatatatgtaggctatcagccattggccaagatccaatggcgatcctaggtacattttcccagtgtcctcggactcggaccctaggtaaattattcaattctaattaaattatatgatgataactattatataagtaaaaattagataattagtacgcattaaacccccggtaatttttttctgggttcgccactgtcaagatcggattcggacggagtagtagcagtgcatgtgaatggatgcaaatcagacagtctagatttacggagcgtaattactgtagcatttgatataaaccgtttatcatgcaaacggatggttaaaattgtgttcgtatcttgcatgtacaggtataactgcacctgatctcaatccgtagaatcctatgttcaggtactgacgtgataggtgaaaaatcaatcagtattacgaccatttagttcccatcaactatcccaatcaaaacgggaatctggattagtaattagtactacccccgtttgttcccattgcgatggcttagtcagaaataaaattattgtgatggctgcagcacgatcgatcgagacccaagagacccccaatcgttgttctcacaccgtcacacgttagcacatcgatataattcacagtgaacttaattcggcaggaagagaacttgacgagcgttcgctagatgaaggtgaaagcgaccagccgcttgttcacagtcaccacaccagaagcctcttttgattttctcggttttgtgcaagggagccttggaagaaaggatggtggcgggagaagcattcctgcgaagcttccctctcttttttttcctctccttttcctctggggtaattatattttcaactgcaattatacttttacacctaattttctaattatgtgtctttgtcctttctttttaaaattgaagctccgatttacccctacttcaaaattctgtgagatagacctaaattaagtgaggtaaagaaaaagaaagaaatatgactgaaaaacacaaaaggacctatctaccccccaaggcacttcgtccacccaccatgtgttgactcgcgctaccctgcatttttctaattttgttttcatttctccttttcttttcctgataatatgttcagcaatagcattaagtggtaattgtagatccatcaactcttgttctttataacgtgacaaggaatttaaaaagttaaagagaaaatgagtttcatttagatgaaaccatgcctatattgtttcccatacaatttatctctttcatgtattgtctataaaacaagaaaaataaaaccacattttgaaacataaaaacgataccacccattggaaatggccttatgcgattgtccttgctcaggattttgatcgaacaatcaaaggttattatttggaaacacattacattatttgcatttaaaatataaatatatcacattcctggaagaggtaagaaaataaggtgacaactttaagatggatatgtagtggtttttataatacgaagtagatcaagtggtaaaaaaagaatgtacttttatagaaaaaaaccaattcaaacaatccaagaacaacgatttccttttagattcggctaaaatggaaaaatgttgggtctatttgctaggattggtgcaaagtgtaatctacggaaacggaaactagtacttcagtcgatactactccctccttctctaaatgtttaacactattgactttttttaaacatgtttgaccattcgtcttattcaaaaacttttgtaaaatgtgtaaaactatatgtatacataaaagtatatttaacaataaatcaaatgataggaaaagaattaataattacttaaattttttgaataagacgaacggtcaaacattttttaaaaagtcaacggcatcaaacattttgggatggagggagtactctagctaggcagactctagctcatcaagatctctcttcctattgtcatttattttccaccacgtacaattttcttactgtgccatatttcctcgtctgtccagatagaaacaactaatttatcatttgcttccgttctttgtccaaaatatctttgacttctgcttctacttgttccacggttattgcccacggattctgacagaaatgtaagtgtaaaacagaggattgcaaaacataggaataacgtaggaatgaccgtttgattggaccacaggaaaaatataggaatttgaggagagataaagacttaaaaggattttttctatgaggttctacctcttgttaaaattcctccaaaacttgtatgggaaaaggcattccataggaattttataggattccatagggttcattcctttaattcaaagggctttgtaggaaaaattcctataggaatgaaatcctctaaaattcctatgaatttcctttgaatcaaaaggggcctaattgtcaaagtgccatattaatcactctctctgatcttaaatgctcatgttatcatcgggtactattcaaacctctaatttattttaagaacttcaaaatgtagctaattagctaattttatgaagtgggcgtagctcaactgattagatttctcgagatggaatcaaaccatctgatttaagtcctatacttaaacatgagtgttcgcatttacggctaattattcttttggtggtaaatgacgtacccgtgtgacggagctcgtagctcctcaccgggagaccgcgcaggcccccctttgccagttcggccgggggcttagggtgaaatctcaagctctctcggtgtgtggaaagatcatctgcccgcaagaaaacgcgagacaccggcgatgtatacaggttcgggccgctgagaagcgtaataccctactcctgtgttttggtgtatctgtggatgaaagagctacaaagtgtgagccggcttccccccccgttctaggctctcaatccggaaaagaatcaaccaaccccccactctaagggcaaggtcctccttttatacttcaaggggataccacatgcacccttctctttccaaactggactgttctttttctctttaatgggcggagatcggtatggcttccatccgggagcccttctgatgggacagcccacacctacctccactcccggcggagacaggcgcaacgtgggatcgtggctgcccgttgctgatgcgaccagtgtcagaccggtcattcttgtccaccacgtgtcagtttaacaacgtgcatgtttgcccttcttcgtgtaacaccttgcctgtaatggttaggatgaagcctggtataaatctgaccagggctaacgtgccatcttttaagagataacacgctagctccggcttgagacgagtgcctagaggctttcgtcttgacgggatggggcaaggcgtgcgtcagaccgccagtcgccacctaacccgtgatctgaccggtctgtgactggtcacagaccggataaaggaatgcgctgtgctgcgttgcatgcagcgtgacacgcttgaccagactgcaataaatgctgttaggtgagcacagctgtgctcacttatcccatatatgtggcgcagacttccttaaggggtcggggtgcctcggccctcggggccggggcaagcgcaacccgaccccccctcgggggaaatcaagaggagggcggacacctcaccctcgggcccgacgcccccgaaggtgccaggccacgtgggcgattatgtctgcctcaagcctctggtcatgatactcccggtcccatatcaccgacagtagcccccggcgttatgccagagcaatttcctttcccaagggaagcggtcaggtgtgacgccacccctaaagcctggtgacaggtgggaccggtctccgtagttgggcaaaatacccaacggtctcaatccatgcacatcggtattggtaactttggttgtccataatgggcggtctattcaagactgccacaccacttgagcagcgcgcgaatctgggtgagcagatttatctcgcccggagatacggtaacgccgcttcggtcggcaagcgggcctctggaaaggccagacgacggtgccccccaccaacctggaaggcctcgctccgcacctcaacaggatggcctgggttctcgaacaactccccgaggagcttgagaagaccatcaagtcatcctcgagggacctcgcgcggggagcggtcgaactcgtgctggcgagttaccaggcccgggaccccaacttctctccatggatggcgctggaggagttccctcccgggaccgaggacgacgcgcgcgcgcgcgtccgggatgccgccgaccacatcgtcaacggcttcgagggctcggcccctcggctcgcgttcgcccccgactccgacgaggaggggaacgccggcagtgcaagcgatggtggcaacgaggccggcgactcgggcgcgtcgggatgagcccccgagcccccgccaatctttacttttttctttttctttcttctaaggccttcatgcctcttttgtgtacaaattaacttaatctgcaatcagaaatgacgaaaaaatttttgtgttagttttattttgctatatatacacgatgaggatgatctgcgccatggtccttttgcgccttagcttgaaataagggctcgtgcccaagtcccagtcctcgaatggctcgggtcggggctagtgcctggggagatccacatgtcgagactggccaggccgggaacgtggtgaccgaggggtatgggtgacccgattgtgggtttttgccgattcccccccggagttcaccacgccccggggcacggctcggttctgggccccgtttggcgattttagctgaccgaaccgaaccccccgagggcaaggttgaatacgagtgaccttattttaagttaagattcttcagaaggaaaaacggcacagacacaacctctttgaaactgcttttattgaaatgctgaaataagaaaagtaagactgtgcatgtgtggtagcccccggctaaccctgcacacccgaggggggtgcggggttagcccgagcccgaaacctgacacccgacccccccttcccctcaggggtagaagcgacgaaggtgttcgatgttccacgggttcggcagttcagtgccgtcgcccgtggccagccgtacggagcccggccgggggacgccgatcactcgatacggaccctcccacattggtgagagtttgctcaatccagcacgcgtttggacgcggcgtaagacgaggtcgtcgacgcagagtgatcgggcccggacgtggcgctgatggtagcgccgcaagctctgctggtagcgcgcggctcggagggccgcgcgccgccttcgttcttctaaatagtcgaggtcatctctgtgaagctgatcttgatcagcctcgcagtacatggtggcccgaggagacctcagggtgagctcggatgggagaaccgcttctgcgccgtagacgaggaagaaaggcgtttccccggtcgctcggcttggtgtggttcggtttgcccagagcaccgctggcaactcctcgatccatgaatcgccgtgcttcttgagaatattgaaggtcttggttttaaggcctttgaggatttctgcattggcgcgctccacttggccattgcttctggggtgagcaggtgaggcgaagcagagcttgatgcccatgtcttcgcagtagtcgccgaagagttcactagtgaattgggtgccattatccgtaataatacggttaggcactccaaaacgggccgtgatgcccttaatgaatttaagagcagagtgcttatcgatcttgacaaccggataagcctcgggccacttagtgaacttgtcgatcgcaacatacagatactcaaacccgcccggggcccgtttgaacggtcccaggatatcaagcccccagacagcaaatggccatgacagtggtatgatctgcagggcctgggccggctgatggatttgcttggcgtggaactgacacgctctgcatcgccggaccagatcgactgcatcattgagagctgtcggccaataaaatccttgacgaaaggccttgccaaccagggtgcgcgaggcggaatgggctccgcactcgccctcatggatgtcagcaagaagctcaacgccttgttcctgaggaatgcacttcaggagaattccgttagccgcgcgccgatagagggtcccttctaccaacacgtagcgtttggaaatgcgttgtacgcgttcactcccttcgcggtcctcaggtagagtcttatctgtgaggtatgtttggatctcagagatccaagcaatcaatctaagggagcttgaagcgctcccttcgggtcccgaggcctggactccgacgggcctcgggggccggtcaggcgcatccgtctcccctaagggatcgggtcgcgccgacggctgggtaagcctttcttcaaaggcgcccggtggggtctgggctcgcgaggacgcgagccttgagagttcatcggcaactatgttatcccttctgggtacatgccgaagttctatcccatcgaaatggcgttccatacgccgcacttggcgtacgtaggcgtccatctgtgggtcagagcaccggtactccttacagacctggttaacgactagttgggagtcgcctaataccaagaggcggcggatccccagtccagctgccactctgagtccggcaaggagtccctcgtattctgccatattgttagtcgctcgaaagtcgagacggaccaagtatctgaggacgtctccgttcggagaggtcaacgtgacccctgcaccggcgccctggaaagacagagaaccgtcgaactgcatcacccagtgggcggtgtgaagcagctgagaggggttcgtgctggcctcggttattgagacggtctctggagccggggtccactctgccacaaaatcggcgagggcctggctcttgatagcgtggcgtggttcaaagtgcagatcgaactcagaaagctcgattgcccattttaccactcgtcctgtaccctctcgattatgcaagatttgaccgagggggtaagacgtaaccacagtgacccgatgcgcctggaaataatggcgcagtttcctcgaggccatcagaatagcgtaaagcatcttctgggcctgtgggtatcgggtcttggcgtcccggagggcctcactaacaaagtagacaggccgctgcacctttcggcggggccgatcctcttcgctaggggccgtacccccggggcgttcttcgtccaagtggcccctcgggtcgcactcgtcttctgtgccgatgacctcggggtcggaggacgacaggagcggccttcccacagtggcctcggggccgtcctgggggttgggggctcctggcatcgtcggacaagcgggcaaagggccaactccggtcgtcaggggcctctggcctccgttcggctcgggggcctcttctccctgctctttcccgggtcgaatcagcacagggctagcctcagggtcaaagggtggtaggtgcggccttcccgcagtggcctcggggccttcctgagggtcgggggcatccagcaccgtctgacaagcgggcagagggccgactccggtcgtcgggggccttaggccaccgttcgactcgggggcctctcctccctgcctgctcccgggccaagtcggcacagagtgggggtgcgcagaatgaggattgtcctcatcgcgctccacaaccaacgctgcactaactacttggggggtcgccgctaagtaaagtagcaggggctcatttggctccggggcgactagaactggaggagagctgagatacgccttcaactgggcgagggcattttcagcttcctccgtccgagtaaacggccccgagcgcttgaggagcttaaataagggtagcgccttctctcccagcctcgatttaaaacgacttagggcggccatgcaaccagtgacgcactgcacatccctaagtttgctgggggggcgcatccgctctatagctcgtatcttctcggggttggcctcaatgcctcgggcagagaccaagaacccgagaagcttgcccgcaggcacaccaaacacgcacttatcggggttcagttttatgcgggcggagcggagattttcaaaagtttccgctagatctgagagtaaggtctcttggctgcgcgtttttacaaccaagtcatcgacatacgcctcaacattacgtcctatttggctacccaaagaaattcgagtagtacgctgaaaagtaggacctgcattctttaacccaaagggcattgatgtataacaataggttcctacgggggtaatgaacgcagttttttcctcatcctccctagccatgcgaatctgatggtaaccagagtatgcgtctagaaaacacaaaaggtcgcaccccgcagtggagtcgacaatctgatctatgcgaggcagggggtaaggatccttaggacatgccttgttaaggtcggtgtagtcgatgcacatccgaagcttgccgttcgccttgggaacgaccaccgggttcgccagccactccggatggatgacttcacggatgaatccggcctccagaagtcttgccacctcctcgcggatgaaggcttgacgttccggggcctgccgccgcactttctgccggaccggccttgcgcccggccgcacggcgagacggtgctcaatcacctccctggggaccccgggcatgtccgctggtctccatgcaaagacgtcagcgtttgcccgcaggaaggagacgagcgcgtcttcctatttgccatccagaagaccaccgatccgtgtggtcttggacgggccgtcgcccaaggcaacctccttgaccgggacctcgtcgcatgtggcaatccgctgcctcggggcggtgggggcagaagggccaagcctctcgtcaccaccctcgggcttggacgctgcagcgaggcggtcggcgcgctgctccatgcaagcaagcgcgactttaagatcgccatggacagagatggggccaccggggcccggcatcttcatctggaggtaggcgtagtggaccgccgccatgaacttcaccaacgcgggcctccctaggaccgcgttgtagggcagaccgaggtccgccacatcgaagctcacccgctccgtgcggaagttggcgggtccaccgaaggtgaccggtaggtcgatgtgacctaatggccacgtgtgccccggcgtcacaccgataatcggctgggacggttggagcaccatccccggggccttgatagcatcaaaggccgcgggggaaaggatgttgagagccgctcctccatctatgaggacacgccccaacttcacattgcagatggtgggagaaaccaccatcgcaatctgccctccccgggcaacacacggtgggtggtcggtctggtcgaaagtgagagcaacctccgaccaccgcgcccgacgcatcgcctcatgagtaggggccatggccagaagctctcgcttcatagccttgaagctccggcgagagacgtgagcacatgctcctccatcgacggtggcaatggtggccccaggttcttggaaacctaggtcatcatcgccgtcatcgatgtcaacagcgggggccttctgcttggcctcacttcgccgtttgccagaaggaaccgccggggacttgccctcacggcgttcctgcctcctgtcctcctcccacttcctcgttcgctcagccaggtttttgactgcacgacagtccgcgagatcgtggagggaggtgttgtggacggagcaccacctgccggcggggcgctccctactgggagtaccagcctctttctttttgtcgctcgcaggcctcccctttcgagtggcccgcggagcgccctcgacggcgaggacatggccctcgtcgccggaacggtccgacctcttcttcctcctcctgtcacgccgccctgtctgagcggcggatccgggggcggccgaagctgccactccggaaccggaggagttccatgtccacgcttcctccttacgagccactcggtccgcgagctgaaaaagctccgcggtagtctggggctctttggaagcgatcttttcgagcatgcggttgtgccgcacgccccccctgaacgcgtagatcaccgcgtgtgcagggatgcatggtatagtattgcggacttggcaaaaccgctgaatgtacgagcgaagcgactcatcatcgcctcgctgtactgcatgcaagtccgcttcttcgcctgggcgcggatatgtgccttggaagttcatggtgaactgttggcacaaatcttcccaggagtggaccgacgcgggtggcaggttcattagccaaacccgcgcctgtccttttagggccatgggaaagaagttcgccatgaccctgtcgtcacccccagcggcctcgatcccggtcgtatagacctggagaaactcggtggggttgacgctcccatcgtacttctcggtgatggtgggccggaaccttgggggccaacggacattccgaagactcgccacaaaggctctacagccaacaccaccggccgggggcacggagggctgatcctcacgtccatgtcgaggtgacactctggacgaagaggcgccctccgttgcgcggggagtacgccggttattacgccggcgctcgatgtcgatgcgggcatccggctctccacgctgatcctcccgagttggaggtgtcgacgagggagtggcggccgaatggcgcgcagcagccgccgctcgccgtgccctccgccttgacgacacggagccggtggtagcggcgccggaggtcttggtggtggcggaccgtccaccagcacccaggcgctgctgtgccgtcatgaccaagttggccacgtcttccagccatcgttgggctggagactccgggtcatggacgacaggcgggtgtcgtaggagcgcgccagcagcctgaagcgcaccctgaggcgtgctgccgtcgccgtagacgaagaggcgacgctccccatctcgccgttctcctgcatcacctgcgactggtgatgccacggaattgtcgaccctctcaagcgcctccccctgctttgggctttggcccggaggaggtgggggagtacaagctcgacggcggggattcggctccccgtcgtcgccgctcacactcgaggagaggtcgtgcgcttttccttgctcggccattaggctgaacaagaaaaacttggcgcacacggaagagtctgagagctcagaaaacacacactgagtcccctacctggcgcgccagatgacggagctcgtagctcctcaccgggagaccgcgcaggcccccctttgccagttcggccgggggcttagggtgaaatctcaagctctctcggtgtgtggaaagatcatctgcccgcaagaaaacgcgagacaccggcgatgtatacaggttcgggccgctgagaagcgtaataccctactcctgtgttttggtgtatctgtggatgaaaaagctacaaagtgtgagccggcttccccccccgttctaggctctcaatccggaaaagaatcaaccaaccccccactctaaggcaaggttctccttttatacttcaaggggataccacatgcacccgtttcttttctaactggactggtttttttctctttaatgggcggagatcggtatggcttccatccgggagcccttttgatgggacaggccacacctacctccacttccggcggagacaggcgcaacgtgggatgtggtgcaagttgctgatgcgaccagtgtcagaccggtcatttttgtccacacgtgtcagtttaacaacggcaagtttgccctttttagtgtaacaccttgcctgccatggttaggatgaag

SEQ ID NO: 17303 - DNA, 4019 bp, Oryza sativa
cgaccccccctcgggggaaatcaagaggagggcggacacctcaccctcgggcccgacgcccccgaaggtgccaggccacgtgggcgattatgtctgcctcaagcctctggtcatgatactcccggtcccatatcaccgacaccgtggacaacgagacgcccgtagcgacttcatcaatctcaaaatatactgacctagtcatccggaggtgctcataagagtagggtgtgtggtgctcatatggataggatatgcatatatgggtttaggggtgaaaacggccacagaaattcccgatcgacttagcgccgtttccgtataagtggtacgggctcataagagtagggtgtgtggtgctcatatggataggatatggatatatgggtttaggggtgaaaacggccacagaaatttccgatcgaccgagcgccgtttccgtataagtggtaccgtttccgaccataccatttttgggtttttttaattttttttatcacaattctttatgcattatattaatgtcgatactgagtagtttaaatgataaatatagtcatttaccgactaaccaaacatcgtttctgaagagatgctaccgattccgatagtttctgaccgttttcacccctatatgggttcatattgataagtatgtgcgtgttgcgatcgtctgtatatgtaccgtgtttctagaaaaaaatatgtagctaattttatttatgtatctagatcctaattttagccatattttggtattgagggatcaagtaaatcacgttctaaattcaacaatacaaatttttgtttgtcaatattcgataatttaaaaagttgcattcaagaacaaagcattgctcatattttcggctacttattctttttggtggtggacgatgtcctggtcaacaacaaaagacgtttgtggtaattaacttcatcaacctgaagacatgtcgatgtcgttttcggatgtgctagtacgggtaaggtgtgcatctgtgttgataggagttgagcgtacatgcataaaatttgtaatatgagcgcttgcatatgtactatgttttgagaaaaaaaatccccgtcatgcaaacaatcaattggtaatgctccttgtggtgaaatttggccacctgctagttcttaaacttgccacgagtacctgcattaacggttaattaattttagtgctaggcgcctgtatcaatgtcaacaatctcaaatatgctcgttcagtcttcaaattgttcaaagaagtagggtatgcatgcattgtgctcactgctcagcttttgaaggtatccatgggacatggtgtatccgtgtatgtgtgtgtttatacagtaaactaggtgaaaccccgtgcattactgtaagagtttagtatgatagtaataagtggaaataatgtgtaagataggtagacaacatgagcttacataaattgatatgatttatgataatttaagtagtatatagaatgatgataaggtgatgtgcctttataagagaagaaaagaagatcaggtaatttggaccatagcttaatcatctatgggataaaaaatgggatgatatggtctaatgagagaagaaaatgagaaaataacttggtccataaattaatgatctaatttgatgtgatatgccttaatgagataagaaagtaataacattaactaagtgatgatgaactatatatgtatataggatattataaaatatgattgagagatgtatttaaatattatttgaattatgtgggatgatgatttaacatctttatattttaaaactctaaaatttaatatattatagaattatagataatataatatgcttgcatcatgtttgagatttaataattgttagcgaataataatgtggtatctttgtatgttaagttttagaatctagtcgattgtaattctataagaaggtaggatgtggaaaatgcttgtgatctgtcgtccgatgtagacaaataaaatgaacgcagagacatctccccatgtgcatgtgcatgtatttctctctcctctcatccgtgagtatacagtacctatgatgcatacaatatctgctaattttatgtatgcatgagactataaacgtaagctttaaatatctttccctcaaaactacttatccaatttacgatataattgtaccattatatttgttgtaattaaatctttacaataagatcttagtcgattatattctaacaaaaaaataaaaaaatatgttttaggttgtgaaaatttaatgtttcatatgtcaaaaataagtgtttcaattgaaatttgattatgttgcacatttaagttttgtgttgcaattgattgttttttaagtgtttgcacatgatgttattcgtatgttttaataaatattttatgatgtttcactaattcatctgaaaaatgttgcatgtagtgttattaggctatttcaataagtatttttatgatgttttactgatttatttacacttgtttcacacggtgttatctagatgttttagcaagtattttgtgacgtgtcatcaattacagcttgttgtttcatttataatattaaaatattgcaataagtagtataatcatatctgtatatttatagtaaatataattgagtaaggtcttgttataaggatttaattataaaatataatggtgaaatcaaatcattgataggataagtaatttaaaataaaaatagttcaaaattttatttaaaatattgttaaaaaagaaatagagatgttacatgtagcatggtagttcatatggatatgcatgtaacctgcgtaagcgttcgtaccgcgtttgagaaaacctgtaacataaagtccaagttcctattttcatgaatagaattcaataagtcgtggtttttatgttggtgtgtccctcaatcaatttggttatgtccttcatatttcgttgtgatgtgattggtttggtctcaaattcgataataattggttctaactatatgagcagaggccgagattttatctagaaaaaaatcgctgtttttctatgctgctgaatattcgctgatctttgacctcgaagaaatacggagtagtagaaaataaaaagaaatcaggagaatatgatccaccattggcagccgagcacgtctcaacacgcacgggacgggacgccatcgtcggccttccgctgcggactccaaaacgcgtataaatcagcgtgcatcgacccacccatccggctcgactcgacccgactcaatcgatccatcccggctcggctcagctcggctcgagcgactcggctggtcgtcttctctccaggctccggagccaccaagccagatcccccacagtatcccacggtcccacccgccttgccttggccgcctccctccggtccacgaatcgccgccactttaaccaagcctccttgatcacactcctaatccgatagcttaatctcgagcgcttcgagttcgatctctcgtgaaggggacgacgagggcattgtctccctcctcgcgcgcgcggagtcgccgccgccgccgcctcgtcctcggccacgcggtgagtcctcgcgccgacctcgccgttttggttgcgtttttttttagttttctctgcagcgggatttggagacgatgggtgtcgctgtgtgtgctgtgaaatggggatttgtggtttttttttttggtttgtggagtacgagtacgcgggggaagtttcgaggtcggttgcatccggagctcccgctggagtggtctactctagtgcggatttggaagcggagaagttggagttggaggtggcgtgacggatcaagcggagtcgcgatcgctcgccggagccgtgcggattccggtgctagcgaacaacggcggcaccgtcggcgttttgtagcggtcaagctgctgctgctgctcggaatctagctaggtttttgttctgtcctaatccgggtttcccgattggatttgatggtcttctccccacgcatgagagttggttagcacgg

SEQ ID NO: 17304 - DNA, 835 bp, Oryza sativa
cctttagctgatggttctatggttgtgcattctactgagtatgatcatgatcacactaaacttttgattggccgtatgataattctacatgattacccatttagaattgttgagcataaagggtttaatgccttgatgaagtggatgaatcctagctatgaattcattggtcgcaaggccataaaaagtgaatgcatgaaattgtatgaatctgaaaaggaacatctcaggaaaagtcttagggaggctgagaccataagtttaactacagatatgtggacatcaaatcaaaaccttcagtatatgtgtttggtggctcattacatagatgttaattgggttttgcaatgccgtgtcctaaactttgttgaggtggagcctcctcacaccggtattgtcatagctcaagctatttttgattgcttggttgattggaaaatagaggacaaggtcatgacaataacccttgataatgcttcaaacaatgacaccgctgtttcaaatttgaagtctaagcttgctgctagaaagaatgctcagtttgatccagattatttccatgttcgttgtgctgcccacatagttaatttggttgttaatgatggcctgcaacaaattcaatctttgataaccaatgttaggaacactgtgaagtactttaagaagtctccagcccgtatgtataagtttgtgggtgtgtgcaacacttattcaattaaagttggtagagggttgtctattgatgttaaaacaaggtggagttcgacctatcggatgctagagacatgcattgagtatagaaatggttttgattattatgctgggggatcccaaa

SEQ ID NO: 17305 - DNA, 640 bp, Oryza sativa
ccacccaaatttaaaaggcagtaaatctatcatcacttcactaataaataaacacacgggcaacacaagtttgattattaccattttcttctgaagaaggatcatttggatcagccttgcagtaagaaataataagatcttggttgctggtgatgtaaatactgttggtattgcaatcagggtgccacaacatatggtcctcaaaagatgtgactaattcaccacggaaattccaaacggatactgatctactacggaaggtcaggaacagctgcatctcatacagaaagataaacgcagaaggagtcacaaattcacttctgcttacttcaattgattggaagtttcttacctgcagcattgcacaaaaattaactacaattctacaaataaagagaggaaactgtgttgtttcatttgctgttatccataatctataccaagaaaaaaacttacatcaagaatttgaaggttctccccttcctgtttgatcagaagtttttcattgaattgctcaatgaaatcaacttttttattgcgatgaagaaggtgttgaatgacttcaagcgtttaccatcttcaatagaaagaatgtcaaggggaatacagcccttttttcttgagtatatcaatagcatta

SEQ ID NO: 17306 - DNA, 1098 bp, Oryza sativa
taccccatacccacacggcatggttatccgactagttataggggataacttatatatatgaaatatgtaacagattatgacttgggtattacgtttccctgtatattatggaacggcctaaagtcctggtttgataagattgtaaagtagatttagtaaaccgataccgtgttggttaaggtttctatcttgtaatcctgccccccatcctatataaggtgggcaggaggccctctagggggcatgacacaactagatcgtcagatcaatacacacccggcggattcaaatccccaaacaggagtagggtattacctctcattgagagggcctgaacctgtctaaatcctttgtctccgcatccatccacttttagggctcgtgcgctaccccttttattattgccgaaatctagtttcgacagttggcgcgccaggtaggggttgcgtcgaattacctgtcgaaaagtgcgatggaatcaacttcagaagaagcccggagatcaatctcatcaatttcgacggctcaaatctttaatcgggtttatcgttccaatctaatttttattagattgatttttaatcgttgtttgatttcctgatattttgatgcatttcatatactcgatgagatcgagacacggccatcatcgtcgcctgctcgggtgcccttgccgtgtccgagtgctcctctcttcctttccttgcagttggacgtgttgctggagtagcacaggccgccaggagcaaattaaacacacgcatctgttgatttattaatcaacacgtatatgcagactggaattaatctactaattgctttctattgcatgtacacatgtgccgttcgattcctgtttccatgtatgacagttgatgtgctccgccggccatctccgataatggcgtcataccgaaagaacatcgagttagcagttagttgccggggcttatacatgttgcatggcgcgtcgccggctatcacccacgatccagcctcactgctcgacttgagtttttcgtttcaatttgttatcaataatcaatatatattagattgatttgtaatctcagataaatttcttgatattttgtggtg

SEQ ID NO: 17307 - DNA, 541 bp, Oryza sativa
agacaacaaaataaactcctcctccacgttccgtggaggagtaacaagcagctactacaatcacacagcttaagctataggaacgtacacatatcaaatcatcagaagcctacggtgccaccaccggaccatctgctgttggccgtcgacgctgccgaggtccggtacgccgcggacggccgctggtttgcgttgctcacgtactggcgcaccggatcggcgttcccggcaggcgcggtggtggcaggcgcgggcgccgccgcggccaccacgtactgctgcaccaccagcaccgacaccgacatcgagaagtccgacgacacgagcatgtcgccgatgggccccagctccgggcactccatccagtcctccagcgacgccgtcatcggcgagccggcctccccggggcgcctcccgacgatgtacagctcgtggaggctgtcgtccatgttccggatggccgacaccgtctcctcgctgttggccaccaccttgtcggagtacgagatggcgtcgttgccgatgttgcgcgtcctgaagt

SEQ ID NO: 17308 - DNA, 1027 bp, Oryza sativa
ctcttttgtcattctatagaaagatatcattcttgtgaatgctgtcgctgttgcacctatagctcaactgtacatgataagggcatcatgtgtaaactatgatcttttttataaaaggtgaactgaatgtcatcacatgcaaatgtttatgtatctttctcaaaacatgatactagctggatcagctatttgaatatgaaagtaacgtgatagacttcctgaggaagtaaatgtgattcttctcgtcatttgtatgtgattttattcccctgatattgttcttgtcaagggtatttaagtccgtcttttatctttggtatcacacagctttcggttggtttctcatgtaatttatatctgttgacgttcaatccatatttacagtattaatctgaatcatgttactatatattttcatttttctgatgtaaaagttgctgtgtcagcttctcttcgctgaatgggaaatgaatcaccacttgataggaagacattaggataacttgcgtgtattacctggacaaggacaagactttcatcacctctaaaagatgcttcgtaatgcaagaaatgtatttacaaaggcttatatacctcaatgggaataataaagaactacatgcgtattagtgctattggagaagggcataaatcttacctaccaatgggaatagatacaacagaaagaatagccagcacaaaaattggaccaaatcacactatttgattccatcaaaatccttgaacctgactgaaactttgtctgatgtcgatgagcttccaattataaccaaaaatttgtctccaaattggttggtgtcactgcaactgccgctgtttggagatctgcttaagcccagcttccaggtcttccaatgtgattgtgatcatagtattcgcatagtcgcagttgaaatcaagacgtagatctagattctcacaggcattgatgagcagcgtgtctacaaggccaccattcatctgtttacgccgctgttcagttgtctccctggcaaacagctctcca

SEQ ID NO: 17309 - DNA, 1697 bp, Oryza sativa
tctacaaggccaccattcatctgtttacgccgctgttcagttgtctccctggcaatcagctctccaacgacctcgatgctgcagcttgggtccagcttgaacccatacagcaaactgctctcagttgggttattcatcttcagatgtaagatctctgctaattctgttgtggtgaaatcgtcaaaataaaagaactttgtgaccctcctacagaagccgtcgttggaggcgatgacgcgcttcattggctcacagtatccagcaaatatcacaactatcttgccattgtccattacagacattatctcctccaaggcctccacaccgtaatccttatcatcagatttttgcatcggtatcaacctgtaagcttcatccacaaacagaattccaccctcagcatcctgtatctgtagaatgtatacacattatgatgtataagttaattaagtagagcaatgacaaatttaatcataataactccaaagtcaaatctacccatgtatttatccaatgtccctaaaacctactccctccgtcccaaaatatagcaacctaggaccggattagacacaatctagtactacgaatctggacaaagttactatattttgggatggagggagtatttatttccagatttaacaattttttttcttttccactttatctcaaattgataattgagaaaccaagtcttctgacaaaagcaagtatttgcaaaacataagaatccaaatactaaggaccagtgtaagaaataagtaatagtttgcataactagtaataacagataaatagttggagctttaatactccgatttccatttttaaggatagagtttgtatagtcacacgggaacaaaattcagaactcaattgaacagagaacatagctacctttcgcctagtttttggtccagtgtgccccacaaattctccaacaagatcagttcgctgtacttcagtaactttgtcggtagggagaaccccaaccatatgaagaagctttccaagaatccgagcaaccattgttttacctacattagaggttgcaatattatatagctggctttagcacctaaactacaaacacttgaatgatttgtatggccttgtttattgttttaaaacttgtttacccaagctttgggagaaatgctttcagcatgcatcaaagcaagaatcacatgcaagaagttcaccaagcatacatatttcttaattgtactgttccaataaaattcatcggtgcacaaaatagtaattatgaccgtaataccatgatgataaatcatgcttttgattatcaaactgaacataattgtggtacctgttcctggattgccaagaaatgccatatggggagcccttctgctagcaatccctaagcccatagctcgtcgtttctcatcaaaaagcattcccctggcccatctacgcaattgcatttgaggtcctgtaatcctacaatttgtgatattgcttcttcaaactccgccattgcttttccttcacggcatgacatgagggctttccgttttctttgctcttccatatggcgagtgaggagtttctgcagcttttcattaccagctcctccaggaatatgattcgaagggattttgcctactgaaggggcaatgtgtgatgagaacaagattcagtacactaaagttgttgtaaagaaagcattt

SEQ ID NO: 17310 - DNA, 10833 bp, Oryza sativa
tgccatgccattctgcaacaatgagttaaaacagattaaatatgaatacccacaaataatacgggatagaaagaaaagtaatactagatagacagatcctacatttgctttggcttctatatgtgcaccacgttcaagtagcaattttgctgattcacaagaactgtttttcacagccatgtgcaggggtgtctctccatactgcagaacaacagaagcagtaatttatatcttaagctcagagcatacaattagtgtcgcagaggtgccaataaggctgcaacaaatgccagatacttcaattaccatgttctttgcttccagctcaactttatccgtgccttggaaatcaagcaagaatttgactatgccagtgttattgtagccagctgcgacatgaagcggtgtttgggacatctgcatggtacattgtcaaagagaaggtaaggaacacaatattatgcagtacttcacaatattatgcatagcaattatgcactacaaaattctagtcagaaaacaaaaaaaaattaaggcctcagttgtttagaaactaatcaaattcatcatcgtgcaattcaggtctagccttcatgttatctctggcaggaatttggtgtgttgtgaactgagatatacgcaatatccttttactgatctatttgcaaattgtgcgcaaatcaagattgcagtggcagcaacattacaagatatccaaatcttatcagttcaccaaacataaacgtctaaatcatctcgaaatgcagagttacaaagtgtataagaaagcgaccaatctgagagaagtcgcaaaccatttcaaagaggaattagagaaacctacaattgcataaaactaaattccaccgaaagaaaaattgacagtttgaaaaccattgctgcaatagtctgaaattccacctaaagaagaaccgacgtcggaattaaacgaatctagaggaaattttgaaaactcttggcgagaaaagaaacttgcatccatatcacaaaccgagaaagaaacatcagagcaagcaggaggatggggagaaaaaatattcccccaaagaaagcaccacctcagcatcctaaataaggaacgaaatgggggaaaccgccaacatggggataaaaatccaagaaccaataaaaatccaagaaccaaagctcatggaaaccaagaagcaagcacaaaatccgatcaaaccaacattttttcttcacaacgaaagagaccccatctcttgcgaatctcgaatgctcactccagtccactccacactgcaaggagtgtcaaacgaaaccgcgcaagaagcaagcaaaagatcggaatttctttaaaaaaaactaaattaaatgaacaagaagcaaaagggggggggggagcaaggcgcgggcacgcacgacggggttccggtcgttgatgagggcgggattctcctgcagcttcctctgaacgccggcaaggtcgccggcgcgggcgaggccgtggatggtttccgccttcgccggcctcggccgcccgttctggctccccggcaccggcatctcctcccttttctgctcccctccctgtgatagtgtgtgcgcgctcgctcgagcagcttgcgcgtgtgaaaaggaggaggagacgaggaagaaagggaggcgacggggggcgagccgacgggtaccaaatccctcctgctgtgctgtgcgctttaaaaattggatttttttttttgtttctggatttgttcttgttttggtttaattttagtttgtttctttggagctttatttttggcatctatcccggggttttctggctttgttcgttgtgaaaaaaaaatgaacattttttctcgttttctttccctgcttatcgcatgcaaaaaccaatgattgacactaattacaccatgatttggtaatgtggtgctatagtaaacatttgttaatgatggattaattaggtttaatagattcgtctcgcagtttacagatggaatctgtaatttgttttgttattagtctacgtttaatacttcaaatgtgtgtctatatacgtcaaaaaaatttactttcaggattatggataccacataactaatattagttgactaaatcttggcaggacccaccacataccatgtcttatacggaaacaaccttcagatataggagaagttccgtatgaggaagaatgaatagagttctacatggaaacgacgaggactacggtcgtagtgcagagagtattgttgatcctttgtacttcctccgccccctaatatcaaggattttgacattttgctttcactgtttgaccacttgtcttattcaaaaaatttatgcgaatataaaaaacgaaaagttatgcttaaagtactttggatagtaaagtaagtcaaaaaaatagataataattccaaaaaattttaaataagacgaatggtcaaatagtgtaagcaaaatatcaaaatctcttatattaggggatggagggagtaacattttaggtggcgtttctcccgatgaagatgaagattaagtttttttacgtaaaacgatgttgtattaacgtatgattgattatttttaactattgcaaacttgaaaaatagattaatatgatattttagagcaactttcatatagaaagtttttgcacaaaagtcaccatttagcagtttgaaaagcgtgccacgaaaatcttaatcttcatccaactcttgttggagaaaagaacgggaccttgaaagcacaagaatataacgaaaatacagaaaatcatggaacatgaagaaaatgatgttttaaatggcacgttgaaaaaaaaagtgaatatgaagaaataggaaaaatgaaaaaacacgttttgatttccacaaaattcctatggaatagattgttccgtatgctttcaggtatctttcatgagctaatcatttgtttcaaaaggacttgatattcattttatccatatgatttaaatcataatttacttttctttgttcataaggggaaaaataatcaagtgattcttaaacactccaatttttttatttgatgtactaaaatagtatcatccttccagttttatcgaattcaatcatttatcaagagtgcacaaaaagactatgtagcattacatgaacgagtaaatgtgccacaaaagggcaacaaaccaaacaaaaaggaaaggggaaaggagaaaaacatagaaaattaattataaaaattgttttttagcgcatctgcttacccaacatattttttggatgaatgtttttgtaacaaagattttcgaatgaaaattttcatatgaaagttttcctgatgaaagtcttcagaagttatcgaaaagacttttgatagaagttaatagtgcagtccttccaattttatcaaattcaaccatttatcaagagcacacaaaaggactaagtaagagacgagtaaatgtgccacaaaagggcaacaaaccaaacaaaaaggaaagggaaaaggagaaaaaaaagaaaattaattataaaaattccttgtgttttttggatgaatgttttcgtaacaaagattttcgaatgaaaattttcatatgaaagttttccggatggaagtcttcggaagctatcgaaaagacttttgatagaagttaatagtgtagctacatttaaaagttttccacctaaatacttacaatagttttttagtagtcctaatttagaattacttgtacaaaaatatagttttaacttttatccgatataattaagaatttgtttattgtaaatgggttatatccaatgtgttttatttgataacaatatatttgaggccatcaacctagcttgctgacagactcttattccagagatggacgacatgatttgtgtgacatacttgcatcaagaagaggactaatcgatcttactttgcatctatgatttgaagaagccaagcatttgatttcttagcaaaagaaccattgttacagagcacctcacacgtttacgtcgatatgctaaaagaaaattatattatgttggtaacataggatcattttgtagttatgccatataaaaatattgttagtgtaaaaacttattcaaataacttatctaactaccaaatttggtatagttgaactaaaagctaaatattgaaggcgtgaggaaaaacttacatgaaactaaacacctgtatgttactaatagtatttctattttgagtctgattaagatacaaatttcgtttttttaagttgtcaattggtgtgtttcgtgcgaaaacattcttccgtacaagttaatattaaatctattttcgaagtttgaaataattaaaacttaattaattatgtgctaatgaatatttcgttttgcgtgtctgtactcgagacatctatagcttctcccaattatttgtattttgtaaacgcaataatacaatgcaatttgttattcttccgagtctgatttagggcttgttcattttatagccattttcaatctttccaaaatttggtattgccaaaatcttagcaagttagcaacattactaagttttggtaggataggttaaatatattattgtcaattctctaagtatgacaaatatttgataataaactaaatattatcatgcatttgttaattttatcaaataatggtatggtttaaaatatcataaatctgaacgtgcccttaaaagtaatcagtttttcaaggacaaaatcacatatcaaaacctctagtactagtaccaaacaagaccagcacaataatgtaattgtacagccagcataatttagcttgaggatagcgtagatctacgcataagattggattaattttgggctagcatagctacattgaggcaatgtttctttcagtttaggattattataatctaaattattgagtcagattactataagctataagctagattgttataatctatagtagaataagcggttagttgtttcttttctagattattagatcctagattattggatttgcaagtctacaatgggagtggggtggcatggtgggtaatttttacccaataatctgaaaaaagccaataagctacttcaataagttgtctgttattttttagcttactactaataatctaaattataataatcccaagcttaaataaataggacattttcagcttactactaataatctaaattataataatcctaagcttaaataaatagggaaataaatagagcctgactcatctggacccgcccccgtacggaccccagtccccaagtgatgcaggcagcaggctgtctgtcggccagcacgtgggaagccggctcccccgcgcccgcgtcggctcgcacgcgtgagtgcgtgacgcatcagctgttccgcatctcgctcgctcactgccagtgccagctccccgccgccgcatcgcatcgaatgccagcggtgttacgtcttacgtgttcagagagagtgattttacactgttcaattattagtatagatttacatgtcatttaaataataaaaaaaataaaaaaagagacgatggatattttcatatcactcgaatattatattttctaaaggaaatgagacgatggatttacataagttaaaattcaatttctacgggattaaaaccaaattaaattatactaactagttaacatatatttatagttaaaaatgtttattccgttgtaatatgtataagttaaatttgaccttgcatatttacgaagtgatcaatcacatattaatcttatctcgttgatttttttgattttttcataacttatttaaatgatatgcaagtgcaaatcataaggcgcagtaacaatgcaagctacgctatgcgtgtctcttgcccatgcaaagcatgttacctcttttgtgtggccttaattggggtgaggtactatcgaagccacaaagcccacaatactggtgaccaaagcaaggaaagtagcccacggaattaattcccccaactaatctcgacgagtctctcttggacgcatcgcatccctcaacctgtcgcctccaggtccactacacgcctcccaatccaccacggcgcatcgctgaccaccatattccgccgcgaagagttcacggcgatggagctctggagcgaactggtgctgcttctaattggatataccccatctaggccgacaagagtgagggcatgaaaaagaggggcaagaaggtgatggtagtcgtcaaatccttgcactgagagatcagacttgtcaattgagatgtggaccgaacctagggtctaggatgtggctgacattgatgttctagctcgtccacttccaaccccgttaactgtggaacaggatgtgatggcggatgcggtgctggcttcagctccacctgtagcagaggcttcttgaactcctccaacaaccaagtcaactcaggtaatggatctcaatcctaggtttttgtaaatttgggtgtcctttggatatgaatcatacgaagttgtgctcttgatttaatggcatgaatcggtgggcacgtgagagcgattttagggattccatcttcggtgtggcgtgaggggaaaacgactcggagccatgccctccacagcgcaggcgcgatgtgttttctcagccgtgagtggactcacaaagggcaaagaacgtgtctctctgtgtgggggaaagaggctcaacagaggcgcgcatttagtcgacacataagtgaatatccgagctggcaatacgaagtaacttaccgcatcctcgcatggtaaaggcctaaagggcctaggggcacatcctctccgagagttttcaatagttttccccattttctccatgcttgggcggttgggcctccatttttcctctctccgttggcttacgcctcctattaatgggcctaatatcggcccatttcatgggtcggcccgtgcatcggtgcatgccacctcaggcccattcgctctaagaaaaaggccctaaagtctaaaaccctacgcgtccgttatcccaatcccctcgattctccggcgactccggcgatgatgccgctcctcctcctcctcctccccgtccgctccgcccctctccggcgcctcctcctatgccggtgctcctcctcctcctcccccgccgccgccgcctgggcctcgtcatccgcgtgccccgtccccgcctcctcagtcctcgccccgtaccaccgcgccttcgcccgccgcatggccctcgccggcgtccacccgcaccaccgcgtcggtacgaatgcggcgtcgctttattggttttcttgctgaacgagtggctctgaggtatggttggttggctggtttgcagcggtgggggtctccggcgggccggactccatggcgctctgcgtgctcgcggcggcgtggaagaaggccggggaggggagggagcaggaggatgagggagagggcggcgtctcgggattcgtggacgggctcctgggggtcgtcgtcgaccatggcctgcgccctgagagcgccgacgaggcgcagctagtccgtgatcgggtgcgcggcatgggtaaatcttacttatggattaacactgtataatttctttattttaacacaaatttactctgcacctgcgcacatagaaaattgcaatgatgattggcttccgttaggtctgctccttgagttgcatttgaatgggaccttttcttttgaactgttttttttaatgcgacttgatccacaaaatagacattttgaggtgccacaattttgttgtaggtgttgtttgtgagattgctacatgtgaatggccgaatgggcgaccaaagctggggcatattcaagaagctgcccgtgaaatgaggtgtgcgtctccctctgccatggttcactacttgtcaaggataatgctatctgaacaatttgattttctgcaaacttagtatttgtggttgatatggccaattttttttatgtctcatcgatttccaaaacttacatgcatgctgtatggatatctgaaaaaaaatgtacctcacctactaacaactttgtatgaaatttgtgtagaccatttacttgcacaaagtgttaggagttaaggggctttcccttctctttaccggcacttaaggcattagatttagttgtttgttatacttaagagggcacatatgttagtattttgaactgtgggttgtgtaggcgtgtgttgtatggctttatttgccacttctcttatatgaaatgatacatagctctccggcatgttcaagaagaaaaataatgaatattttgttttgtttagttaaaactctgaaccttacatgttggtattagtgcattattctcacaatatattggcgctgagggtatcaggaatgttctttaggattcttcatggacattacctcctgcacaatgtgcattttttttttcaatttccagtgttgagaagctgtaaacttgccacttcaaaagtaaagagtgacatggttcacactgactactaaaatatatggaaatttagtatgctatggcattgtgaaaatgaatgctatgttcttcatgactgtatatatctacctgatatatgctctgccagttccataccaatttattcacaaacacagaaataccttagtgcattttaacaagacttcacattttaataaattcaggtaccaaaaactgttggacatttgtataaagcaacgaatagcagtcttgcttatcgcacaccactctgatgaccaggtctgttaaattgagagatgtatttttcctttttcccttggttttgaatgagtgttgccccacttatggaattgtgagttaacacataaaatccttgttatgtaaaagcattgagccaaatgacacctgttatcatcgtcaaataagcggtgctaatttttttctcttatattttaagtttttgtggacttgacaacttgcatatagggaactattattagatatgatactattgtgccttcatgtattactgtatctttgtttgtgcatttactctctaggctaacatacattgtcacatgaatatctgatatcggatttagtggaccttgcactgatccttgaatttagacatggttaccttctaattgtcgtagtatccaatgtggtattgaattaaagattactgaatctaatgtatactgacatctttctaccattctatgttatgattttatgccattatagttactgcagatgcagattatatgttttctctgagtgaatttaggcttataaatgcaggccgaactctttgttctgagactatctcgcaacagtggtgttttggggcttgctggtacagcctttgtatctcagttgtttgcgcctaatctaaaatatgatggagataacttcagtcgttatggtgttattcttgtccgtcccatgcttgaattttcaaaagatgacatgtataaggtaaatcatgatctcatgatatttagaatcagccttgcattttacttgaggagccttatcttacttttatctttcaaatatagtcaatatttcatcattagacacttaatttgaattttgatttcccaaaattcatttaacatgctgtatttaatgagttcagcttatgtatgtttctagaaattcctcaccaatattcctaatttctcctgctgactagcctttctctgaaaaagcaacatagccttttcttgtaggagactttgatgactttgctttgagctgtcatttttttttaaaaaaaatgatcatatttgtgtagctgttactgattgatctgtcatacttggttctccacagatatgtcaaggaagtaatcatttgtgggttgaagatccaactaataatagtttgctgtacgttaggaatcgaatccgggcatctttgagaagtttatccatagaaggttcacaattgcacttaagctgttgcttttgagtgattttagaatcatcatgttgaatcctttgtcttcaactttacctcatttatatcataatatagatcattcacagatgatgattgatgaaaggtgatgtccataaacatttgacaaatgtataaagcttgattgagcatgcgtacgttttactcattataaatttcaatgaattttccatcactattaattatcaaatgccatgtttggtcacaggaacaacttgttctattgaccatccgcaattgggtaattctgttgaataataactgactattgactgtagatacaccatcttctggaatcagcataaatgtttgcttgtgtgcaccaaattgtgatttttcatgtttcttgtctaggttggtctgtacacaaggtctatttattttatagtaaataaaaagtgtgtcagactatcagtggcccagaattcatgggtatctagctcaagagattgtatttagttaaattcacttgtggaagtaggtcacagaatttgtagcaaatgacaacattttcactgtttcacatgttgccaattcgtggccgaagttatttgtggcaagtcctagctccaattggtatgtgtgaagctacatcagctctggccagcttgtctgcagttgtaaatttgcaaacgctatcaccttatgatgagcgatgaacgaatgcacattcagctgacaaattttgcttatctacaggtacctttcagtcagagcttcacaaactgatctatgcgtgccggttgacacgagcatttatagataatgcctgcagtatggttttaaagaagtctttaacaataatggaggtataccctttttctgtaattcgatgtctcctatatcatgccattactaaaatttatatactaactcttttccccc

SEQ ID NO: 17311 - DNA, 4091 bp, Oryza sativa
ccgattgggttgttccttgctaaagtttgtaaatccaattcttgggaagagaataagaattattcaaatgctctctgtaacaagttgaagaatgctaaactcgtgcagcactctagatatttgcaattgtcagcaatgaaatctcttcaaatcttgagatctattccagcacctgcaagacgaatgctaccagtgttgaccaactcgcaaggtgctgtattgagtataccggtaaggattccactcaaaagacattattttgttttcattttgtaattttaatatgttctatttttttaagtacttcattaatccgatgcattgtttttttaaatcaaacgtgagctaccgaaagctaggtagtggtgaactactccaaaccttctaattgcatgaggttagcacagcatgaagcacacatgacctagctgcccttgcatgcatgccttttatttgttagctaactatggaaaacagctgaatatcaaagttggcactttgatatcgatttactataatatggtgagtatgcgaaactccaagagcagtactggccatgcgtggcatagttctcaattctcaaatattgaaaatagtaaaacctgtttttggacctggcaactgattaggaggtctgacttcctagtgattagccaattgcttcagtctgtcacaatttttaacgggttcagtaccaactgaaacagcaggtgactaggaaataggaatatcgtgcagccagtgacttggcttggaacagtgacaaactgaagttgttcataacatggagtagaagtcctaggtagaagtctataaaccatctggttatcttgaaaattgaccagagaattttcatgttgatttcttttctgtccaaaaccatactgtcattctattactacatgtagttactgaatgcacagttttctataagatcaaaggcttcatgattcaggtggcaaagaaaatttacagatatgaagttctgggagatattatatgtagtctttctggaacttgcatattttggtttgacatactcctagcatcgtttatcagatatttgaaggcatgtagacagtgaatgcatttattccttcagagaaaggctttactcctattgtgctaatattctctcttttttcccttcttgttaagagtattggcttccgatgttgcccaagcctattaattgaagcagtattcagtccaagagtaccacttggtggaggatacacttcatatttgtaagtggttgatatctattgatgacaaaacatgaaacatcaagtgtataactgctgttgagatgtaagcagccgctggtaatacaaaacatctgatcaatcttctccctcagtcaatcattatatgcgagctgctaatgatatatactagtatcatgtttgtcccgtataactatttcaggtgctgaatcgcttgcaacaaaccgtccaatcattgccaaatgcgaaacagccttagcttgccaacgtcgttgtgcagttaactgatgtttcgtgatccctggttcatacatatgatgatttgacaagcttgacaagaacgggatttttacacgacatttgcggatttgccagtttgcagggataaatcactacaacagttatatgccagaacaggcccgattctgcactggtttccatctcaacacctgtcgttggacatcagggtgatcatggctgaaatctcgtagcttcgctttgcagtgccaaccaggtgtcgctgaggcaatagcaacttttggcactaggcaagtggaaatgaaggtaccactagatcactgtgagagcaattttgtcagcgctggaggtggctcaagtgcctaatcgttaagaattttaaataggaggatagataaatatatcaagtacctgagcgctggaggtggctcaagtgagatttacctccccaagaatgcatcgcctagcagactcccggttggacatcagcctgtaatttgaagccaagaatcgtttcatgtgaattattcgtcagacattcttactagaaaagcaatgcttaactctacttacgaatacgataacagtgttcaagcagtgacagacaaaacactgtaaatgattgttcatgtcttggtatgtatgccttctcattctcttcacatccaatgggttcgtgctttgttcgcacggacaggacataccaccctccatatccaacagcgattcgctgtcagaatccgaaccacttgtgccttccagagtttggttcatattcagattggtagctgatgtgggacttgctgctgcagctgatcacagcatatgaacagagtagtgagcaagaacagctaaacatctgaacattgtgccccatcattagatgcagttttgatgcagcacataacacattaataactactgtccatgtatgtccattgctggaatctccatgtgctgaaacatcccaagttgacaacgtagaaactcctgttaggctgttaaccagaaaaatgatttctcatcttcccatgcttagaattcagggttccctcttaccaggcaattcgaataaaattcctctaaaacatgaaataacgttcgtttgtagactaaaattgtgcgagaaaaaaatatactactagtcactatgaaaaagttactgtagtagcaaaaaattggtagaggttgaaacagtcttctacttgaaaggtagcaggaggcaggagctgatcagtagcagtaaatgaaatttgaagacatgaaattgcagtcaattatatatggaccgtgctactacaagctacttccggtaaaactatgaagattaagttgacacatgtaaaacgagaaagatattaatatatgattaattaagttttaattattacaaatttaagaaataaatatatatttaatattttaaagcaaacttgatatagaaaatttttacacgaaacacatcattagtagtttgaaaatcatactagcagaaaccgaggtgaaatgtaaatcttaattagaaaagaacagttaataacgttaaaagtaatgatatttcacttgtgagcgagggcttccacttattctacacctctcaaatcatcttatgaagtcggtttaaagtcaagctcaaagttttcttttcctgctgattctgtcaagcccattccttagctgtggtttcctttctttttttttttctaatttaattgagaaaaaaagtctcatctttaattttggctactcaccaaaggaaaggagaaaaagaagagggggaagctgttttggtccatccaaacgccccaaaagcctcccccaccgccccacgtctctccttgcccctccttcccctccgtatttgcaacactgccattccgtttcgttcaaaatctgactcaagccctcgtccacgtctagtactgcagcggggagtatttcggggaaacttgggcgctgctagtttagggcatatttgggttgaggagcttcagctgctgtaacttcttctaaaatcagaagctctccaaaatagtccagcttttgatctagattctaaacctatagtggtataatctaaaaaataaactaaaaattaaaagctgaaaaaccttttttagattcttataagctagctaccaaaccaactgtcttgagcaacagacccttgggagttgattcggatccgcaccacgcaccgacctcccgcgacatgacggcgcaacacgttggctgccgcgcgatgtcctgcatgcgctctgacacgtggggtccaccgagcgggggcccatctaggggtgggacctagcaaggcgcatccttggtggagactggagagccgtggagtctctgcctgtgtgcacgggaggcgggctacgtgtcagcttggcgggatcttctggggcatgccggcatgtggccggccacaggttttgcacgatgagtggtggtgaatggacacgaggggagagatgatgtacatgtataagagcaaggtaaatattatagcagctgatggttttaattagtgttcatgttatttatagtagacactatagttaatatgtacgataaagaaattttatgttaactgcgatattttattat

SEQ ID NO: 17312 - DNA, 1341 bp, Oryza sativa
atttacctatgtttagcaaatctgtggcgacggcgcagtgcagaggccggtgtcttggccattcacaaatcacaattacttgaagcacaaagaaaccacactaaattatcgcctttaattgttcagaaacgtagtattcactccagagtaaaattcatttaccatatcccctatcagatgaaaacttttggaccgtttggtcacttacctgaattctccaggctctcaccaagtggatcatggattcagaaggcaactgcaataaaatcagagaaaagctctaacctccacaacatttatacttcgtagtttttcagtctcttaccaaatactgtgtactatatatagctagtcagttctattacaggacgacacttgacacgacacgaggactctgaaaaactcaagtccgttcacttgggacatcacatttttatacgtagctgagctgacaaagcagtaagaagtagttttcacttggacatggcgccattggagtggttgtcccagccccaggcgtcacccacctcgccaccgccgggcatctgcacctgctccggcggggacagcccggtgaaggggtcgtcgccggcgtagtccagcccggtgagcacgtcggggacgcggcacgccccctgccgggggttcagcgccggcgacagcccgcccaggtggccgaggccgcacgacagcgccccccgcgccaccatgtcctccgccatcttcacctgtacaaaactcggggacagcttcagagttcagaaacagccgaaatgcgtgatgccgatgtgatgatgatcaaataataatgcaatgcagtgtgcagagatgaaatgcatgatcaccttgacccggagggcctccacgtctgatttgaggattctgttgtccgtgaccgccgtcgtgaattgctgattggcatctgtcaactgcttgaaaagcgatgcgttttcgccccggagctggtcaacctgatgaacgagcacacgaattttgaaatctgaataaacccatagaccatcactcaaaattacagtaccaattggcacaatattttgttactcaatctgatatatggatggcgctgtttgaatttttaacattagcaaaggcgcaacgggtacaaatcaactcagtttacctgcgtctcgagatcagctaagtgagcttgctttctcttccttgatcgacgagcagactcccggttggaaaccatcctgtaatttgaagccagcaaccgtttcatgcaagttctttgtcaaatattccttctgaaaagtaatgtttacttctactactagcgaatacgcccataattttcatgccgtgacagacataatg

SEQ ID NO: 17313 - DNA, 5114 bp, Oryza sativa
  unsure (1)..(5114): unsure at all n locations
tgaattgctgattggcatctgtcaactgcttgaaaagcgatgcgttttcgccccggagctggtcaacctgatgaacgagcacacgaattttgaaatctgaataaacccatagaccatcactcaaaattacagtaccaattggcacaatattttgttactcaatctgatatatggatggcgctgtttgaatttttaacattagcaaaggcgcaacgggtacaaatcaactcagtttacctgcgtctcgagatcagctaagtgagcttgctttctcttccttgatcgacgagcagactcccggttggaaaccatcctgtaatttgaagccagcaaccgtttcatgcaagttctttgtcaaatattccttctgaaaagtaatgtttacttctactactagcgaatacgcccataattttcatgccgtgacagacataatgcttgacataatcgctgatgttcttggtgtaccttctcattctcttaacgtccagtgggtttgtgctttgttcgcatggaccgccctctatatccaacagcgactcactgtcagaatctgaaccacttgtgcctcccagagtttggctctccttcatgttcagagtggtagctgacgtgggacttgctgctgctgatcacagaaaattgaacaaatagtgagcaagaacaattaaagaactgagcattgtttgtgcctcatcattaaatgcaattttgatgcagtaacagcacttgtactgtactactgtccatgcatgtccattgctgaaatctccatgtgttgaaaactccaggttgcatgtgttttttcagtgtgcagtacagtagcaaatcattacatacatggatgagtgactgtttttggtgtgcaaactgcagtcttattaactgatgaaaattgtggaagaggacgtgtgttaggccataccacagattgatgattgcgactcaattgtgtagactgcaggatgccgtgcgttgaggctctgggactggggccatatgtgattgggaatgaccccagtgatggtgctctgcttgaaagaaaaacaaaagcataattaatcgagtaatcaatcatgcatatcaagaatcaagtacaatttaagataagcaaccaaagcttgtatgtatatgctgctacttataattagttgtcagtatgtactagtactaacaatcatcttcattacctaaataaattacttatcatcaattctcaataacaagtttttttttttcgaggatgttctcgataacaacttaatcaaccctgtcatgtaaactctcctgttaggctgttaacctgaaaaatgatttctcctcttcccttcccatgcttagaattcaggactccctcttatcatgctattcaaatattttttcgtgaaacatgaaacatcgtttgtttgaagtttgaagactaaaattgtgtgtggtgtgtgagcgtgtgtctcttctatatgatctaaaagaaacatccttcattttttttcctctctttttttttcttgttctctgctttcccgctgtatttactcccctccaacttaatacaatgatacgcaaaagcttatgcttattcgcgccaaaaaaaaaagagttttgaactagcaaaaaaaactggcaaacagtcttcaatttgaaaggtgttgcaggaggtgaacagtagcgattaaaaatttgcaggcaacaaattctagtcaagcataatatggaccgtgctactaccaatagaacaagaatcttagccgctctttaattaagtacacgaattaataatactccacccgttttgaaatgtttgacaccgttgactttttagcacattttgcccgttcgtcttattcaaaaacttctgtaatatataaaactataggcctacatgaaaaatatatttaaaaataaatcagataataggaaacgaattaataattacttaaatttattttttaaataaaacgaacggttaaacatgtgntaaaaagtcaacggcgtcaaacatttcgaaacggagggagcaagtagtactccactcttttaatcaagcacaagcatgatcaacaaaataatcactcaccgtcaccgagtccgcgaagccgaagctggagaggtcggcggcggagaacatggcgaacggcggcgggtgcgggccgccgccgggcttctggtcggcggcggcgtcggcgtcgtcctcccccctctcgccgtggaagaacgcctcgaagttcagctccgacgggcacttcttcatctcctcgtgtggcctctgctgctgctgctgattctttcagcggtggtgaactggtggtggtggcgtcggagtcggatgcttttagagatgccccagcgaggcagatcaccgagggaggagaaggagaagaaggagaagggaaagctcctctttttcgccccccacaaagctgagctgcccacccgtgcgcggctggagcggtgtcagtccggcgtggaaagaggctagagtatcatccttgcccctctttcccccgcatatttaccaccccctgccattgggggtccttctccacgtgtactccactcgcaagcggtacttgttaggaaggtacgctgtaggtggtctcttcctacctccccggcggccggctccggtgccggccgtcagatctccgatgccgcacacgacagggaggaggcggcggcagcacgaccactgccacatgaggaggaggaggaggatgatttggcggctgtgacgtgcggcaccgaccattgcaacgaggagagactgcgtgcaaccgtgcgaggaggtagcggaagcgtgctccgcgagggagccacgtggattctaagatttattgaatcataattcacatattcaacagagaaatattagtaaaattttacagattgctaatattttaaatctgcttcgcgattgctctagtgagcttcttcaacaactcgtgcggccttgttgaataacaacaaataacgagcaatcatgcctctgagattaataaaaaaggcagcagcagcaagcttccaggatcgatcaatcagttggcaagacagcgaacgacggcggcgtcctggttctgggcttggaaccttggcaatctccttccccacctctcctcctacctccaaatcctttgcttagcttctagagtcttttagccccttgtatccttccaccttccacctcaaaaccttccactattgtaatagaaatcagtggcttcttgtattggattcgcactgctacttctgagtttgctattgttccaagcgagataactgggatcctaacaatctggtatcagagccaccattcccccaccaaattccaccatgagtgaccaagagtgcttggaggccaatcataggctagaggagaagatcgatctgattttgaagaagttgaatgagatagaagctaacaggagcaagttcttcgaggagatgagcgcctccatcaaggcgaccactactgtcctcacggctgcatcacatcctccactccaggcaccaccttcttcgacgcccaccacctgtttgatgaagtgctccaacgacgatcgtccttgggcgacgtcgagctcaggccacatcgacaaggagactgctccgacagttgccctagaccttggggatggcgaggacaaggttcatgacccctgcatcgtcaccaaggactcatccaaggtcacgcccaccatgtgttcgatgaaatgctccagccccgatactaagcccgatctcaccatggttgcggaggttacctacgccagcgcagccactgcctctatggagttggtaactgctcaggaaaccattggtgccatgtacagcgacacctctgaccattccaaggtgatgcacaccaagtgtttgacggttgtcctcgatgccattggtgacaccggtcaagctatggttgtgttccagacctggacagatgcatttaaggacgatccaacctccgttcagttcatggactttttctcatcaagtatgatggctaacatcaagtggaacacaccaatgcccactaagtgttcggtacagtgccttgggcatggcagcatggcattgatgcctacaaacccttttgatgttaatccatggccacctcctactctagaaaaatatagaagtcaagcagttgtgcatatgttgttatttgagacactattcaatgaggagctaaggttggagagaattgaattgaagccatggccacctccaacctacgatggagtaattagtggatgggattcacagcctatggctggtccaaaattcaaactctattgggcaagagtacgtcgtttgccaccttggccgccacctatcgaagtaagttgtcttgcattggtgtgtcatgacaatgtaatgattttcactgagctgaaggatattaatttgcattggggtgagctgaaaccatggcccccaccaagtcaaacaaacttcaaaaatattatggttcagcccgagcaatgcaagtattggaaaattagagtagaaatgagtatatttgctaggaaggagaagtggaatttacttaatcagaaaagttgcacaatggttgcaatatctagcttgaaggagcatgtcaatgggcaagaacagatctggtgtagaccttggaatcctagtgactacaaggtctcccctgacataattatgttgattacttcgtccgtactgcacccctatcatttggaccatattgttagccttacatatcctgaaggtttggacactctagttagtcataaggtggttcagtttgggagggctgatactgcatgcagtcatcaaaatagacatacaattgttaggacaacagggacatttgttaggcctgagcttggtactgggaatggtacacacatattacttgtttcagaggcagaagctggatatgtgtccataaggaatttgcttgaactgacaaggaatgctaggcagtggcataattccatggttgagtatttgtcatggtttgtggatgcatggatggttgccaaacatgcaagtaattttggttggtatcttagttgggcttcccaaattaaaaatatggtgaagaatttgttgcgacaggcaaatagggccagcaattttga

SEQ ID NO: 17314 - DNA, 21217 bp, Oryza sativa
  unsure (1)..(21217): unsure at all n locations
tgagtatttgtcatggtttgtggatgcatggatggttgccaaacatgcaagtaattttggttggtatcttagttgggcttcccaaattaaaaatatggtgaagaatttgttgcgacaggcaaatagggccagcaattttgacacttctatacttgagatgaacacacatgttcagaaacattcagcttatactcaagtgcatagcagagctgaggtagttactgttaaacctgaaacaaaggagctattgaacgctgaactctagtcctttgctatgcttgtcagcaacaagattgaggacaatgattttgtattgctgcttctgaaacatctcacttccttaagattgatagctaagattgcattgatcatgccatgggatctagctgaaagcgaaggacaaatttataaagcttttgggacagtacaagtgtgcaatataaatcaagagtggagctttgcaagttcaaaagtttatttgatatcgacttgcggacaagtcgaatttcaaggagaggggattgttaggatccgtgggctgtacgtgggccaattcagctgctacgcttacaaaggcccaatcatgtctatgagattaatacaaaaaaggcagcagcaacaagcttccaagatcgatcaatcagttggcaagacggcgaacggcgacagcgtcctggttctgggcttggaaccttggcgatctccttccccacctgcagctcctcctacctccaaatcctttgcttagcttctagagtcttttagccccttgtatccttccaccttctacctcaaaaccttccactattgtaatagaaatcagtggcttcttatattggattcgcactgctacttctgagtttgctattgttccaagcgagagaactgggatcctaacataatcttgaccatttagagtcctaggttagggtcataatgacaagagggtcagaaaagggggaagatagagggggggggggagtcgttggttctattgggatgactgtgggtgttggaggactgacggtgggatgcaccatcggcgccgtggggacggaggagaacgatgggtcagcgtcggtggtaagggctaaacaaagcagttggtttggagctaggtggtgacagattatgcggtggagtacttaatggagacgtgaattaggggagggggggaggggctcgccggtgttgtttgtgccttctgcccaccaatgatgcttggtggcggcatcagtgctcgaggaagtgtgcgggggcaagctcgcgtcacacttgtgctgcgtgcggctagggaagaaggagaatgggaggaaaatgataagatcatattgttacgtacgaatcttaaagcatatagttgtccaaaatacgaaagacatgagctacgattttatgtcataagatatactcatctctagctcattcagtagtatagattaatgccctccgtttcacaatgtaagactttttaacattgcccatatttatatatatgctaatgaatctagacattattatatatatagatttattagcatctatatgaatgtagataatgctaaaaagttttacactgtgaaacagaggaaagtacaattttaagctgatgatgcgttcttaattagaaaaccactagttgactagttgtaacgaggctatatataggaattgaagatggattctcgtgcagaccagatttcggcccatccacgtccaatgttaggtggtaaaagttcaattttcgtccttcaactctatatcgagttttattcgtgtcccttgtctaaaaaaaatctaccttactgagtggtttcgataatagttttatcacatatgatacagtataggtttaactggacccaggtatatgtgaaatcctccctttcttctacacctttgaatgacgcgagtgacagcaaagtgtatggatgtgacgatagtgctaccatatattgcatcctgtgtcgccattatcacacacgaacgataactatatattgcatcctgtgtcgccattatcacacacgaaccagaacgcaagtgtgacaagggctccatggtctccgtcccatgctttgccttattctatgtcctcgtcttgacactagacaaccttatcgacgagattgaccgcttggagggcctcttctcttcgcctcatcgaacaattcctctgtttgcacatttttaccacaatcagccacccagttccctgatcccctcacctattctcattgaaaataaaactaaacaaaactgacatattacatattatattcaaaacatttaatgggtagcatcaaaattccaacaaaaatatgaattattggattagtaagagcaagtctaataatacagccaattgccggtgacagtagtatccaggtcatcaaaaaccttcataagagccgtcaaatacaataacagtataataggatggtccaccatattatctaagagaataattaactctgacaaaagcacaccaaaccttctctctctaccttgtctccgtcgcgccagccaccacacaccatccatttatttctgatatcttttgtgtactctcccatcttcttccttgtttttttatgaacacaagcagcaggccaagcttgctcttgagcttatcgtgggccgtctcccgagtccttacacgtggatgctgtgtcagcccgcggcaccacctatcgccgccatggtggcatgtcctcgagctcctctagtcatcttcatgacaaccttgagcttcacgggtaagctaagaagcggtcgcaagtgagtccgcccgctggaggtctggagcaagctaagcaatggtgtgacggtagcgagcaagcaaggagatgacgacgatcccgcgacaatctttagctccttctctcctcatcaacgccttcatatgggaagttgtgctgtagtcgggtgataggatagtcgccggctcacattctctctcactccctctcccttccaacccatcaccacattcgacgtggtctccttttcgccagtccacggtgtcttattatacctgctctaatatttgataaggtaatgatgtgatttaaaaaaaaaacaaaattcagttgcaaatgcacaggcattcgtagaccaatcctaccacgccgaccaaacaccaccttccccgccactagcttatcctcctcgtcttcccttccatcccccaacccaacccaccaccgcctcgccgcggtcgccggcgagaggcgccgcgctgcgcgcgtcgagaggatcgcctcctcctcctcctcctcctccggcagccatgtcctccatccacttcttcccggccacctcccaggccgccgccccgtcgcgccgccccctcaccaaaccctccccaaaaccccccgccgccaccgccgcgtaccaccgcggcggagacaacgagccggtgctcttcccgcgcctcttcctcaggaggcgtgcccggccccgcccggcgcccgccgaggcgcccccggtggcccccgacggcagcagcagcggcggcgggggaggaggaggggagggngggcggggcggaggggaccacnaggaggatgaggggacgaggaaggggcttgtgccggagtggctcaacgtcacgaacgacgacgccaagacggtgctggccgccatcgccatctcgctcgctttccgcttctttgtcgccgagccgcgcttcatcccctcgctctccatggttttccccccccccccaccttcgacgtcggcgaccgcattgtcgccgagaaggtccgtctgctcttccttgacttctttcctttttgtttttgtcaacagaggattcagattttacttaaatgtgctgattactgagttccgggtgcacacatttgcctaatgtttctgataaaatgtgtgccttttgaatttcgacttgggtaagtaatcaatacagcacaatcgtagaaatttgttcacgtacttgttacttgttggtttgcttcctggttgcgtagcatatgatgatcactgccaaattttgtttagacgataacctggtataagcattggtaaaacaaaatccccaacatactagaattccgcattgacatcagcaaataggcatatggacacatgacacatgttcacattatcatgctcacctctgcaggcaatggctgatcttttgcatattgttttgtccagccatcagtcaaacagtcatatatagcttgagttagctataaaaattatgaatgagctgttttaaatgggtttcacagcacttctaagtgtaacagggaagcaggcgtagacagtccgattgttggttaacattttaggacatattttttttttcatttttgtgttaaattataagaaatgatcatcgtctagttagatagcatgccttaatatgttctatgcctcctgttggcagtaaaaagttctgaaatgaggctatttattttgtaaaaaactgccttcacaagacttgttcataatctcaatagactttgatcatattggggatatttggagtaatatacgataacctacataagtatagaaaacaatgacaatattccacataaaaaagagagcatgacaatatgcaccctttgaattgcattaatctttctacataatccttagtccaaagtatgtgcttgttgtcattaacagaactagcacggtggcccgcgcagattgcgcggctagcatcactatattttctctcatataatagcatatatgttttctcattatattatttaaatatattaaaatgacaacataattttaaattttgcagtaactttacaaaactaataatgtgtaatattcatattgtattttatatacgtgttagttattaattatttttaatatcaaattttagttatttgtaaattatatatattcctatatggactctagacttgtcttttaatatttcttttttttttaattctgaattttctgtaaattgtatttctatatagactctatgctcttcttccaatattatttattttatttctgaatttttattatttctaattgtatttctatgtggactctaaactcatctttcaatattctttaatttttaatttcgaatttcagttacttctaaattgtattcctatattgactttaaactcttcttcccatgtttttcttaatttcgaattttagttatttgtaaattgtatttttatacggactctaaactctacttttaattttattatgtttatttcaaattttagtttgttttaaattcctatatggactctatactctacttctaatattccttaattttaattccgaatttcagttatttcctaattgtatttttatatggactctatactctacttttaatattccttaattttaattcggaatttcagttatttcctaattgtatttttatatggactctatactctacttttaatattccttatttttaattccgaattttagttatttcctaattgtatttctatatggactctagtctcctcttctaatatttcttattttttaattcctttcaactatttctaaattgtatttataaatggactctagtctcctcttctaatattccttatttttttaatttcgaatttcagctatttctaaattgtatttctatatggactctgccttttctttttctccgattaatgtgagaatttctaggccatgagagcgagtgtggaggctcctttttctattcctttaataatataatagatgtcacaattctctcaaacagttcctagtacatcttgggcacagggtttgacctatcggaacactgatttgtatcgggggtcaccgaagttctgaaatttcggaaatattgcggaaattttggacgatttttttttaaaaaaatgaattcaaatttaaaaattgtgggcgaaatttccaaaaaaagaacaaaaacagatagcaacactcgctctgtttggcagccatacaagcagcagcagctgcatcacaaatttgcggcaattcttaactactgcagctgtggcaaccaagctggaaaaataccaagctgaaaatgcacaaggaaatataccaatctcgtcctagaaccaataagcccaaccattcttccatcaacttctagaatatgagatgcacatgaacagaactagctggttgttgaagaatatactgagaacaaacaaatgtgaagaagagggataaccaagctggttgttgagcaccatcaccttcaccggcaggttctcgacgtggatcatggcgagcnnnnnnnnnnnnnnnnnnnnnnnnnnnnnnnnntcgatgtcgaccaccgcggcaccggcggcggccggcaggccgaagcccattgcgcctagcctggcggatgagagccactgcctgggtctcctgtaggtctagtactatgtcgcccacatctggtgctgcccgacgcccggctggagcggctgcaggcgacggctaggggcgccggtggtgggctgcgtcggggcggcgaggcggcgaccggcgtcgaggcggcgcctggcgacttggcgagatggtgatttttttcgatctgggtgtggtgtggcgcaatgaggggaggcggagggggggagagaacggcgatttagggttaggggagaaaatcgcgtcaaattttttttggccgaaatatttgaccagagctcacttacaatcgggacccaccgaaacgcccgaaatttccgaaatttcggttccaaaatttccaacgccgcttcggcataatactgctttgttttatccaactaccttttctagttgtgatgattgattagtccattattaatattttaactacgatgaatcaggataccaaattcattgtggttgttgcttattttcatttgctgaattccaacctttagtgtctttataagttccaaaatttgtttaaatttgcaagatggtatgatggaccactattaaaggtcacctgcatgggtgtataacttcaccctatatattgttattcatgttgagtttgtttatatttctgtcaaaagatgtctttttatatcttactaagcaatgtattcacatcatatcataaatttaccatatgaatgcttttcaggttacatactactttagaaagccatgtataaatgacatagtaatcttcaaaagtccaccagtgctgcaggtacttgcatattagctaaaagtgtggtgttttgggaatttggatgatgtttgctgtttttcttgatatcactgtgaatgtttctgttcaggaggtcggttatactgacaatgatgttttcatcaaacgaattgttgccagggagggagatgttgttgaggttgctttcaaactgagaaacttctttttcatgtgtataactatatcttgtaatcttcacttaattagtttctttttctgtctatgaattccttcctgcagtctttgtgtgtgttaatttcaacaccatgaaattctttgaaattttttaggtagtccaaggagtgtactaaaattgggaaacgtttactccatactgtttaagcattggagaaatcattatgtctattatgtgatcacaaaatagatttgtgatctttccatcttcctgtgctcactttgtgccatgagctgcttcatggtctcttccacatggcatgatactccacgtcagctgcaccaggctcaaaggcaaggcccgctatggcaactcctcagccacatggcagttctactttggggatggtggcgtcagtcttgcaggaacggcattgatgtttgagatgctgagtgtggatgtgaatgctggaacagtctcactcccacttgcagtggctagggcggtgatgctgtcactgatgatgagtcttgatatcttgttcttgtatgttagcctacaatgagtctgaggtcttatattcttctatgttagcctcctcgctgccactttctgccctcttctcctgcattgttgttcttcagcactgttcttccagatcagttgttttgagctagaatttgcgacaggatgacatgtctcatggaactttagtacttgtgaagtataacataagcaatagaaaaatccttaccctatgaattgtttggagtgacctacttactgtgctcaagtattaatttaggttctttctttctttctttcttttgaaacactgtgacatcctcaaacaacaaaatacttaattttcttttcatcttattgcaggttcataaaggaaaactagttgtcaatggtgaagttagaaatgaagagttcattcttgagccaccttcttatgacatgaacccagtggtaagatattactgagccacccatgaatgatacatgagctcaataatgtaacaaccaaccaaatatagtttgaaccacattccccagttaaggctgatgagcaataagaggattaagaaaacacaaatggtttattagttttgattcactgacactacatatgtggatgtgtcagtggaatgaatggagacatttgaagaaacaatcttgattagatcccttactgttactgatttttaaatactttatctgcattaataatcagacgtatatcatgacgaattacatataaaaacttgcattttgcgtgtggtatacctccaagtaagctgaagacataaaatttctatagaatctattgaatagtgctcactagccacacctaggtggatatagatatggttaccactatttatagatacattattgtgtatggtttcttgtgttgtgtgctgtgtgcatattctgtacatatgcatgaacatgaagttgtcaacaacacttcatacttgatttatgtttcaatccttgtagaagaaaaatgaacatgattcttttctgggttatatttttgtgtttgttgatactatgtttttcatgacagcaagtacctgagaactcagtttttgtaatgggagataaccgaaacaacagttatgattcacatgtgtggtaatactctctgctgattttcccatgttacttactattaacttgttttgtatcttaattgaattggcctgtacaatactgctattattttcctcaggggccctcttccttctaagaacatattggggagatccattttccggtattggcctcctggccgaatagggagcactactactgattgcctcatccctgagacaaatccaagctcgcttattgatgtcaaactggcaaagtagaagttcaggcattgattattgcagtgtgaagtttgcgcttcatgtaagctcctattctttaatattccctctctcctggaaattcggaggaatatttgacagcaggccacgtagaaattagaaaggagaacacatttggttctccttgatgtcacaaagaatgctagcaactagcatgagcatagaaaccattttgtttcaaggtttctgcgactctcgctctttgttgtatattaagactgtaaggatgttgccttagtgattcgcatcaaatgattcttcttgtacatcacgttttgtagcaccacgtgtgtatcatcctcatacagtgcttgacaaaagatgtgtaacgcgttgagccggcagttcacttcattgccttacatgttgctaatgctgacagattcttcagaattcaagttactgccatccttttggtctgtatgaacaattgctcccccgtgtcggtgtactcatggatggcatataaatatttaggtttaaagaagtggattgaaaaatatatattggttatcaacaatacaatttcccaaactatatatgatgattctatgagcagggatcctgcatatttttcagacgggagaaatctgaaatctgtgcaacctatatatatatcaatccatccacgcggcacgtcccttcaatatcaacacggtggcgtgcacaatacacagtcgcacagaagaataacaaacaaattggtgggtgttagtttccctctactgactgaaatcgcttgcttgctttagtttagtcgcgttggcatggaagtaaaacccatatttagtcagattagattccctcctcacgcagcaattggcaaatgcttggttggttcgcaaacgcactactaagagtgaataaacagtcactgcaacatggcccagcagcaaattaagcaggataaggccatcatttcgatccaaaccggccaaccaagcaagaaaaccagcaacacgtctcgatgtcatcacatgtacatgatctccagcgatatagagcgcgcgcggcgacgagtcacgactgcaatttgcgacgcaagaaacctcctccctttagatcgcggcaacacatacgttatctctgacaaacaaccgtgaaaagaataatggccgtttcggtagatcgatctccaattgacgatcgaattgggaagaagcacctctaaccttactgctccctctgatgtggtgttcactgatatatagactcacaagctatggaaccgatatgccaaccactcaaaaacagagaaaagtaaattagagattcatgagctgtgaaaaataattaagggccgttttctagctgtcctattcatggatatgatcaattggtaagtgcctgcaggcacctagccagagactatcccgccgtattatttcgaccaaattctccaagcaaacatgggaagatagatacgtactcctacgcgtgtgccgtggccgtacgtacgtgtgcctgcatcttcaccgcaagtcatgcacatgcgcatgtgcttcatcctagcctacgttgctgttcccgctcgccacacactttcgcctttctgacttacacgcgcgtatatatacacgcagcacgtctgcaccggccgtttcaccattcctcgaacaccatcatccacaaacacacaagtacatctcgatcgaagctagctagactagagcacgcacacgtacgatctcgtccatggcgggcgtcgctcgcatgctcgcggccgtggtctgcgcgatcatgccggcggcggcgatggcggccggcggcgtgggcgcgctggagccgagcgggtgggtgagggcgcacgcgacgttctacggcggcgcggacgcgtcgggaaccatgggcggggcgtgcgggtacggcaacctgtacgcgcaggggtacggcacgaggacggcggcgctcagcacggcgctgttcaacgacggcctcgcctgcgggcagtgctacaagctcgtctgcgaccgcaagacggaccggacgtggtgcaagccgggcgtctccgtcaccatcaccgccaccaacttctgcccgcccaactgggacctccccagcgacagcggcggctggtgcaacccgccgcgcccccacttcgacatggcccagcccgcctgggagaagatcggcatctaccgcggcggcatcatccccgtcatctaccaaaggtaaacaacacaatcacatatgtctagtggtcgttgcagtgacctgaatagcactctaaggttctaagttcagatcttcataggagtgaatttcagattatgttgtttgagggactgagtttccgattcaagacgatttgagaggctggataaaaaataccattctctaaaaaaaaattatcaccttcgacatcgcaacatcgatcaagcattgatgattgattctactgggtggcggagtcaaaaaaaaaaacattcacatataaggctgagctaatgaaagttcaaatattttcacaaccacatagtattttttaagattataatgagagctatggatctaggcattaggctcgagtcctggctgccccatgcctgatgcggcctcaaatttgtactaccaccgtaaaaatcactttatttttgatgtttttgtgtagggttccttgcatgaagaagggcggggtgcggttcaccatcaacgggcacgactacttccagctggtgctgctgaccaacgtcggggcggccggctcgatcaaggccatggacgtgaagggctccaagtcgccggactggatggccatggcgcacaactggggcgcccagtggcactcgctggcctacctcaccggccagggcctctccttccgggtcaccatcaccgatggccagacgctcgtcttccccaacgtcgttcgccccggatggaggttcggccaaacgttcgcgagcaacatacagttcaagtgagccacctgatcgatcgaagcttctatataggcgcagctagcatcgtcgtgcatatgcgtgaaggatttaatttggcgtccaaactttatatatacttcttttccaaaatgatcgatcactctctcaatttggatgctgatgggggttgatttactatggtattgtgtaattaattaccagcctgaaaccaacattttcattgggcttttgtatgtatgtgcgatgtacataaagagttcgatctaaatgattcttatggaagtatgattatcacgcgatttgagtaaactccaaatttggtgtttagttgagtagaccataagttggattcccttgaggagataattacaaggttcttaattagtgtgttaaatttgtaacaccttctggtatatagctattttggttcaaaatccgtaaaaagatctcagataataaaattgtcgaacgatcaacttgttggaaagtttttgtaggcagtggcgagttacattggggtccagtagatcgtgtatagtagttgtgcttgcttgttaatactacctccgtctaaaaaaataaataaatcaaatttaacttacgaatatggactgatgcttattgagattcacagcgaaagaaatcaattttaacttatggatatgttacaaccgtgcgcgtaagtaaggtcgatctacacgcgatgactatactttgtttaagatattcgcaacgggaaatataatcttgaagctagctaccttgtgcgaaagattattagtcaaaacggtgaagtacatttgtgggtttccagcgtcaatgcacctagctagaggcagctatatgtatatagcttgaacagtaagcgttagactctgcagctaattcaagcaatggcgttgagaattcgttccccacaacatccctcacatgcatatgaagctactacgtacttgggatttcgtactaacggttcagttttctctcgttgaccttcctggcgtacaaaatttgtcctcgctttgcgtcaatataatccgcctcgacgaatgcaagacgagaagcccacgtccgtgcgcgctgtcagcccagcccaatttgccttatcccttttcctcttcttgccggcccagtccacttcctcttccgttgaaaaacgagatttgaaggaagagacgtctctctattgtgttgaggattgaacatgggactttagtattactactacactataaagtgtatctggcttcgtcttccatttgtcttatcgcgataaccgaattgagctagatcgagcgtaggcgatcgaggtgcccggttccggcaaacgatcaagcttggggaccaacatgatggatgggagttgggtaacgagaagactcgctgtcgccgatactgaaacccgctacggcggcgccaccgtgcgtcgtcgacttggctaattgcaacatccacaagaagcaacctgtcacaacaagtactacaagtctctacctgatgagcccggcaaggtgcaccgctgcagctacctcctggtgctccgcgcgcgcggcgagctgctgctgtccagcgtcctacaagctacaggacgccggctgcaccggccacgagcgcccctctcggtgtcggtgcacgtacgctttccattgcgacacagccttgcacgcgctcgatcacgatccggacgacgacgaggcgccgccgccgagcatgcatgggagagaggagagacgacatgctcggtgaccacgtcctcttcctgggttacccgtgcagcttctaactaaacgttaggcaataaacgataaaagaataatagatcaatcataaaagacacaagatttaacgtggaaaacccttccaaagcaggagagaaaaaaccacgagcgccagccaacaaaatatcttcactatatcggggtgagattacaacaccgaacgacggcttaaaagaggtatatatatgatggtggaaccctaaaagggatgacgatccgcttcgctctggctcaagcctccggcgacaggcctccgctgcgctccagcagaagctagcctttattatgtgtaaatgaatttggaccacaactcaacagcttcgccgcggacgccgtgcggtttggctgggacgcgcgcccaacggcagcgttgacttcgttgttaggtcggagttagtgtaggaagaaatagaaggggtttaaataaactagataaactacttccccttcccatttacatatagtaaaagattttagtaggggcttcatgagagctctcatggtcctcgccccagtattagaggctcgagaccctgccacattcatgctagatccgcccttgggtcagaccgtcggagccttgccgtgtgtataggtacaacttcacgtggatgcatggcggcagtggcggcacgtgacactggtggacatgctgcccgccgaatggaacgacaagagatgcacgtggttctttgctgagcccgacattaatgcgaagaagaagaagaagaagaagaagaagaagaagaagaagaagaagaagctccagcaagccggcaacgccgagacctgtggatctacgttgtcgatctatccccgaaggtggatacgaaaagcacaaaataaatttcctaagaggctaggactaccttaggcaactctcgcaatttcctaagactaaccacaaaataaattacttttaattgaaaaaccatatcatatcatttgtgtgtagcactagcaacttttgttcgaatggtcagaccgttgctgacgttttatataaaaaaaagggtatcctattttaaggagaaaacgagaccaaactttacaatgcatagttgggaaaaagtgaaattaaaccacaactacaacaaactctccaactacgacggcaacaaaaagggacagccaaacacaacactcaacaaacgttgctcaacatgtgaacaacaaggggccaatcaacaagctagaacaaaacaaaactcctacactggtcggcgtcagatgcggccctagaagtgaaggcatgttggatctggggcatccacaccttggtccggcaactcaccggctcggctggtgatgatggcggctccatttattggaggatgtcgacaactgtggtgcaagaaagtaggccacctccatacgctgtgatgggctagggcggctccaaacacacctgcgagcgagcgcaaccgatagtgggattgctctaacatttgtagctcggtgaagaccaaggtgaaaacttgaacgatgatgcctgtgggcgtcgtttctttcttggaagcattttatgtgtctccccgtccagttgtgttttgattctctgggttaaaatctagcacaattcttgaatcggcgatgaagacgcattctggcatcatgtccttcttgaagtcatcatggaaagaaatccatggtagtccctagttttaccttgcattgcatgaagaatggcatttgggaagtctgagctgcaatgttgaggcattcgacgagcttggcaacgatgactcgaagctttgcttggtttcattcagggtttgtctgttgtcctttgggaagtcagtgctgctgcgcgattgcaagcttggcaacaatgacccacatcagaccacgtcagtcgtgtttcgctcttgtgtggggtagcaagcttttcagtttgcatggcttgtcggtcttgctcacccgtgcacaagcaagactggtgatcgtgaagtcggagctacgacatcgacgaggtgcgacgtgtgacaacgatgacatgagtccttttgagttatgcttcggcatgggtcgaggcgttgtcctgacttgttcttgacgaaggtgttggagtcacctgatcacgtgggtgatggtgtaatgacgagcactagcagcttaaacctgccatacttgagccacacacatgtgacatatggtattcgtaccccatcacagaccaagtcatttgtgaagggcaataaaacacaataggtgagtcatgtgaggttggaatttccacccggttgatcataggggttaactcttagggaccctgtttagatgggactaaaacttttaagtccctatcacatcggatgtttggacactaattataaatattaaacgtaaactattaataaaacccatctataatcttggactaattcgtgagacgaatctattgagcctaattaatccatgattagtctatgtgatgctacagtaaacattctctaattatggtttaattaggcttaaaaaatctatctcgcgaattagttttcatttatgtaattagttttggaagtagtctatatttaatactctaaattagtgtttaaatacagagactaaagttaagtccctagatcaaaacaccacctcataaattcttgcggaatgtgacattggatctataaattttctttttaacataaaaaatttcactatgatttgtgataggtattttatacggaccatcattgtcatatatcactgatgggtctcacctctattacgattactaggatcctaccatcacactccctccgtttaaaaaaaggcaaactctggctgtgtagatatgatgcatgtccagatacatagttagagtatactttttttttttttgacagagagagtacaattgtcgtagtgcctattaaagccttagagggtaataaatagcgtttttcgcatcgagcaggcccatgcatgatgcttgtagagtcgtagttgagtctgagcccgactttgcgatgaggctggccatgtgcacccatatcacccggttctccctaatcagatttatcgattacgagtttattatagactagaaaaagtgcccatgcgttgcaaagggaagaaaattaaggaaaatctccttggcggatccgaccgtttggagcagagggacgcaagctgccgtctgtctcgaaggcccgtccatctcgaaggtggagcaaggagagcggagccgataggtggcactaaagatgacatatgtttttatgatctcgggtgtgttaggtcttggatacgactcatatgttccgcttgttattgtgctcttttttgaggatttttgttctgtcacaccctcattttcgtttaagggatttgtaaattatttctaaaatttatattaaatttcattaatttacaagtgaagtttaatgtgagaaataaaatttcctaattaaaacatgtctatatttaatcatttttaaattatatatccatgattaattatactcttaggaattttcctattattaattttaataatacaaagaacattttagtaattatttaaacaattactccttccatctatttttgatagttatatttcatcttggcacaatgatcaaggataagtaattctacttatcatccatttaaacatgccactagttattcctctttttttttcgaacacgcaaaaggattacacgttaatatattagaggaatagagtttttgttacacaacgcaatcggccaaaccggcctatgccagagaaggaagaaaacaaagccaaaaacaaggaagaaaaagaaaaattcgtacgacgggtaacgctactccaaacaacgagagggggcagagccacgctacactcccaacaagtccccaaaggaagcaacgcccgctaatgaccacgcagccgaccctccgaaaggactctagaactactgagaccgaagagagcgcagagtcaaacatcctagagttacgttccttccacagctgccaagagaccaggaggaccagggggtcgaagctggcacggaggtgatcaggtaaacaagccctagaagatggctaccagtcctggagccagctgccacggggttgggggggggggagagcaatccacccaagaggtgacagcacccgtaactagactcgacgagcgaacacgcagtcgaggaggatgtggtttgccgtctcaagctcttgagcgcaaaaggggcaagccgagtggctattgatgccacgcttctagaggagatcagccgttcaacagcactgctgaaatgcaaaccagaggaagaatttgtatttagtagggcccttcacgtgccagagaagattgacacaagcaaagaagtgctggccaaggaagaatgcctggtacaccgaacgcgccgagtagtgctggtcactcgtccaacaccagacaagacgattcccgacacccgacgaaagctgaatgtgaagcaccatgtcccagacaagaagaaactaggagatgaccgggacagtgagggcgctgtggatgtcaaaaatccaagtgttgttcgccaggccagaagcaactgtgcacgaaccacacggccactgatctggagctaaggaggcaaccgagcggccattgatccagtgggcagaccagaaaagaatcgactcaccatcaccctgcacgaagaaggtggatgcctgaaacatgtcagaaacggcttgcttggctggggcctttaggccgtcctagtaaggatgccctgagcgctggagccaaagccaacaaactcgcagggcaaaccctaccaacctgaggtcagcaattcctaacccaccgaaagctttgggatgatagacattcgttctagacactcggcactgcccaccatgaaccgagtccgtgcccgtccacaagaaggtgcaacgcttcttgtcaatggccttgatcacccaggttggaagaccgatcgccatggacacatggactggtaaggaggagagaacagactggaccagcacagagcggccagccagagtggcgagtcgtcccttccagggtggaagacgatgggaaactttatccacaagcggttgcagggttgccttcggcaacttgtgaacggacagcggaatgctgaaataggagcagggaaaaaccgaatcttgtgtggaagaatgaagagtcgtgcattaaatcctcataaacaagcgattcattgatatttacatttctcgatgcgcatgtagccaatcttgtgtggaagaatggagagtcacgtattaaatccgagaaagtcattaatatgatacgtggttggattgaaatatgtctatcaaaagtaaattttttagatttggaaatatgcctatcaaaaatagatggaagggagtattaatgattaaatggtctagataaatattttgttaaatactttgagtgtccaattattttcatgttttttttgaaattatttaagcattggaagtgtttttgaaaattcaaagatcatttcagtgattaacattgacgacgggtgaggagacgcgatggcgcatgtcgaaaagagctacgtccacgtacgctagctctctggagaatcgagggtccagagtcggactgcttgcacgtatccatgccccagccgcaagcaatataatcggacaaatactactacgtctctatctctatttctactattaagatgtttttactggtggtttagtaagtcatccgtatccgaatctaattgccatatgctatcttcgattcaaaaactactgacgtgatccgtgggaagcagtgccatgtccacgtccgattcccacgtacatcgccatcgaatccaaatatgctcccgttgcctttttttttttcttaagcatgtccaaagcaccccctccgattcggttttaccattgccacgagcccacgatcaagcgagatggacttggctctgtactccgtatagattggagagatgtgcgcctggttagattggaaggaaataccgatggtgatggcctgcatgtgcatggctgcatagttgcttttttgcctaatctataactaatataaatattcgtattttttcgtttgtcacatctaattttcgtccgtgttttcgtccatacacaatccgattcggttagcaatagccacggaaaaaaactacaaaaaaaatcggtcgtcgccgaaccgccgtcgccgccgcagggacgcctagccgccggcggatcccctcctgctggatccggcggagggaagagcgccgccgctgctaggacgccgacgggccaccgccgcctcccctcccgctcgatccgccgccggtggtgggggagggcgccaccgccgctgccggtggtggggaagggcgccgccaccgctcgtgggaggaggggcgccgtcgccgctgctcggggggaagggcgccgccgccaccgccactcggggaaaggtcgagagagagggagagagcatcgggagcgcggaggggagggtggcgaaaagagagaagggagggaaggaaatgggctagggttttttcggcggctgaggagagggaggggggtttgattccccgatctcgacgctcggctgtccgatcaaaaccctagagatcggacggccggcgtcggccgggctgaaattggccctgagggatcgagagcgaggccacttttctggcccaagcctaggttgcggcctggagaggggaagtgcgcccgcgtgtttgcaaaagccatgggccgactagcaagggctggaaagaagtctattttaggtccctcgggccgaagaaaaagagaagttcattttagtacttttttttccagaagcatttacgattatagttattgaatgtgtttatttctgagcaaacctaaaaggaaggattttctttctttttccaattaaataattgttaaataatatttgtattattaaaattagcaattaagctctgaaaattccaaagagcgtaactaattctagagaatttaataaaattaaatttaactatgtcattttatttctcaacttgctttacttgtaaatttatttaattatacacttacctaattaacaataccaaatatttcagcgaatttgtagtttaattaattgcatatttttttatctgtacgcttcccgttgcaacgcacgggcacttttgctagtccctcataaagtataatttatactactaggatactacagggaaacggttttaacagctcgtggatgtccactagtttattgcatatcatttaaatagttatgaaaaaaattaaaaaaatatgaataagatagatcaata

SEQ ID NO: 17315 - DNA, 825 bp, Oryza sativa
aatagtcaatttaataaacaatcatctcatcaatattcctgactcaatgattagtgaatagcagtttaattataagtagaaatgatacataggtttgaatgtgacatatataatctatctatttgacggagcttggggctcctcaccgggagaccgcgcaggcctccctttgccggttcggccgggggccctgggtgaggttctaagctcctagcctgtggaaagttcgcgagagtggaaacacacaagacacgggcgatgtatataggttcgggccgctgagaagcgtaataccctactcctgtgttttggtggatctgtgtatgaagaagctacaaagtgcgagccagcccccgatcgttctgggatcgtttttttccttctaagtgggcaaggtcctccttttatatctcaaggggataccacatgcaccatctctccctttctttcttttgtgtggggactcatcctctcttccctccaacttcacttctcttcattaatggacggagatttgtatggctgccgtccgaatgaccttctcatgggacggcccatacctacctccacttccgccggaagcaggcgcgacgtgggaacatggctgtctgctgacgacatgaccattgtcagaccggtcacaaatcggtcattcttgtccaccacgtgtcagtttaacaatctgcatgttcgcccttcttcatacaatatcttgcctgtaatggttaggatgaagcctggcatatatctgaccggaaccaacgtgccatctccaggagctaacacgccggctccggctagggacgagtgcttggaggctctcat

SEQ ID NO: 17316 - DNA, 5292 bp, Oryza sativa
ctttactcgcagggggatgggacgcggaacgcggcgctgagcacggcgctgttcaacgacggcgcgtcgtgcgggcagtgctacaagatcgcctgcgaccgcaagagggcaccgcagtggtgcaggcccggcgtcacggtcaccatcaccgccaccaacttctgcccgcccaactgggacctccccagcgacaacggcggctggtgcaaccctccacggccgcacttcgatatggcgcagccggcctgggagaagatcggtatttaccgtgccggcatcatccccgtcatctaccaaaggtacataattaacctacaccggacaaacacaaatcgtatttgtttttgatattgcacacctatatgacaatatataagacatatttgtaacatgtattttgtgatgtttttcagggttccatgtgtaaagaagggtggtgtgcggttcaccatcaacgggcatgactacttcaatctcgttcttgtgaccaacgttgcaaccaccggcttgatcaagtcgatggatgtgatgggctccaactcaaccgactggctgccaatggtgagaaactggggtgcaaattggcactcgttatcgtatctcactggacagatgctttcctttagggtgaccaacatggacggccagacgcttgtcttcagaaacattgtgccgtcaggatggaagttcgggcaaacatttgcaagcaaactgcagttcaagtgatcatcctgaattgattgggtttctactgcctgactgattatttatgatggacatttgcacagtgtatatatacacgttgtaaggactattgaattgtgcttctgtgcactattgcacatatgattttttttattttttattttttattgtttatacctgatttattggtgtatatatttatgtctttatcccatatgtatgggtgggtacttgtatatacaaagatgtttatgctcttcattgaatcaaaacatattcagattaatttttattacacttgtatcaacttcaactaaagttatataaaattgtaaatatcttataagagagggagtcatcctcctatccctctctcccccactttcacgtaaaaaattcttcctttccgtaaaaactgttcatcctgaaaatagatttctcataaaaccgaccatggtgtagaaaaccgaacaggtcacctctctgaataatttcactaaactaaataagaaaaacagttgcaacgcgggcctataatcagtagagggaaacgtcggatttactaggccaccaagccttagcacaactaaaagatggggtggaatggcagatgagctctcctagcataacacagcagctaaaacgattgctagcacaactatgcattgtaacaagtgaggcgcctgctgtgtgtccacgttcaacagatttgtcacaagaattgttcacacaaggaagcataccagccatgtgactctgaggcaaagatgatgttggaaatatggtcgcaatttggcatattttaatccaaatcattaagacaataagcatgacatttttagggaataaactagtgtgaatactaatcaagagcaacatacaaatcatgcttaatatagaataagcataaacattcatcacatggcattgttataaaaacattacgcttaatagtagtatatcagaaattagcgtgttgggaatagagacatactctaaaaatggtccttcgctggagtgtgaggcatagttgcctccgttgatggagccgttccctgcaccgcctcctccattgctgacatctcctccagctgcaccgttggcgttgtcgtctgtcgacatgttggcgttgatgaataggaaccaggaactcagacccaggaactcagacggaagaacgctccgcaaaaactttattgcccgcctacccgtgcaggaactcagacggacagagtttcggaggctctactcgtcccaatctcttttgcacgtaagagatcaaagctagggacgacggaagccacggcctcggcccagccaacgcgtgcgcgcgcacgtggtagtccgcccaccttctcaaccggtcaatagagagtcataattgtctctctatttaagatgagatctctccactaaaatttttaagatggtattattatcactaacattaattataggcctagggaatttaattgaattaaatcggacctgtcccttttattcaacagatgaatcgcgtggtttcaaggagtattcatgtttggcaacatcatgtgcatgatttggatgagcggtcaagatgacccatgtatacacccatttcgtttgatctctgtattttcagacggaattgctggtggggacgatttctgacgcattcatagtgagcaattacaccttaatcttgtttttcattaatagaaatggcacatgaacccttgtaaaataataattatgtgacttattttatccacatcaaatgttcaatggtacaaagcattgtaattagagtagtactatacatccgactgagccatacgactctcatacgactgcaccaaaccaaccaatcacatgagttcataaatattcacgtgggcccaatcaaaacaagttaaaatctgttatgtgcagtcgtatgcaggtcatacagacacagtcgtacgtacagtcattccgttgtaattaatctcgttctatattctatactcttgcaaaatttcgggtctatcagcccaccccccattcccaagtacgaaattatttaacccgaacttttttttatttttcattttttatgaatttagccattgtgttaaaatattcaaataatttaggatcaaaattaccgaaattttagtcggtacccccatacaactagcaaaaaagggatttagaaaacattgaaggctgaatacacaaaatatattggacaaagcaataccaaattgttacgagttttctaatcagagtggcgcagcggaagcgtggtgggcccataacccacaggtcccaggatcgaaacctggctctgataattttttccataatttttggcgctacgcaatttcatttaatccttttttttggctcaatttcatttaattcattttttggcgcagtttcatttaattcatttttggcgctacgacgatttcttttaaattgattttttggcgcgatttcctttaattcattttttggcgctacgacgattttgtttaattcatttttggcgctacaacgatttcttttaaattcggttgaatttttgggtcgattgttttgtcaagatttccattaattcaatttttggcgctacgacttttttggtcgattgttttgtcacgatttactttaattcattttttggcgttacgacaatatcttttaaattgggtcgaattttcgggtcgattgttttgtcacgatttcttcaattcattttttggcgcgatttcctttagttcattattggctctacgatgatttcttttaaattgggtcgattcttttgtcatgatttcctttagtttatttttggagcgatttcctttaattcatttttggtgctacgacgatttcttttgaattgtcttttttggcgctacgacgatttcctttaaactagaaaggtagcacacacacatgcgtgggcatcttatttaatgtgtttaaaattttattaccaacgtttatttgtgggtgattattattgaaatactttttgactatattctaatttgctagggattactttgaatgtcactccctccgtttcacaatggaagttattctagtatttcccacatttatattgatgttaatgaatctagacatatatatttatctagattcattaacatccatatgaatgtggaaaatgctagaatgacttacattatgaaacagagaaagtagttatgattttcttgtagttacccatgcaacatataaattctaaactaaaattacatcaatccgtatagttttgaatttatgagaaagtatatggtgtcacaacaattgagttggtttctataaattatactatatacatttgcactatgtatctttcttttgttaatatttagcatattttttacattaaataacattttttcttgtctaccatagattcaattttttcccataatataagtgaatctaaagtacaattgttctatccaaccaccgttcatttaatgtacgccgtgactgaccccctcccgtcttgcccacgttggtcgctcctcaccgtgacagagagatcgatggggaaggaagaagataagcgagagtgaaagaaagatgatgaatctgacaggtgggtcccacgtgtagatgaggaggaagatagaaaacgtaacgacgatggcactctaattttgtaaaatttgagtggacagctatgaatagacaaattgtaatgatatttatctgaataggcatttttcaatggcacgaatcaaattaacacttacttaataagcgggtatcatagtaattttccttcctcgttagcaacaatgttgagcaccctacgatatcttgctactacaggtgaaataactcaaatattttttttcaatttgttaacacacttggatgaattttaaatctaataatttctccaattgattatatgctttaatgattcaataaatacataggttatattccaatgagattagccgtgattatctttgattatatgtagggtgtatgttatggatttttttcaatttttttcatattgtcatatacatgttttttcaatttaaaaaagttacgatgctgctttattttatttcatgagattgacctattctgttgtttgtgtttaatctatattgcaagttaactttcttctttaccacttgacagcatagatttaccgaatctcgaatagtcaatttaataaacaatcatctcatcaatattcctgactcaatgattagtgaatagcagtttaattataagtagaaatgatacataggtttgaatgtgacatatataatctatctatttgacggagcttggggctcctcaccgggagaccgcgcaggcctccctttgccggttcggccgggggccctgggtgaggttctaagctcctagcctgtggaaagttcgcgagagtggaaacacacaagacacgggcgatgtatataggttcgggccgctgagaagcgtaataccctactcctgtgttttggtggatctgtgtatgaagaagctacaaagtgcgagccagcccccgatcgttctgggatcgtttttttccttctaagtgggcaaggtcct

SEQ ID NO: 17317 - DNA, 759 bp, Oryza sativa
gtaccctagatcactcaagagatcagagctcctgaatcccatggatttaacattttcattttttttactccacaacagcttgctagaagcctcgaatagtgatagaattcggatgccgatgcacgtagtaataattatccatcgactaattcggctgtcaaagttctacaaataatcagtatactgtcctacttatttaccacaagcacgaaggcaagcgtctctgatgaggcgcatctcgtcggcggcgacgctcatggccatcctctcgtagggagctcgccgggagcagctgagcccgaccctaatggcggatgccaagcaatcgcgcaccgtgacgcgcgcctcgctctcctcctccgacgtcgtcgacgacgctgctccgtcgagctcctcggcctgcagcagcagggccacgtcgaggatctcctcgatgttgtccgggaacgcgccggcgacgaactccggcagcgtcaggccgtcgcggagctcgccgtccgtcggcgccttcccggagaagatctcgaggagggttatcccgaagctgtacacgtcgccggaggccgtgaccatccccgtcgtgccgtactccggcgcgacgtacccaatcgtgccgcgtatgccgatggtgctctcggtgttcgccgccgcggcgccatggctggccggatcaagaagcagcttggcgaggccgaagtcgccgatgcaggccgtcatgtcctcgccgaggagaacgttgctcggcttcagatcgcagtg

SEQ ID NO: 17318 - DNA, 784 bp, Oryza sativa
aatgaatttttggtgttcatcggtttgcaaataattgagctttgctaatggacaatcacctattagcttgagatcctttgccttattcagcacatcagttgaaaatttagagctcggaaaaggtgtgtttgggcagttctgtcgaaattgatcagagtatatgcgtgcttcagtgactatctggttgatctcggatactggtggtggttgctttacataggaacacttataggacatatgaacagaagatgactccatcagatcaacagaacaacagacaagtacttttgtacctttggaccttggaactgcacaaaggtaacaaccagctacactcagggcagcctgcatgagattcaagcagaactgaatgaaccatgaaggatcttattttgctaaagtacagaattacccaatagtacttttcctatagagagatcatgatgagtattaacatagcatgtgctgtagaagaacatgatgagtatcttatgcaaaaaaagatatattgttggaggtcttgggttatatcttttgcacaagtgtacagcagcttttgaatgcgaacttatgtagtaccaagagatgctatggataatcaatattgaaattggagaaaatactgtcataagcttaaaatgtttgtgaatgaaaactattgttgaagtattcggagatgagtacttgagatctccaaatgataatggcatagatagattacttccaattggagagtagagaggttttccaggaatgctagggagcattgattgtatcaatgatt

SEQ ID NO: 17319 - DNA, 1447 bp, Oryza sativa
gtcaaccctctcaccggccgcgccgccgcctgcgccgtcgacgacccgtatctctcggactggattgataacgagggctcccgctgcatcttctccggcgacggcaccctccttacgtgctgcttctacgacgcagggccacccttatctatctacggtgccatttggtgccccgattaccaacaggtatggaaaagactcggcgacgccgacagtgacgaacgcgcctgcgccgtcgcctaccacgacggcgccgccgtgtgcgtggacttggcgagatgctacgtccacgagatcggaggtccagcagctggggatcaaaccacgtttctgccgctgcctgatgagcccggcaaggtgcgccggcgcagctacctcttggagcttcgcggcgagctgctgctggccagcgttctacaagacgccggctgcaccgacgacgacgacgacgacgacgacgaccgcctctcggtgtccgtgcacgcgttcgatctggtggctgcccttaacgctctcgatcagctagatgcagctgtggacggcgccggcggcggcgacccgccgtcgccgtcagtgtgggagaagatggacggcgcaaccggtgaccacgtcctcttcttgggctacccgagaagcttcgccgtggaggccgcgaggtacggcggggaggtgcccggcggaagcgcctacttcgtcggaaggtcgaagccgtgccgcgtgtacaggtgcagcttcgaggacgacggcacggcggcgacgctggtggacacgctgcccgccggatggaacgacgagaggtgcatgtggttcttgcccgagccggacattgctccggtgatcggagcacggacctaggaagaagaagaagtagaagctccgcgaagcctgcggcggcggcgagacctgaggatctacgccggcgatctgccacagaagatgtatagatccaggcggcggcgagtgatgttcatcaggcactggaaggaggtgttccttgcgtgtactccaatggagatgatctacgccttatgttttgttggcctcctcttgttttttggctcactattttgtaggctgatttgcggttggtttttttagttttgctatgttttagtgtactagcaaaaggatcgtgcattgcactgcatgcataacgacatggtgaatgaagtttgaccttaacgatttatcaaaacacccaagtatatatgattactaggtgaaaccccgcaaaaaaaataacgtgtaagatagctagataacatcagattaagtaaattaatgtggtttataataatttaaatttaaatagtgtgtagaatgatgattcaaacgaaaaactaaggcggcgtgattttatggaagaagaaaagtaaggagatagtttggaccgtagattaatcatctaaaggcaaaaacaattgatgtgatatgatttaattagagg

SEQ ID NO: 17320 - DNA, 1729 bp, Oryza sativa
cttcaaatatctgataaacgatgcttggagtatgtcaaaccaaaatatgcaagttccagaaagactacatataatatctcccagaacttcatatctgtaaattttctttgccacctgaatcatgaagcctttgatcttatagaaaactgtgcattcagtaactacatgtagtaatagaatgacagtatggttttggacagaaaagaaatcaacatgaaaattctctggtcaattttcaagataaccagatggtttatagacttctacctaggacttctactccatgttatgaacaacttcagtttgtcactgttccaagccaagtcactggctgcacgatattcctatttcctagtcacctgctgtttcagttggtactgaacccgttaaaaattgtgacagactgaagcaattggctaatcactaggaagtcagacctcctaatcagttgccaggtccaaaaacaggttttactattttcaatatttgagaattgagaactatgccacgcatggcaagtactgctcttggagtttcgcatactcaccatattatagtaaatcgatatcaaagtgccaactttgatattcagctgttttccatagttagctaacaaataaaaggcatgcatgcaagggcagctaggtcatgtgtgcttcatgctgtgctaacctcatgcaattagaaggtttggagtagttcaccactacctagctttcggtagctcacgtttgatttaaaaaaacaatgcatcggattaatgaagtacttaaaaaaatagaacatattaaaattacaaaatgaaaacaaaataatgtcttttgagtggaatccttaccggtatactcaatacagcaccttgcgagttggtcaacactggtagcattcgtcttgcaggtgctggaatagatctcaggatttgaagagatttcattgctgacaattgcaaatatctagagtgctgcacgagtttagcatcctccaacttgtcacagagagcatttgaataattcttattctcttccaaagaatggatcttacaaacttcagcaaggaacaaccaatcggtatcgaacatatgcctaatagcaagacttccatcctgatttaccatacaatactggcaagtatgcttttgactgtcatgcaagcacattccattcacaacaacctccgaggttctccatgtaatcaagaacctgcccataaagtggcatgtttcaccaggccagagatttagaacttctaaataaggaaagcttgttttctccaagtactgttcttgtccatgctcttttgttgtaatgaatttttggtgttcatctgtttgcaaataattgagcttttctaatgtacaatcacctattagcttgagatcctttgccttattcagcacatcagttgaaaatttagagctcggaaaaggtgtgtttgggcagttctgtcgaaattgatcagagtatatgcgtgcttcagtgactatctggttgatctcggatactggtggtggttgctttacataggaacacttataggacatatgaacagaagatgactccatcagatcaacagaacaacagacaagtacttttgtacctttggaccttggaactgcacaaaggtaacaaccagctacactcagggcagcctgcatgagattcaagcagaactgaatgaaccatgaaggatcttattttgctaaagtacagaattacccaatagtactttt

SEQ ID NO: 17321 - DNA, 908 bp, Oryza sativa
ccttatatgttattacggaactaggccgcacgccatattttccttttacataataagcatttctttatctcttcataataattctgagattaaaatatagcattgacaagttatacctggcaccgaatctgctttgagatctatctactatgggcaaatcttttatgtaaactaccaaaacatggtctcacctatattgacacaacaaatgaacaaaacagttgtagcattttattagtgcttcataaacttagaacagaaccgccacaaagtttcacatacttgtggcattatttttttgatacacctatactatttcattagtacatcactctaaggcctcgttctccgactcatttgagaagcctgggtaggtctgttgttgatatctaggagtgaaggcaccgagctcttctcccctattattcttaaggcttcgtgcttgctccctcgatatgcggtaagcattagcgatcacatccactggcatggcacggaatattgagttcttccctgcaaggtggctcaccatggagtttgcattggtcttgaatgaaatgtattggcatccttcatgctctgctttcttcaagacaacgtagtgttgtggaatgatcagcaattgacctggacgtagaacgccattgaataccgtctttccaaggttactaacgacctgaactcgagcatgcccttgaacgatatacaccaggctatgggcattaacgttccaaaacggagagagaatagcattctgtagagagtagagaacaatattatatataaatggtggcacagataaaactatttttatagaaatataggggggagagagatggagagtgaacaaaactccactttgataaatacctggtatagatttactctagtagcactcaattgtacaa

SEQ ID NO: 17322 - DNA, 12048 bp, Oryza sativa
ttctgttctaagtttatgaagcactaataaaatgctacaactgttttgttcatttgttgtgtcaatataggtgagaccatgttttggtagtttacataaaagatttgcccatagtagatagatctcaaagcagattcggtgccaggtataacttgtcaatgctatattttaatctcagaattattatgaagagataaagaaatgcttattatgtaaaaggaaaatatggcgtgcggcctagttccgtaataacatataaggaccgattccttggagaatcttatccaagcatcttataatgtgaccatatgaatatttgattcccctggctaggttatataacaataattgtgtgtttgtcttgggacacttgtgcaagggaggaagatagcccttgaattcctagaattggttttgggcccccccttgagtaatagcccaaagtcttgtgtatatgttgactagatgtgtatatatattgggtacattgtggatgggaaaaataggtatagacctagccaacaaaattggagaggctttaggatgttgctgggctttaacgggactagtcatagtcatttttgttgatgagcctatgtgtttatacctcctaggttctccatgtttatcttgggcttgtagggacaaagcaaaaaaatgaagatttttttaaaaaaacttttaaaatttttaattttgaaaataagtcctttcaacacataattcctagatccgaaccttttggccacgccagccgaatttgcatggcaaaaccacaagacaacactgtcacaccggtctggctagcgtggcaacgttatttggtcatactagtctagttggtgtgccattgttttttggtcacattggtctggctggcgtgtcaatgatatttggccatgccacccttgctggcatggtaggacaaaattgtcacgcccattgtgtgtggcgtgtcagtattgttttgccatgccagacggggtggcatggccaaaaggttcaagttctagtaataaattttggaagggtctatttttaaaatttaaaagtaaaaaagtttaaaacataaaaaaaatcaaaatggcatgtccggtataacaataaagatgaaaccagcagatctaacatggaaagtgtatgttccaaacttgtcaactaattgtatatatataaccgatttccatgttagaggtatatcatatatttgttacatatatgcatatagaatggtggtcagtgtgtaaaatatggcatgccccactcctaggaaacactatttcacgcatatattacctattgttgtactagaaggttatcctcaaaccggtacagcaccaaacaaataaggaataccagcctgttagcggcaaaatttagtaactactgttagtcaagatcgggtcaatggagtgactaatgatgtaattatatttgattcagttggaaagtgtatcaagtttagagttattttattttagcctccgtattaggaaacgtttctttttagcttcattttctatagatggagtcttgagccaatcaaattttgtttgaatcggacttgtttatttttctgtaaggtagccgatcaagttatgtccgagtaggacttcttctagctggaactaaaaataacaatgccacactagctagaccagcatgaccaaataacgctgccgcgctagccagactgttgtgacagtgttattttgcggttttgctaaggcaatttggctggcgtggccaaaaggttcggttcttggaattacgtgttgaaagggtttattttcataattgaaaattttaaaagtttaaaaaataaaaaaatctgcctttttttctctttatccctacaagcccaaaatgaacatggaggacctaggaggtataaacacataggctcatcgagacaaacgactacgattagtcccgttaaagcccagcaacatcctaaagcctctccaattttgttgcctaggtctatacctattttccccatccacaatgtacccaatatatatacacatctagtcaatatatatgcaagacttcgggtactcaagggggcccctaaaaaaattctaggtattcaagggctatcgtcttccttccttacacaagtgtcccagacaaacacacaactattgtcatataacttagccaggggaatcaaatattcatatggtcacattataagatgcttggataagattctccaaggaatcggtccttatatgttattacgtaactaggccacatgccatattttccttttttttaggggaaacacgccatattttccttttagataataagcatttctttttctgtttataataattccgagattaaaatatagcattaacaagttatactttgcatcaaatcttctttgagatgtatctggtatgggcaaatctttttggggcatttgcaaatttgccaccggtttttttaattttgcaaggatgccactcgaatgatagttctagtggtatttttgcaattttctagtgacagtctcgtaataacgattcaaaggagtggtaaatttggaattgccccaatctttttatgtaaactgccataacacggtctcatctatattgatagaacaaatgaatcgaggaaaattttgctataggacatcgcgactttacggttttagctgtaggacactgcacgaagtgagttttgggggaaagcactctgtaaatgtggaaattagctcgtggagaccgcgcgcattggaatattcatttttagttggataggagggagaaattgcatgaaagtactaaaatacccctgagcccacaagtcagctctttcatctctctatttgtatctctctagcactgaagggcgtcgatagtgtagagcggcatccctcctcctcccgacgcgactcctggtgagagatcgctcctgcggccgcctcgagggagtgagctagataggggtcccgatctcgtcggccgcatcggtggtggtggggtggggtccatccatggcgctggcctggatctaggcgggttgaccacggatcccgtcgagctttctccctggtagggcggcgatagtgtcttcgtcgtcggatgggtcgtcttctaaatcgtttctcatcagtgttgggaatgtcgctttggggttgtcgaattggggactgcggatcatgcatttggttcaagtgtttatgagtccacagttgattgcttagtagcggcagcccatgcaggtaatgtgattttgagtttcatggaccaggtggtcaaggtgctctgcctcctcccatccttgtgcaggcggcagacctcccggtagtacaacatgctagttgagacgcttctgtgtgagagagatagacagagagagatgcaagacttggcatttgggaccaggggtattttaatattttcatgtggtttctctcaccaattcaattaaagatgaatattcgaataggcgcgttgtccacgagctaatttccatctttacgtagtgtcttttcccaaaagtcacttcgcgtagtgtcctacagctaaaatcgcgaagtcacgatgtcctgtagcaaaaattgcatgaataaaacagttgtagcattttattagtgcttcataaacttagaacagaaccgccacaaagtttcacatacttgtggcattttatttttttttgatacacctatactatttcattagtacatcactctgaggcctcgttctccgactcatttgagaagcctaggtaggtctgttgttgatatctaggagtgaaggcaccgagctcttctcccctattattcttaaggcttcgtgcttgctccctcgatatgcggtaagcattagcgatcacatccactggcatggcacggaatattgagttcttccctgcaaggtggctcaccatggagtttgcattggtcttgaatgaaatgtattggcatccttcatgctctgctttcttcaagacaacgtagtgttgcggaatgatcagcaattgacctggacgtagaacgccattgaataccgtctttccaaggttactaacgacctgaactcgagcatgcccttgaacgatatacaccaggctatgggcattaacgttccaaaacggagagagaatagcattctgtagagagtagagaacaatattatatataaatggtggcacagataaaactatttttatagaaatataggggggagagagatggagagtgaacaaaactccactttgataaatacctggtatagatttactctagtagcactcaattgtacaaggttaagaatggggaacttctgactgttgagacgtgtgatccttccagcacgtgggttgtaagtatcagcatggctaggattttcgatgttcaaccttgccttgattgtgcagaagttctcatctaaaccgttgcaacgcgtagatggttgttgttcttcactgtactgaacttggtattgagcttgtgcttgttcctgctgttgtgcttgttcctgttgttgtgcaaaagcaggtctcaacagtttaaggccattctttacccgtatgatctctcctctttggtcgttttggccttgtagcctctttgctaccaatgcattgacgcctaaggcctcacttagtagctcattgttgaaaccgctaaatatgttttgcccagagtgttgctcgattgagcgaccatacatttgttgctccctgttgttgttacccgccaataagaactcctaaaatttttatcagtgggaatcaatgataaagttttgccacatgaactgcaacatattcatatatatgacaatgagaaacaaaaatggtgaagaaatttagttaccttctgccttggttcaagctgattagcgttgttgtttaagtcgaagacatatagagcaacaactggtgcatcgccttcattgtagaaccaatgcgcaacaccagctggcagtgcaacgatatctccttgtctaaattggtggatcttttggtgctcatccctaaatttttggctctggctttggccttcaggcaagaattgttggaattgttgttggtaggttgctgggcagccggggaaagttaatcccatagaacctctccctgaaagttagaaatgtccatgtcaggtggatataacctaaaacgacattattgtaacatggagaatcataatttgtacccatatgaacaatgtattccgctatacaaaccttggatgatgtagaccatgccaggagtattgctgtatcgaggtaccagaaggccttgaggctcaatgacacgtcggatgacaaatgtacctgtgcactggaattgttcattcttctcatcaaagtactctgtaaccccggcttctgacctcactctccgaagtggttcaaatgcttgtagtctatcaaatctacactccctaaaacctccttgccgagggttgtgccatggatttacgttcggaccaaatagctgggccatagagccatggcataggagaagaacacaaaagtagatagataaccgagagaaagctatggtcgccatagctatttgaggatgttattggaaacttgggctggttgatgtgagttcaatgacagggaagccaacttatatagtgaagaaaagaatcttcagatatgacgtagggatagagtttgttgacatgtatagataatatctagcctataatgcgaaaagtataatagaaaaaaggtagctttgcaatgttgagatatacacactatgactcatggatgacatgtcttgcgctttaggggtaatacaaacaatgcttgttggtaaatgtatatccaaagccttaagatgttcctttgccttatggataaatttccttttgtgcaataaagtttctctagtatgttatcattttgtgcggtatgtcatagatgataagttaggcgctccttaaatttgttggtttgttgtcagttttgcgtggcacactatgcttgataagttagcggaacttttaaaataagaaacttgtaagcttgttgtcattttctttgacatactatcctctcccatatgtaaagtaaacaaattgatgaaatatatggaggttagatgattttgcatatccaactagtacttccaagtttataccaaaaaatagaaaatgttggatttaatttttaaaaaagtagaagcaatggacttatgtatcttttcttttttttatcattatattttctggcgtgcatttattaggcagtttattactgtgacataaatttatttaactcgccggtaataaaatatgccatatgtttgttagtcctcactgtcgaccatatcatacaagacattaatcaaatcgtcttgtctaaaatgaccacaatgtccctgcgtggtgtggactatgatttcttttcattcatggttagaactactgccggtccatgaaaggttaaactataaaatgccatctgaaaaaaaaaaggtaaacagacaagtactcgccctcgcaattaaattgttcaataataatagaaatggaaggatttgtcgtgtgtgtgtacatatatacaagaaaatatcaggaaagcatgtatgttattttacacaccgaaagaataaacgcacaacgaaacttatatacaatcatatgtttgctaggcaaccagagatgttactcccaaaagaaacgctccggtatcaattcaggcttctcctctcacttgaactgcagcttgcttgcaaatgtctggccaaacttccatcctggtggcacgacgttggtgaagacgagcgtttggtcatctgtgttggtgaccctaaaggatagaccttgaccggtgaggtaggccagtgagtgccattgggcgccccagttacgtgccatcggcatccaatccgctgtgttggaacccataacctccatggacttgattgaccctgccgccgcgacgttggtcaccagtactagctggaagtagtcgtgaccgttaatggtgaaccgcaggccacccttcttcacgcaaggaaccctgtagaaatcatcgcaagagtaggatattttcatatggaagcagcggtcaggatatgcactgttctctccataatgtccaaaataattggagtatttgtattggtacctttgatagatgaccggtatgatgcctgcgctgtagacgccgatcttctcccaggccggctgtgccatgtcaaagtgcggccgtggtgggttgcaccagccaccattatcactgggaaggttccagttgggcgggcagaaattggtggcggtgatggtaacggtgacgccgggcttgcaccactgcggcgccctcttgcggtcgcaggcgatcttgtagcactgcccgcacgacgcgccgtcgttgaacagcgccgtgctcagcgccgcgttccgcgtgccgtacccctgcgagtacaggttgccgtatccgcacgccccgcccatggtgcccgacgcgtccgcgccgccgtagaacgtcgcgtgcgccttctgccactgggtcggcgcagccaccgggtttgtgggcgtcgtcgtcgctgtgttggccgcggccgtcgatgcactggcgactgcgagcagcaccaacacgaacgctcgagctggggccatgtctgtcgtcatgatcggataactctgtaactaggcccttgagacttgatgaccgagttaattatctggagctatctatctctgaaagcaacactgctctgttgctttgtgttgatcttctatgtgatgtctgtttgcttggtgatctcctgatgattggatgggtatatatagccatcgctcggtcattgttggattgctgcattagtggctaatgaaatcccaataatgaagtagtgtgaactctggaaagccacgggacgaagctagcgcgcggcgacgcgcatgtgcatgcatcgccggccggcgcagccgcagtactactataacttgctcgccaattaatccgaaaaattttcggtttttccctgattggcgcagaatgacgcaaaacacaagcgcggcgacgtccaggctcccgcaatcgcaagcaagcgcatgaaggcaacgttcaacggcggcgccatgaagaatggggtggcgtgtgttgtgtgtggccggcgatcgagtgaggcatctctgaagtctgaactgaagcatctcgagtgttttggactcgtttcttttcctggtgacgttatgaggtgtttttttttccggggagacgttttgatgaggtgttgatcagaattcatcaccttgttagaatgtcaacaagaacaattgacggaagaaacaaataatcgttttaaaagttgacaaaatcatcgagggaaaaaacgttttcaattagacaaaacaattgacgaaattccgttgtcaagtaaacaaaacaatccacggaaaagacaatctatctatgatatactgaaaatctattaaaattcctacaaacacactaaaaccgtcacgtgtattcctagtttcgtacaaatacttctaaactgtcacatgacactttaacaaaccagtggacctgatatttttatctattagaatttttttttaaaaaaaaccaaaacaagtagtcacgtatttgatggggcccacccttccaccgggcgtactcacgtacgtgcttcctccctccccctcctatccaatctccttttttaaattattaacatttttgaacattaacaaatcttagataaccacaattttcctatagttatttgtgttctttaacaattaaaaaaattaaaaaaattaaggtgttctttaacctataagaaatatttaatttttatcatatccaaaactttacatatcactttaaactgttatgtaaaatagggaaaatttgataatgctgattatatgatcaattcgccaaatatgcataaataaattaagttagatctattatctctattattaaaaaattgaatatgtttttgccggtactttggtacgttatccgtgcacgagtcggtttttaagtttgttctttttggaaatacggatccatatttgagtcggtttttaagttcgtttacttttgtaaatatagaacaaatcgtataataaatctctttaaaaaaactcacgtgctaactcgaactcctaattacaactcaatatatagggcttttcttacgtatcacttctatgtccacttttcttatgtatcaactagttgggtggcccgcgcaattgcgcggctagcacctaaaaaaaatcatatatttttcagtatgattttacttaaaatttattaaatagctattacgttgtcttaagactttgaaaagccaaatcttatcatccctgtatttctaattatatagttttttaaaagtcacaccagctactaccccttacttctgtcatatttcttttatttgcttgcttgatctaccactatttctattcattctccttaaaacctttaaaaatcagatcttatagtttttataatttctagaagtcccatcaaacgctgtcattatactcctctacaggtcatcaactgtcttttctctatattgtcattgggattttacaaatcgaacataattatcgttcgggttcattttttactttctaaagtcccgctaaaccgtcagcggctttgccattgttttcctttatggcacgcccgctgcctcacttctttatcgtcattgagattttaaaatcgaatatgattatcattatgttttttttacttttagaagttccaaacctttaaaaattagacctcgtagtttttagagtttatagtcttgttggtttcattttttataatttttagaagtcccgttaaacgatgtcactatactcctctatggcccatctgccgcctactctctattgtcattgggattctaaaaatcgaacataactatcgttagaatttattttttattttctagaagtcccgccaaccgtcggtggctctcctatatatcccgcccgctgcttctcctttttattatcattgagattttaaaaatcgaatatgattagcattggtttttttttttactttctagaagtcccggcaaccgccttgatcgattgcttcacggcctacccgtcgtccttcatttcaatcgttattaggattctatttggtgttttattaacagttattgcatgtcgtatcaaccaccaccactctactcctttataggcgtgttacttaattaatctcgtcatgtgttttagatggtattttctttcaatagtcttgattttttatcaccaattttagttatttataaatggtattcctagtatttttctttttttaatttcagaatttattttatttttcgtattgtgttcttttgatatttttattttttattttcaattttagttgcttccaaattgtattcctactttaactctctttttaattcgcctaatttcggattttattttattttttatctcgaattttaattaatctactattaggttgttttatgtactcttatttgcagcgctgcttatatttaatttcgaatttaagttaattttaaattgcattccgaactcttcttttgtttttttctaattttgattttttttaattttttattccgaattttaattaatcttgtattggattcttatatatactcttattttaatatttcttatttttaattccgaatttcagttatttttaaattgtattcctactcaaactccccttttttctttttataatttctaaatttattttttattcctaattttaattaatcacgtattgggttcttatatggactcctctttcaatattgcatatttttaattccgaatttcagctatttttgattttatttctatttggactcttctttttttttctccgattaatgtgggaatttctagcctctacagcaaacgtggttatgtatttttggcttggttatatatttattggcatgaaaatactgatacaattcggaaacggcagagtttgattaggattgttttgtctttcaatgtttctaaaagtggtgttaacacgcgtattcccaaaatattgtccgtttccaatatgattatgtttttcttttcttttgttttttttttgtttttgaccgattgtacattacgtttccagtagattaggttttcccttttttgtttgtttgtttcttttttttgacagattgtccgattccgtttccagtagtatgattaggttttccttttcttttttgtttttgactgattgtccgattcgagtttcttcatacgccttatttctttctttcttcagtttttaactaatcctaatctagttctattttttttcttattttttagattaatgtgagaatttctaggccatgagagcgaacgtagaggcttctttttctattattttaaagatataactagcatggtggcccgcgcagattgtgcggctagcatcattatattttctctcatattatatcatatatgttttctcattatattattcaaatatattaaaatgacaacataattttaaattttgcaataactttacaaaactactaatgtgtaatattcatattgtattttatatacgtgttagttattaattatttttaatatcaaatcctatatggactctagtctcgtcttttaatatattttttagttccgaattttctgtaaattgtatttctatatagactctatactcttgtttcaatattattctatttatttttatttctaaattttaattatttctaattgtatttctatgtggactctaaactcatctttcaatattctttaatttttaatttcgaatttcagttatctctaaattgtattcctatattgactttaaactcttcttcccatgtttttctaaatttcgaattttagttatttgtaaattgtatttttatacggactctaaactctacttttaattttattatgtttattccaaattttagttagttttaaattcctatagggactctatactctacttcaaatattgcttattttttaattccaaatttcta

SEQ ID NO: 17323 - DNA, 6251 bp, Oryza sativa
tttatatatctgctctcatttttaaattatttatcgttttatatttgtaccaagttaaacatttctaatgttgaccataaatttatattgttaaacaccataaggtttttttattcaccgtgggaaatatttttactagtttatttattgttaaattttatataaattgatgacaggacaaagctaaatctaaaaagataaagtaattccaaaccgaagaagaatatttggttgctactggcatcaatccgaacataggtgcgtgtttgcaattgcacccatttgccatggcggacaaggattttctatacttggtacaatggtattcattatttgcatacgacttagaacggtcaaagaaaatttacattaattgaaatcttataattctaaagacaaacctgtaaagctaaatttaatttacaattagagaaacaattaataaaatcagatggtgaaaagtacttgttgaacataaataaattttgtaatttttttcttcatatcgtagacaaaaattagacttgtgtggtatcttatatcatcataatttatcttgtcaaattttatgaaatttttatataattgcttaaaccacaatgcatacatatacctagacgtagaaaaatattttgtgcagttttttccattgacgctgtttttctcgtaaggtggtttcaacagttttgtctataaaagtaaattttcctatagaaacacttgcatatatttgctatatttcgggcacctaaaatttactccctctgttctatattataaattgtttgacttatttcttagtaaaacttaattaaatttgatcaagtttatagaaaaatatagttgtagtttcaacacaaaacaagcatatatattatcaaaatatattaattgttatatctaatgaaactaatttgatattctagatattactaaatttttctataaacttcgttaaacttaatcaagtttgactaaaaaaagtcaaacgatttataatatgaaatatagaactagagggagtacatattactaaacctaaaattacagtgttgtgcttgtgcattatgcaattttagggttttttttagcaagagagggcaggccgccctcctccgttttctattaccagaaacgtgaagtttatcacagcaggagtttgacacaagctaaaacactcaaccttttgcagcaggggatggagcatccatgaacacagacccttacatggtctctgccaaactttccagaattgctcagcgaaatagcaaaatgagtcatctccaggagcttgtatctctctcttttctcgagtggcacggctacaaatagacgaattataatggtatttatctgaatagacatttataatagcacggatcaaattaacccttttatccttacagtcttcccgtgtttaggcaccacctatacattgatacgaaacttcatcggccacccgtcttaatagcagcattactcattgcaacctttattttaactgcagttttttttgttatatattattatgctttatttttatccaagtttatttttttataaaggaaagcttttattaatatcagacgattacattaagttgatagaaccatacttatggcctttgcataatccaaaacacacacaattttgtagatttttatgagttatatgtttgtttcatttaattttgtaaatttattattacaatactttattgtttaaccattgatgagaaacattgtattttcatctaacggatcataaaaatgactaaaattttcaaaaaaaaaaagaatcaggcacccgagatctagacacacccaaacttccacctataaactaagaaaacattcattagggaaaatttttatataagtttcactaacaaattgtaaagccttagtcctatttttttaaaaaaaaaatggctcggctcggtttggctggattagaaaacgagctcgtaactgaaatgagccgagcctcaatgagctcacaagtctcccagtctcccagacctgatgtactgacctagtaaatcggatgttccccttttatttatgatttgataagtttacgttgaagttgataacgagagtagtaaaaaataatttaaagatatttttaaatacaagtaaccacccgttcatatggatatgaacataagtatatacatccataaatcaaatataaacaataaaaatcagatgtgcaacagtgaaccaagcaccaaagcacacaattcaacaatctttacaattaatgtatctttacatttgcacacaatgcaaatgttcatcaccaatcagtcgcaggccgtagaaacccaaatctttccgggaattaaattacttgaactgcagtttgcttgcaaatgtttgcccgaacttccatccagagggcacaatgttcctaaagactagtgtctggccatccatgttcgtcaccctgaaggagagcatctgcccggtgagatacgacagcgagtgccagtttgcaccccagttcctcaccattggcatccagtcggttgagttggagcccatgatgtccatcgacttgatcgaaccagtggttgcaacatttgtcacgagcacaagattaaagtagtcatgcccattgatggtaaaccgcaccccacccttcttcacacacggaaccctgaaaatatcaccaaatatgttacaacttaaaatatgccataggtgctatatgtcaaaaacaatatgtttttttttctcagtttaaattatatacctttggtacatgaccgggatgatgccagcacggtagatgccaatcttctcccaagcaggctgcgccatgtcaaagtgcggccgcggcgggttgcaccagccgccgttgtcgctggggaggttccagttgggcgggcagaagttggtggcggtgacggtgacggtgaccctcgggcttgcaccactggggcgccctcttgcggtcgcaggcgatcttgtagcactgcccgcacgacgcgccgtcgttgaacagcgccgtgctcagcgccgcgttccgcgtcccgtacccctgcgagtacaggtcgacgtagccgcacgccccgcccatggtgcccgacgcgtccgccccgccgtagaacgtcgcgtgcgccttcagccacacgggcggagtttcatcggtagacggagacggagccatcggtgtcggtggcgacggcgcatcctgggccgcggccatcaacgcgctgccgactgcaactgcgagcaacaccaaggcgagtgctcgagctggagccatatccgccatggacgttatcaataggcgctgaaagattgtagctctgaaagctgcagctgcaagatggttgtgtgatttagctatatatgtcacttttggttctaatgattaactaatcaactgatctgagatgattgtgagatgattaggtccctagatatatatagcctttttttttcggattaattcaacaaggactaccgatgacaccttgagttaattaacgacgcttgtggcgtgcagccgtgcatatgcatgtgcgtgcccgtgcagccgcagcgtggcttgcggtttaatccaacgatttgtgtaagcgcagacacgtattatggcccaaactatatattattctcttatctgtgtactttttcgtcgatctttgcttgaacttttgcttgattatattcgattagaggactatctcttaatttgcttgacttcagattgtgaaatggacggcttaattatttgcagagattattcatgttccggtacttccttgtttaagaaagggatggcgtctgttcctttaatagtacgggtgattctgcatctggccagcaattgtaatcgtgtccaaccgcgtgcaatggataattcgccggaaaagtattttttattgtcgggatgacaaaagaaaggccatccgaacaatattaggatcgaagaaaaaagagttacaagaaacactatcatcaaggctatcgagctttattgtgtaccaaagtatgtgtataggaactactcgtctaccacacaaacacatgccactaaaaggggagcctaccacaaaaccagccgccgctatgcgtggccggtcatcatcgggcctacaacgactatagagaaaaaacaacacctacacgaagactgtgacataaggaagctgtcaggtgcagaaattgaatttgaacttgtatgtttgtgaagtgatatattacatgttaatacatcttcttaatttttttaaatttttttataactatttaagtgacatgaaaaaaacgaggggatatcccttcgagggatcaatatagtttccacacactacccaactttacaaaacttcaagcaaaacaacttgtcaaagacaccccaatttcttcaggatcatttcttttcatttatctaccagagcgcaatctccctcctttagcaaaattctccatctttgcatcaaggatacgccacctgcaatggagatttttaccaaaatattttcaaacacctattctttcttagttaaccacatagaccagcacaaagcatcaacaaaaaaaaaaacacccacaatttggacttaaatttgtgtttgaacacataaatgcacccacacagctccctagggatgttatctaactccagtgcttccctaacagtacataagataaattagcaattggacagttaaacatgatatgcttagttgtttcccttttcatacacaatttgcacttctcatcaccccctttccatttcctatagaccaactgcatagcagatggatggtacccactgaatacatgaaatgtttgattttcagcggaatcttgcttttccacacatccatcatctccacacctttaacaccccccatcccccacccacaaattttatcaacctacactcttgacaccatcatgggacgattttgacaacaaagcctcttctgcctacatttgttcctcttgggactggggaggaaggattgacaagttattattcatctgaccccagatgtggtaggctcacttgtccgcctggttcacacggctgtgtgacaattttgtggagttgtatgatttttcctgttattagagttgatgggattgaattggactaaggtaagagccggtggatggtaaaacggatgttttcctattaattatgaactatagtttttaattggaaaaagtacgaattacccccccgaactatcgcggtcgtccgaattacccccctgaaccacaaaatcggacattcttcacccctccaactatgcaaaccggacgaattaccccccttgacccaatccacagtggttttggtttacgtggcgtacacgtggcaatccagtcagcattccatttaaaaaaattgtgtgggacccacgtgtcatacattcatactctctctctctctatttctctctctctcttaccgtctcatggcgggcgaagcggagggcggctagtgggggctgccggtccgcgccggcgccaggtgaggtgccggtgggcgagcttcccggctgacacgccgtggaggtaggcgtgcccttgcgccgcgtcttgcgccagcttcaacctcgtctgccactccagtggaacacgcgccggtcctcggttctctgaaagaatccattgccatcgtcatcgtgtagacattgatgagaagaagccatgagaggagtcaggagagagaggttacggaccattgaggaggctgtggaggctgccattggggacgtagtcgaagacgaggaggagctcgtcggccgacgcgtagaaggcgcaaaggctgacgacgttggcgtgccgccacgtgcccatcttccgcgcgagctcccgcttccgccgctcgtcctcccgggtcgtgccttccctccgccgcatcctgttcatcaccaccacctcgccagccttgccctcctcgacgacgccggcgtcgtccacgatgacgtcgtcgcctcccatggccacgtggtacgtcgtagccgtcgcgcccttgcccagtatctccgcggcgccccgcatgagcgtgcacacgtcgaactccacgcagcagcagcagaagcgcaccgtctcctcccgcgccatcgaggtggtgcgtgagctggcgcgcggcctctccggcttcttgttccttcagccacagtacgccgcagctagagtgccgcggcgaccagcgatgccactggtgcgcccaccgccgccatgatcatcaccaccatccaccggtcattgctcctcctc

SEQ ID NO: 17324 - DNA, 2292 bp, Oryza sativa
gaccaaaaccaccgtggattgggttgaggggggtaattcgtccggtttacatagttggggtgaagaatgtccggttttatggtttagggggtaattcggacgaccacgatagttcgggagggtaatttgtactttttcctttttaatttatgttttaagttcggttcaagttgatatgagagagtagtacaaattgatttgaagatattttgattcaatgaagaggatgaacatctcttgatatacatgtgcaagtacccacccctacatatggatatgaacataagtatatacatcaataaatcagatatatataaacaatggaaatcagttgtgcaaccgtgaacaatcgagcaccgaagcacaatccaacactctttacagtgtatatatacacaacgcaaatatccatgacaaatcagtcacaggccatagaaacccaatcttgaatttttgggaattggttacttgaattgcagcttgcttgtaaatgtttgcccaaatttccatccagatggcacaatgttcttgaagacaagcgtctggccatccatgttagtcaccctgaaggagagcgtctgccctgtgagatacgatagtgagtgccagtttgcaccccagtttctcaccattggcatccagtcggttgagttggatcccatgatgtccattgacttgatcgaaccagtggttgcaacgtttgtcacgagcacaagattgaagtagtcgtgcccgttaatggtaaaccgcaccccacccttctttatgcatggaaccctgaaaacattacaaaaaattgttacaaatctgttctatcgtcatgtcataggtacaatatgtccgaaaatgatatttttgttttgctgtcaaattatattttatgtacctttggtagataaccgggatgatgcccgcgctgtagatgccaatcttctcccacgccggctgcgccatgtcgaagtgcggccgcggcgggttgcaccagccaccattgtcgctgggcaggtcccagttgggcgggcagaagttggtggcggtgatggtgaccgtgacgccgggcttgcaccactgcggcgccctcttccggtcgcaggcgatcttgtagcactgcccgcacgacgcgccgtcgttgaacagcgccgtgctcagcgccgcgttccgcgtgccgtacccctgcgagtacaggtcgccatacccgcacccgcctcccatggtgcccgacgcgtcggcgccgccgtagaacgtcgcgtgcgccttctgccacacgggcggagccgcgtcgtcggccgtggtcagctgagtgcagccgacggccgcgattgcgaaaaacaccaacgcgaaagctcgaggcgatgaagccatgtctgtcgtcgtgatcagtaggcgctgaaagatgtagctctgcaagcagatccgctgtagactgtgtggtgtgcgtttgattcagctgtggatttggttctgatgattgtgagatgatgatgggatgattggtctagataaatatatataggctacagcctctttggattaattcaacaaggatcaccttaagttaatgaatcgtgtagcgtgccatgtgcccgtgcagccgcagcatagcttacgggttaattaatcggtagatttttatacgaagttacgaacacgcagacacgtattgtccaaactattgatttccttgacacaaacttgatttaatttgagaggatatatcttggatttgctttacttccaatggtgaaatggacggcttaattatttgcagagattattccatgttcggtgtactcccttgtcgaagtaaggatgtcgtctcttccttgaatcttactgctgaaatgcacctggccaacagcatcagtcgcgcccaacggcgtgtaatggtataataataaattaataatattcgttggtatagaacttttagagttgagtcaccattaaggcagacgaggaattcctggttaatcaaacgacctttgcacatactagtacgtagtacgcattttgacatcacaatattgcacttgccatggcgtgccgcgtgcctgtaggtgtcactttttctgagacaccggtaacaggagtactgtaaaaaggaaatttaactatttgcgggttactctccattcgccagtctaatatttgttcgtacaaatttaccacaagggacaggggaaatatttcacacttttggtaaagcgacacactatggcctatataactcttgatcacgagttaagttaaatttccccgaaattaagaactggctctgtatcaagtatctgt

SEQ ID NO: 17325 - DNA, 4967 bp, Oryza sativa
ttcgttggtatagaacttttagagttgagtcaccattaaggcagacgaggaattcctggttaatcaaacgacctttgcacatactagtacgtagtacgcattttgacatcacaatattgcacttgccatggcgtgccgcgtgcctgtaggtgtcactttttctgagacaccggtaacaggagtactgtaaaaaggaaatttaactatttgcgggttactctccattcgccagtctaatatttgttcgtacaaatttaccacaagggacaggggaaatatttcacacttttggtaaagcgacacactatggcctatataactcttgatcacgagttaagttaaatttccccgaaattctgtactggctctgtatcaagtatctgttgtaaacaaaatttcagtaaagagaacaatacattgtgccttcctcctatcactactacataaaggcaaatagaggtcaacagtgtagatgccggaagtactaaaaccggcacacatataaacattttcacacctccacgggctgaaaatacattaaagaaaccaagacctttaagcaactataagtgccggttctggagaagaaccgacacctatacaattgataccggtgtttttaaaagggaatctttaatatattataggtgtccaaccgacacttgtaatatattaaaaaaccgacatctaggaaaaccgagccgagccgggagctaggttcctctttttttagcacaaagggggtgagagggggcttatctactctccccgccccctctcgccatccctctttctctccaccttaagcctatcccctcctcctctcctcctctgcccccttccctttcgatcggctgagtcgatagtgacagcaagcaaaaatggatccggcagtgtcggtggcggcgtgagcgacggcgtcggaagcgggtggatgcggtgtcggcgagggttctcgcagcggatgtggcttcagcggccgttcccatgacggatcaggcatcggcaggagctcccctggcagatcctcctgcacgatggcatggtcgctgtcctcgccacccttacctcacaatgccacagcgctatcgtgccctccacctcttgttccacagcaccgtagggtgggggattttttttatattatttttttggttcggaagtgttggctcgactcgatggcttttttgtgttttgcaaaccgtatacctcaaagatgccagtcacctttgagtcctcatcaatgccgtcttcgtagtgtcggttgggaaatcctactcatcaatatatttcatcttacctcatcatatgagataaatgctttttattacacttaaaatcctttaatggaaattaatctactatattagggaaagtaaccatgtttccattgcttaattactaaatgtctgcttgtgacattccaaaatttgaatctcacatattgcatcagaaaactgaaatggaattgattttattttcaatttgtaatggaatttatatttatgccgccatattttttatgaaaaaatggtcagtatgcatctacattgtgagttcataaattgcatatctaattttagtatattgtcatgtaattcccaaagttacatatgtaagttccttaattacatatataattatggtgtatttataatgtaagtttcaaaattatatatgtaattttagcttcacctacattttaagttgagaaatgctattgttcaaaaatttttggcctcgccattttaatgggcctgtcaacgtgacaagggactggttacggacatgatgagatgggttcggtttaggtcaagcacaaatcgcaaaattaaaccaattgaacgattagaaatctgactgtaatgaggggaaaaaatgccgccacaaatataacgattccgtaaaaatatacacacttgtgggcaataagatttggccaacaggaatcaagttacatccaactgctaaccaacctacaaaagccaccgataacatagtaagctaaaaacaatagcaggacaagcaacaaacaccagccaaagacgatccccgttgtacaaaggggatgatcaggcttctccacgccgttgcaacggccgagggccctgtcgaaaccctcctgcgtcgccatggtcacgaacccaaaccctcgcgatcgccccccgcttgtcgtacgcgaccctcgccggcccgcaccaccttcccgtgctcgctgtacatctctcgcagccggcagctatccacctgcggcgacaggtcgctgacgtggatcctcaggtctcgctgctgatgctgccgccgctgctgatatgccctagcggcggcgtcttcttcctgttcttctgtcaggaccggatcaacaatgcagggcaatggcaagaaacacatgcacctctcgttgttccatccggcgggcagcgtttccaccagcgtcgccgctgccgtgccgccaccggcggcagttcggcggaatacagatcgagcgcgtgcacagctgcatacacatcgaacgcgtgcaccgacaccgagaggcggtcgtcgtcgtcgtcgtcctgcagaacgctggccagcagcagttcgccgcgaagctccaggaggtagctgtgtcggcgcaccttgcggggctcgtcaggtagcggcataggggcgtgcggagaagccagaacagtggctctttgtggatgtaacagttggccaagtccacgctcacggtggcgccgccgtggtaggcgtgatagataatctgtccggagagcgccacctcggcgacaagcggtacacaaggaggctgccgtcgccggagacgacgcagtggaagaagcccttgctgccatcggtccacatccatggatacttcttaacccggccgacgttgatccagccggtcaaagggttgactagcttgtcgttgatgaaccaggaggccgtgccgtcggcgtgggccaccctcctgtcgcggaagcagaggcccggcgcgtggtagctcgtcttggagaagacgcagcggcacgccacgccggcggcggcgtcggcgtcgtcgccggacgacggcgcgggaagccacggcagcaaggcggcggccggcggcggcgaccgcggaatatggcgtaacgattggcgccaatcagagcagacggcgtggaaggcgaccacgttgatggcggtgtggagacggcggccgatgaggcaaaccagctccggtggaggtcggacactgacgtcatgatgtaggtatatacctatcgatcgatctatctctcccccggagggccggaacgtactgcagctcgatcgatctttgatcaagacgtgcacgtgagtacgtacgtaataattaatcgtggtcgtaatattgatcgatctgattatattgctaatcaatcgtcgtcgtaatcgatcaatctgattatattgctcgatcaggccgggtgaagactgaagagtcggactccgactccgactcggggttttcaatttcaaaatttaattttatgtcggggtcaccaaaattttagaaatttctagccgaaattatttgaaaatttgtctgaatttaaatgaatttgaataaaatttgaccaaattcataaaaaattacaaataaaacaaataattcgggtgagatttgagcttgccggtgggggcggagtttctgaaatttcaaacctgctccgaatcaacaagagatcatacacatggagaaaccaactttcgacctattgcattgtgattataatcaatgcacatgcataaaaatcatcaattgtgaaaaaaatattataaagtttcataagaaatgtaatttgaaatatttaataatctcctaaattttcatcatcgcctcctgctcaaaggtgagtcattagcccatccgccattcctcccatgtgtcccgagcatcgtccacattccacatgtgtatagcgtacaaattgccaagcacaaatatacctttgtaataattgtccacttatcctatcttactataaatataaagtactataaagttatctcctactaactccttaagcttaacatacaaagatgccacatcatcatccactaacaagatgccacatcattatctactaatccactaattaacaagatgtcacatcatcatccactaacaatcatcacatttaaacatcatgcaaacatgttatattatctataattctatagtatttataatttaagagcttttaaaatacaagcatgttaaattatcatcccacataattcacataatgtttcaatgtatatatttactatgttttataatatcctacatatttatatagttcattctcacttagtgcttaaatgattaatctcctttttttcctctaactccttaagcttaacatgcaaagatgacacatcatcatccactaacaagatgtcaaatcatcatccactaattaacaagatgccacatcatcatccactaacaatcatcacatttaaacatcatgcaaacatgctatatctttatagtttttataatttaagagcttttcaaatacaaacatgttaaattatcatccaatataattcacataatgtttcaacgtatatctttattatgttttatgatatcctatatacttatatagttcatcctcacttagttagtgcttaaatgattaatctatggtccaaattatctttctcctttttttcctctaattaaatcatatcacatcaattgtttttgcctttagatgattaatctacggtccaaactatctccttacttttcttcttccataaaatcacgccgccttagtttttcgtttgaatcatcattctacacactatttaaatttaaattattataaaccacattaatttacttaatctgatgttatctagctatcttacacgttattttttttgcggggtttcacctagtaatcatatatacttgggtgttttgataaatcgttaaggtcaaactt

SEQ ID NO: 17326 - DNA, 552 bp, Oryza sativa
agggggtggtaaatatgcgggggaaagaggggcaaggatgatactctagcctctttccacgccggactgacaccgctccagccgcgcacgggtgggcagctcagctttgtggggggcgaaaaagaggagctttcccttctacttcttctctttctcctccctcggtgatctgcctcgctgggcatctctaaaagcatccgactccgacgccaccaccaccagttcaccaccgctgaaagaatcagcagcagcagcagaggccacacgaggagatgaagaagtgcccgtcggagctgaacttcgaggcgttcttccacggcgagaggggggaggacgacgccgacgccgccgccgaccaaaagcccggcggcggcccgcacccgccgccgttcgccatgttctccgccgccgacctctccagcttcggcttcgcggactcggtgacggtgagtgattattttgttgatcatgcttgtgcttgattaaaagagtggagtactacttgctccctccgtttcgaaatgtttgacgccgttgactttttagcacatg

SEQ ID NO: 17327 - DNA, 1121 bp, Oryza sativa
tctgaatatgcagagtacatccattttctgtcagtacagcacactagataaatcaagagatcagagctcctgaattccatggattttacattttcattttttttactccacaacagcttgctcgaagcctcgaatagtgatagaattcgatgccgatgacgtagtaataattatccatcgactaattcggctgtcaaagttctacaaataatcagtatactgtcctacttatttaccacaagcacgaaggcaagcgtctctgatgaggcgcatctcgtcggcggcgacgctcatggccatcctctcgtagggagctcgccgggagcagctgagcccgaccctaatggcggatgccaagcaatcgcgcaccgtgacgcgcgcctcgctctcctcctccgacgtcgtcgacgacgctgctccgtcgagctcctcggcctgcagcagcagggccacgtcgaggatctcctcgatgttgtccgggaacgcgccggcgacgaactccggcagcgtcaggccgtcgcggagctcgccgtccgtcggcgccttcccggagaagatctcgaggagggttatcccgaagctgtacacgtcgccggaggccgtgaccatccccgtcgtgccgtactccggcgcgacgtacccaatcgtgccgcgtatgccgatggtgctctcggtgttcgccgccgcggcgccatggctggccggatcaagaaggagcttggcgaggccgaagtcgccgatgcaggccgtcatgtcctcgccgaggagaacgttgctcggcttgagatcgcagtggatgatcggagggttgcagctgttgtggaggtagttgagcgcgtctgcgatgtcgacggcgacgtcgagcctctggatcacgcccaggccgccggcaccgccgcaccatttcccggtcttcgtatgctttgcacgatgcagccacctatcgaggctgtagttgggcatgaagtcgaacaccagagctctgaactcgttgccctccatgtcgatgctggagcagcaagtgacgatgttgatcaggttacggtgcttgacgctgtgcatcgcctcgcattccgccatgaacgtcttggaagctccgacttgccggaggtcgagcacct

SEQ ID NO: 17328 - DNA, 567 bp, Oryza sativa
actctggagtttcttaatttcctgacagacttcaatcgtcttttcacatgtctagacgatttcatattatccttagaactattcactttgacaattaccgtttgattgtcacagttcataaggatagccggcaccggtttttcaacaacaggcagatccattaatagatcacgcagccattctgcctcaacagtagcagtatccagtgccgttagctctgcttccatggttgacctcgtcaaaatggtctgtttgcaagacctccatgaaacagcaccaccacccagtgtgaaaacatatccactagtggctttgatctcatccacatcagagatccagttagaatcactataacccttcagtaccgcaggatacccagtatagtgaagccctaatttcacagtacctttcagatagcgcattactcgctcaagcgcacgccagtgatcatctcccggattagaggtaaatcggctcaacttgcttacagcaaaagagatatcaggcctagttgcactagccaggtacatcaacgagccaatgatttgggagtattctagttgattc

SEQ ID NO: 17329 - DNA, 660 bp, Oryza sativa
gttcatcacatcagcaaaagcctgccatacaaatgatcaaacagtagagttagtaaatatgcgcaatttgttaccaacaattgatgcttgaaggccaaacaaagttagtcctaatacagtatgaagactaaaatattgctttagaaattctgaagtttaccatacacagtatgataacccagaaaatagtaagaacaaaattccagaaggtgagaaaataaagatacaaacaacttaaaaaacacatactgcagaagaaaggtccaatcaaccagcaaagggagaattataagtaaccttgatacattggtgaatgcggaaacagttcctgcccacattattggcagggcaaagaggatcatcaatgtgtattggatcaatgctgcaaatcaagcatatggaaaaattacagaaggcaatagttgacagaaacagataaactgatacattgatatttaattttatcacctgtgacctctttctcggttcaaataaatgccactttcttggatagagatacgcatatggcgcggatcaaatacattcctgatatccagattactcactaattaaattccatcttagatgataattatattactactccaaaacgattgcaatttgcacaggataaatcgcatatgagccctatagtctttg

SEQ ID NO: 17330 - DNA, 8833 bp, Oryza sativa
cggacagtgagcacagaaaacgaaacgatccattagcacgtaattaatttagtattagctatttttttttaaaaatagattaatttgatttttttaagcaacttttgtatagaaacttttgcagaaaactcaccgtttagcagtttaaaaagcgtgcgtgtgaaaaatgagggagagggtttgggaaaaggggatacccaatcccccgcatgcccccaactcacctaattatccaccttcttcctccagcgtgcggactgtggttcggctggcctttggattcttcgagcacttggagcagagaacctccggacaccagccacaatctgaggctcgcatcgatcctcggtaagattaagatacgaatttgtttgtttgttttttcggttttggacaccacttcagttctgtgctgcacttttgctcaagcatataatcatatatttcagtatttcatcaccagtttgttcctttctgtttgacctacaagtacgattactgtgagaagtcggggtttgtactgcttaagaaatgcttaaaaaatatgcttaggttgatttgtttgccgatatgatgtcggtactggtcatggatttgtaggtgcctctcgtcatatttttatctcatgttagaaccacatatttttgctgttctggtagtactattttagataacttttatggtggtttattctagcatttagaacctttatctttcattgtccaatcgatcttctctcgtaatactaccacgtcagctacaaagcagtactccctccgtatatctatatagatataagggattttggttggatgtgacatattctagtataacgaatctggacaaacttcatgtccagattcgttgtattatgatatatgtcacattcaaccacaatctcttatatttaggtaggaatggagggagtatcattttttcttatataggacaaagtagtatcacttttttttctaccgctaatcctatcttactataaagttgatgtctactaacttctaaagctcagcatgtaagtaagtgtgtgtcacatcttcacccactagcaattattttctagagtattctaaattacatgtaagtgtatcacatcatcactcaaaagtaattattatctagagtatcttaaatatcatgtaaacatgacatcgtttataattttgttctatttttagaactcaatatgcaaacaatgttaaatcattatcttcacatcatttttatattacctaaacatatacatattaccatttctataatgtataacatgcattcatgcatccatatatcccgcagcaaaacgcggggtatcgagtaaaactcattaagcaaagcgcgggatattattggttgtaggaaacaacaagtagagaccaccataaaagtggtcgttaatttaatttgtaggccaattctcatctcttgcattgatctgaaatgttatttttttgtgtgatttaaattataggagtgtaccagcatttcacagcagttgggtattggaatgaaaaactgtaaagtacacttaaaatgtttaactttagagatttgctccggtccaacaaaaaaaatacctcgaggtaccggtatctcacagtactaaatcgttttcgatggttggatctagttgggaaggatggacattgttagatccaacgatcgaaaacgatttggtatcgtgaggtaccagtacttcgaggtactttttgttggaccggagcagatctctaaaatttacgatatttgaggttgtcaaggtaaccggccaacatatatagagggtctaatttgaattttaattagaaaaatcatcttattgttggtaccaatactatgaaatttgacaattgctgcggagccaagatagaccgtgacctctacaattctttagcactggtattaggagatatcacaaattattaattactaaaaggtatattacctattatacgtttgttctcaaggacaataaacataaagcttaacattccaaaactcgttacatctatgattgataggatttgatttgttgaccttcctagaaggaaaatcgggtgggttttgagatggctggagtattcgcctccatggctatcgaatgggcgatcgacaagctctattccttgctgccagcatgtctggtatcaacacctgcatcgtcatcgtcttccgcagcgccagctgaaagcgaggaccttgaggttctgaagaggcttgagagaacaatgcacaggatccatgcgacactgcacgatgcagaggaacagtggaacatcagggaggaaacagccaagctgcggctcaaggaactgaagaaggtggcctacgacgcggaggacgtggtggatgagtacgggtacgagatgacacgccataaagtggaggcatttgagcaatctgcaagggctaatcgcagcggcaagcgcaggcgcgaagaggtaaaattttcatcactgcataatctatgccaacaaaaattctatcagatatttatatatgatgtttggaccatgtttatgcatgatatgtttgttggaattaatgaatgggccttagcccactcgaagattaattctttggaaaatcacaaaagcccacctcatgggatggcatgcatgtggagtttagtaccaccttgcttattctaggagagggggacctccttaaaagggaggatgtcctcctagccacttgaagcatgtgtggtggagagaagaggggaaacacgcgcgcgctcgctcgcctcgcctggcagggcgtgcggcgcgcgtgcacgacgtacgacgtcgaatagtccgaaaaattggctcctcacccttgcgcagatgcagccttcttttgcagttttgttttgctgcaaattcggattcgtttttgttttggaaacgttccgaaaaatccggtgcgtgcaaacggcgtggagtccggataagttacgcgcgacttatccggttcggttacgcgcagtagagatcgtgcgggcgccctgatcaagcgacccttctctatataaaccgacccgccgtcttcacgcagtatatacgcaaaatcaatctagggtttgcctcctactttgtactgcgccgtcgctcgtagactactccatcccgctcgccggcgtgcaccagcgatcgggagagcaggtctccggaacctcagcctttgacgtcctgcaccgggagaaggcggcaataaggtttttgggaagcgcttcgcgcgactgctccctgttcgttcgtgacggctcgccttcctcttcgctcgcgtgtttcgtgccttcgtagacacctgcgaaatgtttcgaccaagcagccggtcttttcgtcacctcggtacgtgttcaatatgttgcgcatatttgatctgttcatgttatactgtgtagtttacatgtgtagatctaatgatgcgttcatgctagttttcatctgtaatgtcatgatttatttatggaatagattaaatcattatatgtctataatctcaacaatccaaaaaccttattataggcactgtgattttactatggctggttttgctgatgcactgaggccggataaattcaccggtgtgcattttaagagatggcagatcagggtcactctgtggctgacagctatgaaatgcttctgggtgagtactggcaaacctgtaggagttcttactgctgaacagcagaagcaattcgaggaagccactactctctttgtgggatgcattcttagcgttcttggcgatcgtctggtcgaggtgtatatgcatatgaccgacgctaaggagttgtgggatgcactgaatactaaattcggtgctactgatgctagcaatgatctgtatatcatggagcagtttcatgactacaaaatggctgacaaccgttctgtagtcgaacaggctcatgagatacaaaccatggctaaggaactcgaactccttaagtgtgtcttacccgacaaatttgtggccgggtgcattattgcaaaactacctccatcttggaggagtttcggtactgcattcaaatacaagagacaggaatactccgttgaggggttgattgcgtctcttgatgttgaggagaaagctcgggaaaaagatgccgcgtctaagggcgatggtgggcagtccagtgccaatgttgtgcacaaggcccagaacaagagcaaggggaaatacaaagctcagcagaccaccaacttcaagaagcagaagaagaacaacaacaatcctaatcaggatgagaggacttgctttgtgtgtggccaagttcgtcatctggctaggaagtgtccacagcgcaaggggatgaaggcacctgcagggcagacttctaagtctgctaatgtgaccattggcaacactggagatggaagcgggtatggtaatttacctactgttttttcagttaatcaatctactaatttgtgggttgatactggggccaatgtacatgtttgtgctgacatctcattgttttcttcttatcaggtcgcacggggttccaccgtcctaatggggaatgggtcacatgcttctgttcatggtgttggcacggtagatctgaagtttacttcgggaaagatcgtgcagctgaagaacgtgcagcatgtcccttctatcgacaggaatcttgttagtggctcccgtttgactagagacggatttaagttggtttttgagtctaataaagtagtcgtgtctaaacatggatattttattggtaaaggttatgagtgcggaggcctgttccgcttttccctttctgatttctgcaataagtccgtgaaccatatttgtggcagtgtggatgatgaggctaatgtttggcattcacgtttatgtcatattaattttggcttgatgtctcggctttccagcatgtgtttaattcctaagttttccattgtcaaaggttctaagtgccatagttgtgtgcaattgaagcaacctcgcaagcctcacaaggctgccgaggagagaaacttggcaccactagaactcctacattcagatctttgtgaaatgaatggggtgttgacgaagggtggaaaacgatatttcatgacattgattgatgatgctactagattttgctatgtgtacttgttgaaaacgaaagacgaggctctagactattttaaaatttataaggcagaagttgaaaatcaacttgacagaaagataaaaaggcttaggtctgatcgtggtggagagtttttctcgaacgagtttgacttattctgtgaggaacatggcatcatacatgagaggacgcctccctattctcccgagtctaatgggattgctgaaaggaagaaccgcacactgactgacttggtgaatgccatgttggacaccgcgggactgcctaaggcatggtggggggaggcattgttgacctcaaatcatgtgttaaacagagttcctaacagaaataaagacaaaacaccatatgagatatggattggtagaaaaccatcactttcttatttgcgcacatgggggtgcttggcgaaagtcaatgtaccaataacgaagaagcgcaaacttggacctaagactgtggactgtgtttttctgggatatgctcatcatagcattgcctatagatttttaatagttaaatccgaggtaccggacatgcatgttggtacaattatggagtctcgtgatgctaccttctttgagagctttttcccaatgaaggatacacatagtggttcgaaccaaccctctgaaataattcccagttcaatcacaccaccagaacaaactgaacatacacatgaacttgtctctgaggaggatgtcagtgaagctcctcgaaggagtaagagacaaaggacggttaagtcttttggtgatgatttcactgtgtacctcgtggatgacactcctaagtcaatttcagaagcatatgcatctcctgatgcagactactggaaggaggctgtccgtagtgaaatggattccattatcgctaacgggacttgggaggtgacagagcgaccctatgggtgtaaacctgtggggtgcaagtgggtgttcaagaagaagcttaggcctgacggtactattgaaaagtataaggctcggcttgttgctaagggctatactcagaaagaaggcgaagatttctttgacacttactcacctgttgctagattgaccacaattcgtgtgctactttcccttgcagcctcacatggtcttctcgttcatcaaatggacgttaagacagcttttcttaatggagagctggatgaggagatctatatggatcaacctgatgggtttgtagttgaaggtcaagaaggcaaagtgtgtaaattgttgaagtctttgtatggtctgaaacaagctcctaagcaatggcatgagaaatttgacaaaacattgacatctgcaggctttgcagtcaatgaggcagataaatgtatgtactatcgccatggtgggggtgagggagttattttgtgcttgtatgttgacgacatactgatatttgggacaaaccttgaggtgataaatgaggttaaatcattcttgtctcaaaattttgatatgaaagatttgggagtagctgatgttatcttaaacattaagctaattagaggtgagaatgggattacactcttgcagtcccattatgtggagaagatcttgaatcgctttggctacattgatagtaagccttctccaacatcttatgatcctagcttgttgcttcgcaagaacaagagaattgctaggaatcaactagaatactcccaaatcattggctcgttgatgtacctggctagtgcaactaggcctgatatctcctttgctgtgagcaagttgagccgatttacctctaatccgggagatgatcactggcgtgcgcttgagcgagtaatgcgctatctgaaaggtactgtggaattagggcttcactatactgggtatcctgcggtactggagggttatagtgattctaactggatctctgatgtggatgagatcaaagccactagtggatatgttttcacactgggtggtggtgctgtttcatggaggtcttgcaaacagaccattttgacgaggtcaaccatggaagcagagctaacggcactggatactgctactgttgaggcagaatggctgcgtgatctattaatggatctgcctgttgttgaaaaaccggtgccggctatccttatgaactgtgacaatcaaacggtaattgtcaaagtgaatagttctaaggataatatgaaatcgtctagacatgtgaaaagacgattgaagtctgtcaggaaattaagaaactccagagttataacgttggattacatccaaacagcgagaaacctggcagatcccttcacgaagggactatcacgaaatgtgataaacaatgcatcgaaggagatgggtttgagacccatgtgagttatactatggtggtaacccagtctatgtgatcggagatcccgtgaattagatcctgggaagaacaaaccattagtaaactagaggagagtatcaatatatataccctctccaagtgaagatgcatgtactctcgtgagctgcaaggcaggttggctatgccttaatgagttctgttggctttaattagcgaagatgttgtcctgcagagcattcttgaaagaactaacctttgtgagcttgactgttggtcgcagtctatgaagattttgggtgaatcttctaggaagcttactaaagacctaggagtatgacttatacgctccacccgaggggtagtctacagacggtctagtaccagataagactttgagtgaaacttgcttgcacaagacttgcaattcaaggcgtagtccattgttcaagttgtgagtaagtgtagcttggagttctaggtggatgttcaaccttaatgggtctccatcgaacgctggtatataaacagtacattggaaaaggcaaatctcagtgggattttgagatttggtgggggattgttggaattaatgaatgggccttagcccactcgaagattaattctttggaaaatcacaaaagcccacctcatgggatggcatgcatgtggagtttagtaccaccttgcttattctaggagagggggacctccttaaaagggaggatgtcctcctagccacttgaagcatgtgtggtggagagaagaggggaaacacacgcgcgcgctcgctcgcctcgcctggcctggcctggcatggcagcgcgtgcacgacgtacgcgtcgaatggtccgaaaaattggctcgtcacccttgcgcagatgcagcctccttttgcagttttgttttgctgcaaattcggattcgtttttgttttggaaacgttccgaaaaatccggtgcgtgcaaccggcgtggagtccgaataagttacgcgcgacttatccggttcggttacgcgcagtagagatcgtgcgggcgccctgatcaagcgacccttctctatataaaccgacccgccgtcttcacgcagtatatacgcaaaatcaatctagggtttgcctcctactctgtactgcgccgtcgctcgtagactactccatcccgctcgccggcgtgcaccagcgatcgggagagcaggtctccggaacctcagcctttgacgtcctgcaccgggagaaggcggcaataaggtttttgggaagcgcttcgcgcgactgctccctgttcgttcgtgacggctcgccttcctcttcgctcgcgtgtttcgtgccttcgtagacacctgcaaaaagtttcgaccaagaagccggtcttttcgtcacctcggtacgtgttcaatatgttg

SEQ ID NO: 17331 - DNA, 3762 bp, Oryza sativa
catttaagatttaacagaaatttctccagaagtaaggagattcagttttcctgattaaggtttttatgttttccaacatgaaggttgatggcacaatccagaacatttcggacatagtcccagtaccatctgagttagctactcgagcaaggaaaatcatggacatgtttaatgaaatcaaagattacgctagtaaattcagtttgtctgagaatgatggagtgcggcgatctattcctgatatgcaccaagtgcggcagactagctctatggtatttgagcagagcattattggcagaggaagtatcaaggacactgtaattgaaaagatgctgtcccaaaacaaaagcagtacacctgaaagccatgtttcagtcctgggcatagttggtatgccaggagtaggcaagacaactctagcgcagcttgtgtacaacaacacagaagtatgcaaatcttttgatgtccgtgtttgggtctgtgtatcagagaacttcgatgtaaaagaaattcaggataagaggtttttgctagtattggatgacgtatggaatgaacgaagagactactgggaaatgttccgtttgccaatgttgacaacaaagctttgcaaaattatagtaactactcgaagtcagaatgttgctagattggttcaaacaatggattcctgtgaattaagctgcttagattctaatgatagctggtcattgttcaaacaaactgcccttttggatgaagaacatgcaatataatccaagtctacaagaaattggcaaggatattgtttcaaggtgtaaagggttgccgttggcaatcaagactattggaagcatgctgcgctacgaaccagatgaaactaagtggaaggatatcttagagagtgatctatgggacttagagcaatcacagaatgaggtactgccagcactggagctgagctataagcagatgcccatgtacttgaaacgatgttttattgccctctccttgtttccaaaagattacatacttcatgaagaaaatgtggttcttctgtgggagccactggagttacttcaacatggtgatggagcaaataaggcaaaacttgcagtttcatatctccatgaattagctcagaggtctatgattgaaattagtactcatagtgcatacaagatgcatgacctcatccatgatcttgcatgctttcttgctggagatgagtttgttagaactgaaggtaattcacaagttgaaatctcaccaaatgctcggtatttgtcagtagtaccaacatcaccctgggaaattagtactatcaatatttcagattcttcagattcactcaaagctatcattgtgattggtcatggacttgacgaaattgtaatcccagatgacatattcctaaagttcaaacggctgcgcgtctttagcttgaatggagctgcgcctaccaatctattaccagactcagctggcaacctaaaactcttacgctttttgaggttgagatgcagcatagattgccagatcatgcaactacctaaatcggtattccagctttttaatttacataccctagaactgatgaagccagcttttgatctgtatacaccaattgtaagtggaatcggccgactaattaagctagaaactttgcctccacttgaaatactaagtggatatgacagtaacttaagtgagctgaggaatataagaaaagtaaggagcctgagtctaaaagggctggattatgtatgtagtgttgaagatgcaatggaagctgatatcccgagtaaaattcacctccaatcactcaacttggattttacgagctcacaccatcaacaactgcagcagcataagcctggtgcagtatctcataaggaactattggagagtttgcaaccatgtcacaccctcagagatctgagtatatatggttacagaggcctgaccttcccgtgttgggttggtaacacttccttttccaagttgacaaaagtagtgttatccaagtgtgaatgggaatgccttccagcacttggtgagttgccttcccttgagtctttggagatttccagaatgtataatcttcgattcattggacgagagttttgctgcctaaatcaaagtgttaaagttttccgctcattggtcaacttgagtttttcctggatgtatgaattgtcagaatggtctggagtgaaggacggtgatttcgcttgcttagagactctcttgttatgccaggacaataaactaagatttcttccattggtgcccttctcgtccttggttacatgtaggttatcgaattgtggtaatctggtaacagttccagtatcctatgccctttgtgacctatatataaatgattgtgcaagtcttattgaacttccttctctcccatcccttattaagctgaagatatcaaactgctcaagcctaggagctacaatccctatgttcccagcccttcagtatctaagtatcaaggactgtgcgagtctacttgaacttcccactctcccatcacttatggaactgaacatatcaaattgctcaggcctgggagctacaatccctatgttcccagcccttcagtatctaagtatcaaggattgtgcgagtctacttgaacttcccactctcccatcacttatggaactgaacatatcagattgttcaggcctgggagctacaatccctatgttcccatcccttcagtatctaagtatcaagaactgtgcgagtctacttgaacttcccactctcctatcacttatggaactgaacatatcaaattgctaaggcctgggagctattattcctatgtctccaaccctttgcgagctaagtatcaacaaatgtgcaagtctacttgaacttcctacgatggaatcactttggaaactcgagatatcacactgcccaagcctacgtgcagttggtcttttcccagaactcagtgtactgaaactgtctggtccatttaaaactgaggtggttgatagttggctgagcttcaactcgccactcgaacacttggagatttattcttctccattggtgagcatcccgcttaggccccagtatttgacatcacttgctaccctcagattattattctgttatgatctgcaatactgtgatggacttgtcagtctcacctcgctcagagaactaaatgtaaaggagtgtcccaagctcaatttacatcgttcgctcccatgcaatctgcaaaagtttgagctttatggtagatagttgtcttgttacatatccacaaggctgattggtctaggcacttatttggttcatcagaatgacctttgggacacatggactaagcaggtaactatcccttattatagtgctactgaaaattttgcctactttttaaattttagtaggccgtggttaactgtttttgcttgtaacattgcaaacacacttagggccttttcgaattgctacgaatggcctaccaattttctgttagtttgaataataattatggttggtttggattgaaaccagctagttgataatagtccatgttatatttggcatcaatctagaatattcataactataatttcttgggttccatgtcagtagcaaatcaaatatgaccaaatacagtcttatcctaccagagaactggcagggggcactaccaaaatatactatccaaatagccccttaattactgtaggatcgaaacacaagaactaagccaaccaaaccctggggggggggggggggaag

SEQ ID NO: 17332 - DNA, 709 bp, Oryza sativa
catatttacttaattcaagtatagaatttaagtgtcatgcattatctcccttaaaagcaaaatctaagcctcataaaaagactagaatacatacaagttatgctagagacaaataaaacttcatagtattgctagcatgcacaagaaaataccatatgtatagaacaaagctctcttttctcaatttttcttattgtcaaattttgcttgataaaaccatgaggtacaaaactcccctcaaattatgccaaaaggatgaattatgcccaattctccacgaagaaaagcaaagcgattagaatccaaaggtttagtgaaaatatcagcaagttgcaactttgtatccaaaaacatcaattcaatgtcgcccttctcaacatgatccctcaaaaagtgaaaacgaatatcaatgtgctttgtgcgtgagtgttgaacaggattcttagcaatgttaatagcactagtattatcacaaaagagaggaactttctcaaaagtaagaccatagtctttcaaagttgaaataagccaaagaatctatgaacaacaactagtagcagcaatatattcagattcagcagttgattgagcaacactagattgtttcctagaagaccatgcaatcaatgatgtaccaagaaaatgacatgttccactagtacttttcctatcaattctacaaccagcaaaatcaacatcggaatatcca

SEQ ID NO: 17333 - DNA, 694 bp, Oryza sativa
gtatgcaacaatggccattatctgttcctctgaatctctgatgtaattaactacacgccttgacattgtgactgacatatgggacccatcacctacaggtctacttccttcgtcccaaaaataatatattctctcctattacaataaatttgaataacacctgttcagattcattgtactaaaatgtcacatccctttcaggttaagtaggtttttttaggacagagagaatatatatcaacaaccacgtttcggtgattttacataagaggccgatcccgttcatggttcctctgacggtgcaactcttgcaggacctggccctggcaatgtcgacggtgaggccgtcacgacggttcctgaacgatgccacgatgaacggggatgtcctgacggagggcaggtacggcacggtgaggcgagtgtacgtcgtggcagaggaggacgagtggaagccggcggagatccagcggctgatggtgtcgtggaaccctggcacggaggtgagggcgttgcagggagctgatcatatgcccatgttctcaaaggcgagggagctctcagaattactcatggagattgccacaaatatagttgagattttcagaagcatgttcttcagataaaacgttactggaacatatatatatttctgaaaaatggatatagataacaatgccttagactctacaaa

SEQ ID NO: 17334 - DNA, 6979 bp, Oryza sativa
acattggtttctggatagggaggccgacaaaaagtggaggagataaggacgcaatggtgttggacataggccacagctagggttgacaacccaaatatggggttggtgacaaccatgagaaataggaacgatgaagccagcaccaatatggaggagtgtgcggagatgagccatgtgggtggtgacatgcctgatgggcaggtggatcaatggggcaccgagcaagatggagtgatcccacaaggagactcttaggcagcggcacacggagagctcagggctgtgttggtgcttcacaaccattgcctcttcatcagagccgcatcactatatccagttggccaaagacacattgtgtttccatgaatgtggtgagccccagggaccataatagatgggccgtccagcaaaatggcctgtagatttgctccggaggagggcagccgtgatgtaggggcccattagtggtgatgaggtgcgcgtggtggagctaggtattggtgcgcaaaagaaaccgagacttgaaattgccatatttgttagaatagttggggtacgcgtaggagcattgggtaaggggtggcaaaataaaccgagactggaccccaaaaataccaaatgtgatcatcagttcctagcacggtcttaggtttgagaagatagatcccttgttcggtctttttgtttactacaccgggtgtctgaactaccaacattatacttatctcctctttattttgttccttatctagtcataccattctcttcgatctctcattcgccagcgccgtttgtagtctccgggtctttcatccagccgcaccctatctgctatatatatagaagacccctcttctccctcgttatcttccatctcccatctcctcccgcctcagattgccgttgcttgttcaccaaacagcactcccctagctctctgtatggctggcccatggccgccgcctgcctggcgcttactctaggttggtccgtccattcctatcacatgtgctccgggttccacgcatatcgtccagcgtggtcactttcactatggccgaagaaggagaatgaaagatatcaattttttttatcaagtttgattgtcattttcgaaggattgaattacccggatcaatatctcagtcatgactgaatgcccaccactagcgctgcgtgggggtttgggggcgtgccatatagtagtcatactaataagatagtaactataatcaaaatttgacatttatagcccgtacatatgggttattgtctaatgatccataaaagccaagctttcaaaggtacaagcccttacaaaagtttaaaagaaactggtggtggtgatggtgtgatcgactttatgacaagcaatgtcgaaggaaattaaaccaaagcaaatgatacatgtgtagacatgcatggagggcgcatccacaccaagcactacgcaatcacgcatggattgatcccttcaggtgttcttggaggaatccatggaacgaagctcccggatacgtttccgtatccccaggcggtacttcacgatagccatctggacatcctggaggatgtccacggtcaggtcatccacgttgttgcgacggcctgacataaggtcgcagacgatgagcttgatctccaattcacggttcttgcgtcgcagttcctctagcctcgctgttgcggcggcgatctgctgctcgaggatggtcttctcgtcgtccagcatcgttgcctgcacaaaacaagtaatgggatcgatcgacctctaactacctctatgtttggtgtatttgatggagtgatgttgtgagaagaaaaagcaactaaggcgctacttttatagccatatctgggtgacacaaagaaggaagttattaagtgcaaagatttgatatcatatccaaattaaatgcaaataaaagtataatgagtatatacttaaaatactacgtacacccgttgttttttaatttttatcaattttaactggcattgtattacattcacaagtattaagaggtcaactttttcgggctgtaaatatttgacagtgataacgatatttgagagggagcacaaatcgggtgtacggcgctgtttcacggcttatatgaaaatgtgcacttctagataaaaaaatgttgcaaatgattaaaatggtgaaacatagttgcataaagattaaacatttcactcatgcactagaaacatcaggattcaactgttgaaacatcaacagatgcacaagtatcggagtaaaaaaaatgaaagaccataagaatctctactaaaacattccgatcaatcacaaagaaacatataaaacatgtgagctgaaacatcgaaaaatcacaaaatgtaccaatgtagatctctccttggtcgcctgatcagagcttctattgatgaacatgtcagctatgatgtggagacccggtgctccataccttggatgaccataccttccttgtcgttggagtcaacggcaatgaccatctccttctctgtcgcttctttgacatggtggtgccgtcccctcctcctctctgctggtggcctcccagatgtcatggcttccttggcaaatcattgcgcctcacaagcttcttgcttattccgccatgacagctgtcctccccaccaacatcaccgccggcgaccacagaagtggcatgctgttgtcacagtgcctcgcttcagtatatgcagtgtgaggattgagagacactagaagagatgagaaggctcatgtgtgctagctggtgttactgggaactgatgttgaagataggtcctaatgattagtaaatgaatgcgatgtgatgctgccttgtgtgctagccggtaattggtgtaaattgtgatggaaataagagtaaatgaattacaggtagacaagaaaaacaacgctcactgcataagttatatcaggccttgtgtgacataaatagatcaaccatcccacaagtctttgatacctctccttgttcacctgatcaccggattcagcacatagcttatgattttgctcaattggtgtagaagccagccgagaatcgagcataccggtgtcataaagtaaatccaatgcatacttccgttgtgacaagactatccctctaggatatcttgcaatctagatgcctagaaagtattttagttggcctagatccttgacttcaaattccttacttaagttttccttcaatctagttatctccatagaatcatcacctgatgatcatgtcatcaacatacacagcaagcatagttatatggcatccattatggcgatagaataccgtgtgatctccattacactatatataccccataccactaattgcacgcttgaaatgatcaaaccatgcccttggcgattgtttaagaccatacaaagactttttgagtctcaacacctttgctctagtttgtaatgtagcaaaccctggtggaatttccatataaacttcttcctgaaggtctctacatagaaatgcattcttaacatccaactagtagaatggccaatcaaggttggccgcacaagtgatcaaggttctcaccgtgctcatctttgtaataggtgcaaatgtttcatcataatcaattccataagtttgactgtatcatttatccacaagtcttgccttatacctctcaatttttccatctaggttttgcttcacggtgtatacctacttgcaatcgaccactttcttcttgtctgggtagggtacatgatcccatgtcctgtttttctcaagagcttctaactcctctatcatagcttctcacaatcttggatcttggcttctaaccaatctttcgggattgccactgaattcaatgatgccacaaggccttgtaagtaggtgacaataaagagtacaagacatagttagctatgttgttattatcaccaccttcatcttcactttcaaagccatatctttgtggtggttttcccgccgcgcttcttgtcccctttcttatggcaataggtaattcagattctcctcccccttcttcagattcctcttctccttgccctaactcactatacacctgtatgggctttatatgatctaacatttgctcatcaacctcagcatcttgagatcatagccgctcgacttgttgtattactggaagtctacttctctgtgtgtaaacctgtagattctcttcttcacaaggctttctctactccttttcttgaacaggatcacccacacaacaaggaattgaaccaaccacaaccttcgtattcctttattgaataatcctcttcggagcccaacattgttggtatttcttaacctcacagataaaatccgcaagcgcaaaataccgatgtagcacttcacccaggagtattccaaggtatcaatttccacaaggaccatgtgtgtcgactcttcaccaggttcatccaaggatacgaagctaagataggctaagggtagagatgatttactagtgagagatagtgtctacagaaagctcaatttaatcctaacaaggtacatcgggagctggcttcgggcgctggccagcctgctgctcccagatatggctctacaacgtacacggacagggaggactttagtattttgagggctgtcaccacctctacacacacctcaaacctactgtgagatacgaagcaagaatgtgcagatgtgctgggggcttcttttgccggtggcaggtctcgtggatgtgcggatgtggagttggcaggacgacgacttgtgctagcatgaagcaagaatggggcttgacgtccgcggcggtgacttcctcgttctcggccgagtgttctccctcctttcggtttccccccttctttgggcgaacactgttctagttgtggggaacgctaaggggagggcggaggctccggcttgctgtaggagtttgcggcagattgatgatgtttcacgggtggacaagggcctgtctttgccgttggttacggtcaagttatgactgcttgtgagatgtcaaggactatttcgtggccatcaatgtgggggtgcttgtgtgggtgatgtgaagatgctggcgaaagccttgccatgcctttggccggttcgatgacgacggcgcccgcgggcgctgtttcccttcttggaggcgttgtcatggcgttctttcatatccccccccccccaaaatctccaggtgaaaaccttgttccgattttcgaatgagcggtgacggcgttacgcttcgtgtcctccttgtgggtgtcacttcggagaagttccaacgcatcgacgactgttgatggtctttttcagttcaaaagatttcataccttgtgttcggtgaggccttcaccttcttgggtctgcttcattcttgtggtgggtgacatgctcttcggttgtttctgctgatgaagtcgaagctgctcgctaatggggtgcagtgaagcttggcaacatgacatgttgcagtcttttccaaggagttatggtgctggccatgtgaaggaagaggctcctcggtggcttggctgatgtccattgttggatgtcggagctgcttttcgcattggcgactttcgtggcttcagtgtcgctgcagttgtgaagtcggcgctgctgggtcacttgtgtggctagctcagcaatgataacacctcttttgcgatgtgggagcttttgtgtcgcttttgtgtttagcttggcactgacgtcctgtgattgggctccgccgtcgttgttagttgtgtagcggtgggtttcagcctttattcctgtaattaaccgtgcaattgtatggttttcgggcccggttttccttataaactgggtcaattcttttcttctaagtataaaagtggaacaatgttccaccttaggtttcaaaaaactaattgtagcagtactgcttgcttctctgtcccaagcctgctcccttgcttcccacccgaacggcgccgtcgtcagcttgtccttcagctgttacaccatcaccaattcaccattcccctctgagctctgaattctgatacatgaagttactagtggagatttttttggtttggaagcctctcgatccattccattgctctctcagttatacacacacttagggcctgttcactttgctgccattttcaaccttaccaaattttggtaaagttgtcaaaaaagtggctacatttagtttgctaccaaatttttggtaactatataagaaatcatgtcaaaattttggcaagtttgccaaaattttagtaactataccaaaatttgtcaatgccaaaatttggtaaggttttttttggcatcaaggtgaacaggcccttagacatactcagcccaacatcttcaatccaatgcttcatcctaggaaacgtttccagttctcccaatctgtctcatacattaatgttgtactggtggttgttcagtcgaggccctgtttaattctcacgcaaaaacttttcaccctatcacatcgaatatttgacacatgcatagagtattaaatataaaaaaactaattgcatagattgcgtgtaaattatgagacgaatcttttaagcctaattgctccataatttaacaatgtggtgctacagtaaatatttgctaatgacggattaattatacttaataaattcgtctcgcagtttacaggtggaatctgtaatttattttgttattagtatacgtttagtatttcaaatatatatatccgtatatctgatgtgacacccaaaaccttttaccccctaactaaacacagcctaaatacgaagacacaacctaagtatgaagtggtatagtgacaataatccagattcctgtatgagttgacatttattttgtcctacgtacaatttctctaatttgcgagttttcttgctgcactctgcgtatatacaatcccatgtaagggtgtgtttataggcggtaaagtttgggcgtgtcatatcggatatacgaacaca

SEQ ID NO: 17335 - DNA, 3052 bp, Oryza sativa
gctacctggaggggaacggccacccattgctgatggcctaagactatctccaacaatactacccataactggagacccattgaacggtatgcgtcacgctgaaggaaaaggtcacgaacctatttctcgccttctccaacagggaacgcaaaagaaaaccagcacgcggactgtttctctctccacctcccgtgaaatcgttgtgccttgcgagccaggcgtttgggtcgatgagagagaacactcaaatttgggtcgcactctgcctggcacccaaaatgggtcctttgtatgggtaatctgttggaccgtgtttttgttccgctagagtggctgaagcatgcattttgagtttgggtgccactatgcctagcctgttggagatagtctaatgtcctacaagtgccgttgctttctcctacaatttgacccttccataaaataaaaaggaagaaaaaattatccagtttctactgcaacttcgcaattctgcaacacaaaatatctagctttttttttttttttttttgcgggggacaaaaatatctagctaagctgccgttcttccactaacccaagaaatggccggactgttcgcatcgtcggccgtgaaatgggccatcgacaacctctcctccctgctgccggcggcggcggcggcggggtcgaaccggggcctggacgcgctggaggagctccggatgctggagcggaccatgcggcggatccacgccacgctgcgcgacgcggagcagcgctggaacatccgcgaggagtccgccaagctgcggttggaggagctcaaggagctcgcctacgacgccgaggacgtggtggaggagtacgagtacgaggtgaaccggcgcaaggtggaggcgctcgagcggctcgccgccgttcatggcggcggcggcgccagcaagcgcaagcgcgaggaggtaaattaattaattaattaatcaactagtccggtcgctgcatctgctgacgaaatctattagactatcattagtggggtagtagcacgttgtctgtgctgtgattagtcatagtattttatactgattactagttttagctatactttgcaagtcccattcaggtcccaagtgtctgaaccctgaacaaaccccctgaagaggggataaaagcaaacagaaaactgtaacccctcttccatttttttttcccattagaaagctacaagacaagcactatattagtatattactgaattagctggttcagtactttgtcctagctgaatcaaaaccatcaaatggagttttctagcttggtattggtagtatatcgattcccaatgaagttagcttgaatcctaaacaaatgtgtctataggtagagacatgaaaagaatagtgaactgtcttcacggctgcacccagggttctgggattcgggccaaaaggtccgaatttcgtccattttggtgaggtccgagacacaatttcactcccatttcgtctgaatttggttaaaattgtcaaatttgatgttttgtccgaaatttctgaaattcgtccaattcggtggagcacgatttatatttgcaatcggatcccaaaaccctgtctgcaccatagatgactgaacctccctctttcaattctttttcaaaaaaaaggtacatgaagagcagttctccactgagtctggaatagttccagttccaagtgagttggctgacagaacaaggacagttattcagagattctgtgagatcaaagactactgcgatagttttagtttgtctgataatgatggggacagaaggattgtccctgatatcaatgctatgcggcagactagctcttttgtatttgcacccagaattcttggaagaaagaaagacatggagaatgttatcgcaaaattgctctctggggaaggcagccgtgttggaggttgcatgtctgttttggccattgttggtatgggaggattgggcaaaacaacactagcacagcttgtctacaatgatccaagggtacgccaatctttcgatctttgcgcatgggcttatgtttcagagtgttttgatgttcacaacctaacacgcaagatcatcagttctctaacccagagtaactgtgatcatatacaatctggtgatctacagggagcattggccaacgagataaaggacaagagggttttccttgtctttgatgatgtatggaatgagcgaagcgattactgggagttgttgatcacaccgatgtttgcttctaaatgttgtgacattatagtaaccactcggaatgagacagtggcaaggttggtgcaaacaacacaaatgtacaatatgaactgcttaagtcctgacgagagttggtcattgttcaagcaaacagcatttactgagcaagaaaatatcagtccagcaaaccttgtagagattgctcgaatggtatctgaaaaatgcaaggggttaccattggtaatcaagactgtagggagcatattgcgatttgaaaccaatgaaattaaatggagggatgtcctacaaagtgagttatgggacttggagcagactcagaacgaggttttgccagtgttggagttgagctacaagcacatgccgatagacctgaaacagtgcttcgttgccctttctctatatccaaaatattattatcttgatgaaaacatggtagtttggttatggaaactacttggtttacttcaaggcgatgaaattggaaagttatatttcaatgaattggttcagcgatcattgcttcaaagttctatccatggacagaaagaaggtcatgcatgatcttgtccatgatcttgcatgctttcttgcaggggaagagttctttagacttgaggaagataaacaaactgaagttccacggggcgctcgatacatgtcgataatgccaagatcactatgtaggaagagaattcaaatatcaaatgcctcgcaatctctcagagccatcatagtgataatgggtgatattgatatcgtaaatccggaagtgttgtttacgcactgtaagaagcttcggatcatttacgt

SEQ ID NO: 17336 - DNA, 1166 bp, Oryza sativa
catgaaactactacggcatctcactctatcaggttatgaatgtgctacacatttatcacgtcctaattctatgtctgagctatttaatttgcaaaccctggacatacaagcgtatacgttacttaaaattggacgactgattaacttgcaaactttgcctgaaatacatctcatgaaatgtggttgcttcgttgacataagagagttgaggaatatgaacaaaataaggaagttgtgtattcgtggactgcgtaatgtacctagtatcatgcatgcagatgaagctcatttacaaagtaaaaggaaccttgaggtactagagttagattttgacgaattatttcttgataaagatttcgatgaattgagaagttgtgaacatacagagcatggtgacgctaatgaagcagctgtcactcaatcgcgaggccagttacttgagaaactacgaccacactaccaaagcctcaaggtactaagaatacaaaacttgaaccatggaaactaccccagctggttgggcagtgcttctttttccaagttaactgaactgaagttacaggcttgtcaatctcaacaccttccaacacttggtgagttaccttctctcaaatcccttgatataagccgaatggagtttgtggaacacattggccatgagttttgcagccttcagcaaagattcaaagggttccaagcattacaagacttgagctttgatggtatgactcgattgtcagagtggtctggagtggaggatggtgagtttccacacttggagaccctgttattctggaattgaattgaagtctcttccatttgttccattgtcatgcttgcgtaatctcagattatatggttgcaaaaatcttgttacttttcctgcctcagctaccatgaaggaactaagcatctcgagttgtgagaaactgaaggaactgccagctctaccatcactccgttcattagacctgtcccattgtccaagcttgtttgcacttggtcacttccccttgctcacttccttgggactgtattatatattcaatgaagatatactatgcaagttggtgaattcgtacatgacactggaagacttaacaatttggtctgataccatcaagtcattcgctcttgaacccctcggcctaccatcagttcgaaag

SEQ ID NO: 17337 - DNA, 12284 bp, Oryza sativa
agtgcgctagttcatcactataagccgcaatgcttctttctgaatttatttactgctaaaaggcctaaaacatttcttacttttttattacgtgtccatatctcattgagtttattattgtttaagacttgtaaagtatgcgtgttgcctgttcggatcgcgtgttagagcacatggcaggcgctcaaaattaggcagctaatcatccattgtccactagccacttgtgatgtttttgaaataattaatcaataataataatgtgcctagccctgtacatacatgtccagatgttttggctgtcatctcttctgctaactctcccttttgactttacttacttgctgagttcctcatcagttcccttcctctctttccaagcttgcttccatcgtcgacatctcctccttgatccgagtagctcgtgatggccggactacttgcctctctggccataaggaaagcactggagaagctctcctcctacctggcagcgagcctttcggcatcgtcgtcctcgccgacgtctgggagggcaaggcaggagaaggaccacgaggacctgaggatgctggagcggaccatgcgcaggatccacgctactctgcatgacgcggagcagcactggaacatcagggaggagtccaccaagctgcggctcaaggagctcaaggatctcgcctactacgcggaggatgtggtggatgcgtatgagatgaatcgccagaaggtggaggctctcaaggcatttgcaggcgccgccagccacaagcgcaagtaccagcaggtaaacttctgctagcttctgccattaatccgattccggagtggaaagataactaattaatcgacatatatattttcttggaataggaaagcgagggcttgttctgtgattctcatacggttgccattacagacgagttggctatcaaaacaaggaaacttattgagcgatttgacgagatcaagtattattcagacaactttactttgtcggagaatgatggagagatacggcttactcctgatattagtggtttgcagacaagctctgttgtctttgagaatagcattgtgggaagagtgaaagataagaacaacattgtagaaaagttgttgtccaaaagaggtgacaatctagctagtccggtttctgtcatggcaattgttggtatggaaggattaggcaagacaacgctggcccagctagtgtataaccacccagaagtgtgcaagtattttgatgtgcacgcatgggtttgcgtatctgagcagtttgatatcaacaacataacacagagcatcattgtcgcggttacaaaggagaagtgtgatctatcagaacttcctaatctccatgagagactggtagaagaaattaagcaaaagaaagttttgcttgtgttggatgatgtgtggaatgaaagaagagattgttgggatctgctgtgcatgcctatgaacaccacgaagctttgtatgattgtagtgaccacccgcagcgagaaagtcgcaaagcttgtgcagacaatgtcaaacttctataacctagaatgcttgagttttgatgagagctggttgttgttcaggcaagttgctctcactgttaaccaagaaaatgctccaccaaacctggtagagattggaaaggctatagttagaaagtgcaagggctttgcctttagcgatcaagaggataggcagcatgctgcgctatgaaacggatgagcagagctggttggaggtcctagaaaatgtgctctgggacatggaccaaccatggaacgaggtttcgccatccttggagttgagctacaggcatatgcctgtatacctgaaatgatgttttgttgtccttgcacattatccgaaggattgcatacttaatgaacttgaggtgcttcagttgttgaaattagttgatcccttcaaaaaatggcagacatgataatgaggaaaaaaatggcagacatgataatgaggatgagcttgaaagtatttatctcgatgaattggtggagcagtcattccttcaagaaatttatttttgatgttcttgatgacgacgagttgaaatttcctttttctcaaattaactgaaaatagagatgaatcattgtgacactcagtagcttcctacgcttggtgatcttccgtccctcgtgtccctctatttctatggcgagtggcttgtgcacgacactggccggtccaggagttttggagccttgttcctgcaggtgttgggattagcttcattgagacattttgatactctgacgcccaagttgttccgagtgattcggagttagtggtggtgaaatttccacactacaatactatttacatctgcaatgacgctgccaacactagtcttatcctctgaggtttcttccatatatctgtgctcttcgtgtccttgagaactatattactgataggatgccactgtgtatcactgtaatgtattcctgcatggcctaaaactgcatatactacagattggtaggcaccgaaacatagaggtccactgtttgaatcccctctcatcgctagagtgcttgacaatcttatccgatggcaccagatgcatccctattgagcaaagacccctgccttcattcaggaattacatccgtttaagcgttctgggattgaagtacctgcttcccccttgacatgaagatctacaccactccactgccagccagcagggatagctagtcactcctccactaccttcctccctttctgagcagctccacgagctttttgccttggtctactttttgtcccctcatgttcaaaagctaacaaaacacatcgctcaactattcaaccagctaatatttcttatacttcctccgtttcatattataagtgaatgtggacaatgctagaaagtcttataatataaaacagaggaaacggaggaagtagttttacaagtttgatcaaatactgcgaaatgcttagcgtcgagagtccgatcacagtcacagcaggaaaatcaagcatccatgccactcactcattacttctcgtctctctctctctctctctctccctctctaccttatcttaagcaatagtttaagtctctacctcctattttcatgtcatctctatcctcacaacacatggtaacacccccaaaaaatttgtgttcaaatccagaaactaaaatatggaaccaacaaaagatttttgaaaattgcatcacgctaagtcttcctggtttttattgcaatttgtgccggtgccaatatttaaattatttcaaattcaaatcctaaatccttaattacaattcctaaaatggaaaaacaattcttttagcaaagtctggttttcgtccctatgttttttagggaaaacactgtaggggaagcccccacagtttaaaatttatatattaaaacaaagttatttacaccagattaatccaatttacaagcgtatctctctcaaacaaattaagcctatggactaagagggagagttcattcttaaagaaagctctccaggaggcaatagaaggagcaacattattaaaaattaatccattcctcggcttccaaatactccaagcggcatagagcaccttctccacaaagtgtgaggacctgtaagaacttttggcagtatacaacatctcctcaaaattcagagacaaatcccaaaccagtccaaattgtgcccaacactgagaactaaatggacactggaaaaacagatgcaaagtggtttctcttgcatttgccgagcataaaacacaggttaaagcagcattatgaggtgcacaatgtcgtctatccagcatgtcataagtattcaaacgatcaatcaacaggagccagccaaataccttaattttcatggcacatttgcttttccaaatccagttaatagagttaggcacctggatatgcataaagttcatagcataaattttctgtgaagagaagataccatttccccaaacatcggtccaaaggtctctgtcatcattgagctgactcaaatgatcagaggatgacattagcaaatactcctgaaatgcttgctcagacagtggaagcacaaagagctgtgaaagatctttctgggaaacatatgaactgaaatcttccattcctagcaaaagagaaaatcctgggaaaagcagctgacctgaccttattattccacagatcctccaagaataaacaagatttaccatcccccacagtgcagtttgaaatacccctgaaaatatccacaaactacaaaacatccctcctccaaaaagaccctttaggagcatttcatccctatgttgggctcaatccctccccactccctttctttcgtttcctctcctaggccaggccaactctccctccctcctctcctttcctcctagatcaggcgagccaagccgcctgtttagagagaaattttcaaatgatctctccgcccaggaaaataaaaataaaataaatatgaatgtaccagtgtactaagtacacaaagtaaattaatgacaaaggaatcattcattttattataattctcaaagaattacaaaaatacaagttccttggcgaatcatgctccacgacctatcagcgaagcggatctaacttggtgattgtgttgtcctggttccggggttcggaaaatacccgattaattactccaatgagtttaacttgtgacaccttcgattaagctactctagtcttcatcatcaatctttgcttcgcattctctcgtgtatgatgtagatgcgatgaagtgggcgttggtgggcgccacagtagcattcatggacttgtcagtccgtatgccggtggtgttggtgatatcgtctttgtgtacattggtacattttgtgattatccaatgtttgagctcacatgttttatatgtttctttgtgattgatcggaatgtttcagtagagattcttatggtctttcattttttttactctgatacttgtgcatttgttgatgtttcaacagttgaatactgatgcttctagtgcatgagtgaaatgcttaatctttatgcaactatgtttcaccattttaatcctttgcaacattttttttatctagaggtgcagcattttcatataagccgtgaaacagttgaactcttaatacttgtgaatgtaatacaatgccagttaaaattgataagaattacaaaacagcgggagtacgtagtattttaagtatatactcattatacttttatttgcaattaatttggatatgatatcaaatctttgcgcttcataacttccttctttgtcatccaaatgtagctataaaagtagcgccttagttgctttttcttctctcaacatcaccccatcaagtacaccaaacatagaggtagttagaggtcgatcgatcccattacttgctttgtgcaggcaacgatgctggacgacgagaagaccatcctcgagcagcagattgccattggaacagcgaggctggaggaactgcgacgcaccaaccgtgagttggagatcaagctcatcgtctgcgacctcatgttaggccgtcgcaacaacttggatgacctgaccatggacatcctccaggttgtccggatggctattgtgaagtactgcctggaaatacggaaacgtatcaaggagcttcgttccatggatttctccaagcccacatgatcaatgcacgtgtaattgcgtagtgcttagtgtggatgcgccctccatgcatgtctgctcatgtatcatttgctttggtttaatttcctttgacattgcttgtcataaagtcgatcacaccatcaccaccactaatttcttttaaacttttgtgagggcttgtacctttcaaagcttggcttttatggatcattagacaataacctatatgtacaggctataaatgtcaaattttgattatacttactatgttattagtatgactactatacggcacgcccccaaagcctcacccagcgctagtggtgggcactcagtcatgaccgagactttgatccgggtaattcaatcattcaaaaatgacaatcaaacttggtacaaaaaacttgatatcttttattctccttcttcggccatagtgaagtgaccatgttggacgatatgcgtggaacctggagcacatgtgatagggatggacagacgggcctagagtaagcgccatgcaggcggcggccatgggccagccatacagagagctaggggagtgctctttggtggacaggcaacgacaatctgaggcgggaagagatgggagatgaagctgacgagggagaagagggatctatatggcagatagggtagggctggatgaaggaccgttggactacaaacggcgttggcgaatgagagatcgaaggcgatggtatgactatataaggaacaaaataaagaggaggagataaggataatgttgatatatcgggtagttcgggcatccggtgtagtaaacaaaaagactgaacaagggatctatcttctcaaacctaagaccgagctaggaactgatgatcacatttggtttttttggggtccagccttggtttcttttgccaccccttacccaatgctcctacgtgtaccccactattctaatcaatatggcaatgtcaagtctcggtttctttagcgcacccatacccagtgctaccacgagctcctctagtctcctacacaaatatggtaaattttcatatcactacccaatccgcttgtttatataaataaaccaagataaccaaccatatcctttcctccacaatacccactcttgtttcttcagatctagagatcgaataggtgcagcagcaccgacgatgggatattattctccgaagcaaatcaggaggtcatgccaccagccagccattccatcagcactaatgggcccgtacatcacggctgccctcctccggagcaaatctacaggccgtattgctagatgtcccatctgttacggtccctggggctcaccacgagaaagtcgcaaagcttgtgcagacaatgccaaacttctatagcgtagaatgcttgagttttcatgagagctggttgttgttcaatcaagttgctctcactgttaaccaagaaaatgctccaccaaacatggtagagattggaaaggccatagttaaaaagtgtaagggcttgcctttagcgatcaagaggataggcagcatgctgcgctatgaaacgaatgagcagagctggttggaggtcctagaaaatgtgctctgggacatggaccaaccatggaaggtagtttcgtcatccttggagttgaactacaggcatatgactgtatacctggaatgatgttttgctgaccttgcactttattcgaaggattgcgtacttaatgaacttgaggtgcttcagttgttgaaattagctgatcccttcaaaaaatggcagacaagataatgaggtcattcattcaagaaatttatttttgatgttcttgatgatgacgagttgaaattttctttttctcaaattaactgagataaagagttttgctcccatccagcagctctcccggtaccgaatctcagcccttcatcctgcccgatcgaatggtgggaaacacgcggtacctccaggtacatattttctcatgagatggtaccggctgtgctgagagtggtggaagggtatttttgtcttttcgtgtagataagttttctccagctgaactaaccctagttcgattccccttgtgtgtggtagcggcgccagcggcggcaggtgtgtgggcgaccgtgacggcgacttggtggcaggcgcaatggtgccggttccggtgacgaggtggtggtggggtggtggcagtggttggtgcgttggctgccgaagctgtgaggtggcggggaccgcagtggtcccggccgcggtgatgaggtggtggaggcggtggccgatgcgtcggcaaccttgactgcgagatggtggcggccgcggtatcgaggtggtgtcatacccatgcctaatgtgtagtatatccatgttgggtgatgacgagtgggcccatgaaatgggatggatcccacaagtcagtgttatggccatgttataaggcaatctaggtcctgtgcacgagtcagtgaatgaagtgaattgaatctgattccactccttctgttcttcttcctttgccccctttctgttcttcacccgatcccgcaatttcttctcaaattatcttaagttatcagtgtattctgctgctagtttgtgtgattcgatctctcacgagctcgggtcataacaatttggtatcagagctgttctgatcggttctcttgctgcttgattggtagacccaagggaagggttggtgttttacgcaccgtgattctagcctaaggttcgatctgtagagagacgaggaagatagtggaaaccttacccaatggaagcatcaatggtggagtccgttgagctgcataagcagaaggcattcatggcgaggtttaaggcgaaggttgatgaattgagcgctgctgtggatcacatcctcaacaaggtatcgccctccctagctagccccctctacctaacaggcttctgttggtgctgtttcaagcctaggagcaaccacctacactgacgctcaacaagtgttcgatgaaatgccaagtaacaaagagccaaccataacaactgttcttcacttcacggtgagcgatgtgctctatctggtaaccacagaggtacttcatcaagtattagttccttatgatgtggagcatgtgatgattgtgatcgaggcggttacctatgtggaggccgtagtctctttcaagtccatctaagatgtaacacgagctcaacatgcactccatggacgctacatctatgatgggtgttgcttgttagatgtcaagtatgtgcagctatgctccagtgaacagaaggtagcaattcccaccaagtgttcgacgtccacacttgccacctcagccatgcccttgacagaccttgtaggtacagacacgtcacttatcagttacacctcaagtccaataagtgtagctgacgctcagtctagcatcaagtccattgcagccacatcctccaggctgagcaagcgtaaccagcgtgttgttaagtgggtgtcacgaatacgcattgctcgccgtcctgtgcacttggcctggaggagaaaggatatcgtgctcactcatgtcggtggtgtgtcattatttgcagaggcagcagatcaagtgtttcaagaaatatcatgtatgcttgtggatagcaaagcacataaacttgatgaaatggatatgaaagttttttattccagtgaggagttcatcactataattcccataactcacattatagatggaattgcaggcaaggtgcaaaatccaactgcagaaatgaaagtgtgcaatgtgtttacaagaaggttactatgtgccagaaatgttttcagtccttgaaattatgagactaatggagattatttattgttggacaagatactatcctggcaaagaaatggttttagaccttggaacaatgagcagtaggagctacataaggagtgcatatatggaggtttccaagaggggcatgaacatccagttatgcattgttttcgttcttgtgcattgcctcagtgcaaacatatgtttcaacttgtagtttggacaagcaatgggctaatttcagaaggcatgctctggaattcaataattcttaggattaattgcatggaattccaacttctcgactacctgcaaataaaattaaatcgggaagcaaatgtgcaaatttgggattttttttttgagaaagggagggtatctcccccgttttcattaaagaaaacgctcatgattacaacagttccagaaacatcaagttcttacagataagacgagagaaaaaaaaaaggaaaacaaacagttattacaggactaaaacattggcatttcaagcatcaaaacacaggtttccatcgtcgtcttcaaactcctcgccatcagtttagcctgcctccgtttccgggaaatttaactatttgccactcttgtgacatggcaattaacgatttgccacaccctgtcaatgacatgtgggccctcatgtgtctatgacatgtgggcctagtggcaaatcgttaagcaacatccgtaagagtggcaaatagttaaaagcccctctgtttcccatcctattctttgtctgccgcccctccatccaaattttgagtgaaagatctcatttgctacctgccttagtagctgcgccccccactgcatttttcctctgtctccctccttgctctgcaaaatactccaagagtttaaatttgagcaaatggtgtaaattatttctataggatcaacaggcagaattccatcaaagcaggctctgtttcttgctttccaaatggtccacaagactgctgtaacccccaccatgatcaacttcccattccctttgccaaatttcaaaacccacgagctaaacatttcccccacattcctgccaggcttcacattgagagcgcattcaagaacactccaactgaagtgagccatgggacaatctaaaaacagatgttggatggattcactcttgtcacagaattgacatttaatcgagcccttcctccaaccccttttgaacagattatcttttgtaagaatactatttcttagaaccagccaggaaaaaactttcaccctgggtggtgctttgattttccacatttttttagggataattgatcccctgtaatatcaaagctctgtagaaagatttaacagagaaacctttgttagacagtctccaaatcagtctgtctttttcattagttagactaacaaattccagggctctaccaatattagcccattttctctatttaactgcatttaggtctctcctgaatttgattgagcctaaccctctccttttgatctctgccacagtcacattttttgtcaaggttatgttataaagatctggagcagactctttaataggtttacccccccccccacaccaactatcttcccaaaagagggtactctccccattttccaccttcttgtcacaaaatctcaagaacagctctttgatctccattaaaccagaccaaaagtgagaatccccattcttatgtttgatttgagtcagagttttctttttcaaatacttgtttcttagcatgtcttgccacaaaccttctgtgttctccatattccacagccatttccccaacagagctttattcattacatctaaatctaaaatccccagccctccctgatctttagggaggcagatcactggccattgcactagatgatatttcctaataccttgatcttcttgccacaggaatctccttctataaaatcaattttttctctaactccacaaggaagagagtatagagatatcatataaagtgggacactgctaatgctagagttaatcaaagcaaccctccctcctattgccaggagtttcccctaccaacaccccaacttcttttcaattttttcctctacaggtttcctgtaacatcctgaaaattcccaacaataaaaatcactaaaatttcaaactttttttaaaaaaaaaacttttgcatcatgctgattgttatgattcctattgcttgccaaaccgtaaatgatcaccaagaaggtaaagaaaagaactacatttaagcaatagatatgattcatgagaatatatttaatcctacaaataattatgtgcaagatattaaaatcaaataaattaaaagttattattaacctattttataaaatattaaaatatttgaataatataggtgggtgcgataatacgagtacacatgaaatgatgatcattcaaatgaactgagctctctgtatatataatagaaatacgggagtatttaattcgatatgtagatcgattttgcaccaagttcctaattgcatttagggattgaaattttatatattaaacccctccatataaaataaactaacatatagataaattgagctaatgtgctattatgttaataacaggtctcattagaaaattatagaatctttaataaaccttaaaaacaaattggtaaaataaatataaattaaaaataaaagattaggtatggatagtaataaataaaatattatcgcgaccatatttggatcaattaaatttaattgcgatagaataagaatttaccctaattaaaactcaaataaattatataaacaaaatat

SEQ ID NO: 17338 - DNA, 1895 bp, Oryza sativa
  unsure (1)..(1895): unsure at all n locations
attctcccccaccccatctcatccttcctctccctctcccctctccactgcgccgccgttctcgtgccgccgcgccgccgttcccgtgctgccgcgttgccgttcccgtgccgccgcgccgccgttcctgcgccgccgttcccgtgccgccgtgccgccgctcctgcgccgccgtgcgccaccgtcgccgccgccgtcgtcgccgctgccgccgccggtgagccgccctccttctccctcgcgtccatcgccgccgccgctcgggtgggagagagccgagagagggagatagagccgagagagggagatagagccgggagagaggagagaaagaaaggaagaggaaaagagaggccgacagagagagaaagagagaagaaaggaaaaagggagagaaagaaaaagaaaggaaaagggaaaagagaaaagaaaagaaaagaaagagagggagagaaaagagagaaaaagaaggaaaggagaaaatagaagggaaattgggggagaaattaggaggatttaggaaataaaaatggtcggggttaataatagattatttttggaaattcctcgagcgtaatagtatttcgatcgaaattccgagttaattataaatatatgtttcttgatcagattagattaaaattggtaacaatttagatataattaataaccatacaattagatgaattcttatagattattatagattatttttggtaatctctataagtcatcggttcatggtagaaattcggattcaattactaggaatcttagccgtgtattatatttaatcgtttagtcatagactaaattaaattgtataatatttctaagatttcgtccgatatttagctcgtaatagaaatttctaacctgttatatggatataatgctcgggatgagtaaattaaaaacttatgacaacaaaatatttatacccgcaaaatagtttaaatcgaaattgggtttgccgtagttcgcagatagtaaagttaataaaaaggaatcgactttcgcattcgacttttactcggatttaagtgaaacttgaacctaaattcatctaaattcataagctttccaatgatatataattcactatttaacaaaatatatttataattataaattaattaatatcaaatgattagataatagttaacctaaatagtgtgccaatgaataaaaatggatattgtacagtagcataattatctttaacctgtattgtatagcttacagtaaaaagcaactactcaaatatatgatccaataataagatattgttgcttacacatatactatacatcccattatagtggtacggtatagtattaatttgcgtgttgcataaattaaattaagagggagagtatgacaaacatgtatattagataaataccagttataaatcttgatctcatataattatagttatagttcaactgtaaattaggattattcattgtaaaattatgtgatgggataatctgtacccataatatgattaacctgaacaactctaacatacaaagcatggataattattaaccttttataatttattgtgacaagtaaaatatgttcataattaaagtaaagcttccatcaataaaataataatacaaatgatgcactataactatttgattgatcctaaatccatctaacaacagaacctctagtaaataaccgtcctatgtagatagatgcatgcttagccataatccttccatagccacttgatagactaaaccactgattagccaaatatatatgtatcccataaatgctatgtaggttaactcctaaataggccacgatgacaatagaaagattaagaaactttagccttagcatgattgggatccattagcanacacgaatagtac

SEQ ID NO: 17339 - DNA, 10073 bp, Oryza sativa
ataatctgtacccataatatgattaacctgaacaactctaacatacaaagcatggataattattaaccttttataatttattgtgacaagtaaaatatgttcataattaaagtaaagcttccatcaataaaataataatacaaatgatgcactataactatttgattgatcctaaatccatctaacaacagaacctctagtaaataaccgtcctatgtagatagatgcatgcttagccataatccttccatagccacttgatagactaaaccactgattagccaaatatatatgtatcccataaatgctatgtaggttaactcctaaataggccacgatgacaatagaaagattaagaaactttagccttagcatgattgggatccattagcaaacacgaatagtacattttgttgcgcatatttgattgttgtttgaatattggtttttctcgcgtattatagaccttgtgtatcggtagtcgtgaggcaacgtctgcaacttccaggaggtgaaggttgatcaagattatatcaagaataaggactatcctgagcaaggcaagtcatcactattccttgaacatgttgatcctaattgcgaaattgttttgtttacaaataaaattgcatgcaatcatgaacatcctacttgtgattataccatgccttgattattgttcacctttaaatctttgtaaccatagatacgtacgagtccctagtcaactatgacacttgcttagaaatgctattttagattcatgcatactcatatttatcaaatgctatatgcttgggcaattacctttgggaaggtaattgagatgcggcatgtggagacatgagcgccacattgccatgatattgatgacataatttgtgaaaggaaaataaagtaaaacaattgttttcgactggggcggctggaggatttgggtggtgtccggaaaaggctagtgccgtccctggtcaattaaggaccgagccatgaagttaagcatgaaacgacccccgtacaaccgcatttctcgtatgggtatagacctagcagagtagatagctgagcggaggcagtatccatgcatagtggtttcttgatgtgtgaggcaggggctctacggtggggcagccattggtaggaccgcgaggcgggtgtctacaatggtgtcgccatcggtaggactgccatgtgagattctaaaacataattataacttaatgcatgtgtgagtcttcccttcccgggtgcgccagaactcctctcactgctagaaaccgtgtacgcctagagtgtatgaggatgaaaagttcatggagcgggtactgccaatgcgaggttatcgaaaagctttgccgtgacgcgtctcatgtgttgggacgaggctcatgtgttgggcagtcgcggagtgcgggtaaagtgtacatccactgcagtgtgagtaaaccaaatctattcgaatagccgtgcttgcggttattgagcaccgggacatgtattacacttggctagactctaaattcttaacttgtgtgggatgggatattgcatgatgaattttatgctgatggagccacatcccgagagaagggaaggtggacatcctcagaaaaccatgacgattcaatggcgcgaagctatccttgggatcacaatggatggtggacagaaccgtcgttgtttaaaagtgaacactggtactaaaatttgatcagtctatgctaggttttaggcttgtgaaaagaattgtaaaattagctttatgcaaaagaacctgaagccattccttgaaataccctctgtcatatgcattgttgttgtggtggcttgctgagtacggttggtactcacccttgctatttatatatcttttaggagagtgttgaagagaagcccttgtcggtacgcttgcgtatcccacaagatgatcggagtgctgtcttgttctaggtctcgttccccagtcgactgcctgtggcatgttaaccgggcccttatattattttgtcttccgctgttgttctctgatagttgttggcctacctggccctaatgtaagtatttaactcttttagcctaaattcattcgtgatatgttgtgatccaactatgtatgtgtgtaccaactactgatccagggattggtacggataaacacagaagatttccgatttccaaaatcgagggcctacatttccaatctttgttatggattcttacttgaactatgggaacacccaaatatttcattggcagtctcccaatttggcaagtgaacatttggctgtatgagtcctgtctctcagctgcctctcccaggcaaaaaacttcacttttatgaaagttcacttttatgaaagttcacttttaggccagtcaattgctcaaaaatacacagaatgaatttgaggttttttgcatattccagagaatcctggatcaggcatatggtatcatcggcatattgtaaaatagccaccccctctctcatgacatccattcccaaacccttgattagtccctgttgctctgctcttttgataagaatggttaaaacatcagcagcaatgttaaaaagcaagggtgagagtggatccccctgtctcaaccctttgtgtgttgtaaaatagtgccctatctgatcattcactcttatggccactttcccccctttaaccactttcaagatccaatcagaccatatgtcagggaatcccttggccttcatcattttatacacaaaagaccacttaatgttatcatataacttttaaaaatcaattttgaaaagaattcctgcctgctttttttgatgaattgagttcagaatttcatgcaaagttacaaccccttccattatatatctgttttttatgaaagctgtttgattcaaagcaatcaagacttcaatcacctcagccagcctttccatcaaaatttttgttatgattttgaaactcacatttaaaagacatattggtctgaatttctgtatcattcttgcttctttgcatttagggatcaaagttataataccataatttaatctctcaactccaatttttcttttcatgaaatctgtgattagttccatcaagtcatccttaataagataccaaaaatgtttctaaaattccacaggaaatccatcaggcccaggggccttattgttttccatcccaaaaactacatttttcagttcctccatttctattggtctgattaatctctctttttcagcttcactcaacatagctatgccttccagattcaaagtaaaatcattctctgggggggggaccaaaaagctgtttataaaaatttgttatatatttcattagatcactctgtcctttaatctccccctcttcctgatccagagaataaatcatgttttttcttttccttccattggctttagcatggtaatattttgtgttatcatccccttccaaaaggtttttttctttacatctctgcatccatttcaatctatcctctcttactactttcttcaactcttcctccaaatcccctctctcttttctttccagaatagtcattccatatgcttcacattttttatcaatgtcttctatttttcccataatttcctgttttttccttttgtacatcccttcccagttcatgttccaaccttttagtttctttctcattttttgtagcctccattgccatttatcaatactggatccatttatgtgcaaatttgggataacttcagaactatgtcaatttccggtttctccatctggcagatgttatggcagaaagtaccatggcctccgcctgctcgattttcagttcatccattttggatgattctcaaggtagtagtatgcgtgcagttgcaaatcagttttggcattgcttatatgctctatttcgctggcgtgcttcctctaggctcctgcaatcctgttgtaggctttcccaagaactaatgcataaatgtgcacttgtaagctggactacgcatttacaactaattgcaaaatcttcaaaggatatgtatatgcatatatatatacttgccgacgtgatgtgcttcgtgtggtgaacgcatatatatatatcagaacagtggtcaaaatcttccatgacactagccacttagtcgtgcgttgcacgactttgaattcccgtatgaaagccatctatatatgcatcgtaattatgtcaaaataacctagccgttctcagactaccgagtaggcatgaaattgccgataagtcatctttgttggttgattttatcgacttatgtcgataagggttaggagaggatctaaaccaccggtttccttatcctaacaagaaacaaactaagagacaaatttgttttcttgtgtgatcggtacagaaaacgaattctaaactaattgagataacccccgagccccaccagtgtcgtctatataaagaaagagaaggaaggaggcaaatgacgactgatctctctctaatttcgaaccctaattaattgcccgatcaatcaaggcactggaaggggttcgtgaggcatctctagaagaagaagaaaaggagaacagcaatggcttcaaacataggtcagtagatcaattatttttccgcataagtaagaggtgattgtttgtagactaaagcctaatatcctgtaataagaactccaacattgtggtatcagagctgatctttagtccactcaatccctcataatcacatcatccctgtgattagaagccatccctaaaaaaaggttcaagattgattcggcatgaacaattttgaattagattagattaatttctttaagtcttggttgcatattaagccatgttatactgattggtctcggtcatcagtagaagaagctgtttaattcaagttttctatttaattggttatccatcagtggagattaagagaaggggattgggataaacagattgaaactcccaatttccccgcaccctaagccgaagcaaattaagaaggggataaactagattgaaattcccctaaatttagcaaaaggaaattcccaatttccgcactcaaaattcctagaccgaaactagggtttcggctagtacaaagcaacaagaattaggggataaacaagattgaaactccccatgggtaagcaaagggaataaacaagattgaaatttcccgaaaccccaataagccgcatcaaatcagtctagaattcccaaatcgaagaacccaaattttgggaagaaccctaaatcccacatacccgtatcaaaactcaaatcaaatcaatctaagctagagttttggttcacttacaagaattgcgaaacctcctaagcctaccggagcactccgggaagcggcgtcgctgccttcacctcctcgcagccgcgttgggttctctgcgcgcgccgtcttggagtttacctccaccgtccctcaccggggacaggaagcgtcggcttggcggctgccttcgggttcccccccccccccccccgccgacgaggtctggccgtagcacacggcttggcgccgccctcgggcacgccccccagccagtcgaggtggagccgctgcggcgctcgccgccacatgcgcgcgccacctcgccggaccgccgtcgcaacatcgccgccgattcgctcgctcgctcgccggacgccgaatcgggggagagaaggggagaaatggggattagggttagggtttgacccgttcagcgatttcagcggcgaaggcgaaatcttggccgtctgtttgatcggacggccatcctcgctcccgcgtcgggccgtcgccgtcatgggccgcgccgatctgggccgagtccgcctaagcgccgcgcgcgcacataggtaggccggtcctttttgggccggcttatcgataagaatgcgctttttattttaatttattattaagcccgcgaatttaatttctcagaatttacttagcccattttatgggccagcttaggaagtgatgggccgcattattattttaagcccgccatttatgtcttatttatttccagaaatttatttatgagttttcttagccatataaattgctggaaaattatggtcaattatttgatcacttagaaaattatttctagttaaatggaaccaacgggaagtttggctagaaagaaattaatgatatgatattatatttgaccaacgttaatataatttcatgtcaatatttattaagattattatttccttaagccacttaatttatttctagttgaatggaaatataactagaaagtatttatgatttcatgtcaacatcattatgatggtcatttccttagtatattaattatttatagtcgaatggaaccaacgagaaattcgactagaaagcattaagatgtgaagttatattcaacccactttattatgattgcgtgtcaattataattttttattccttagttattttctaccaaacagtgatataattgaggaattgattttaagattattcataattatttatgaccaatggtgctttgactatgaaattctaagtttattttgcatatgatcgactaagccaatgtaaattttatgcaattggcaatgcttattatttaagatcagttgcaatactgagtaatttatttctagattaatggaccaacgggaagtttatctagaaaaaagatgatttcattaagattattatttccttaattatttctgcccaacggtgatgtaattaaggaaacatctaagtatcgtcaatcattaatttcattttctttgtcatcttggcctttacggtgatatgacttagaattttacttatgccattagtgcattaattcctctgtcactcgtgccttacggtgatatgatcaatgatctctaatctgttactaagcttaattcctttaccatttctgcccaacggtgatatggctaaggattttaatttcatgtcatttactaatggctttatgccctatatcatattacctacttttggtaatttgatttaggatattgattttcagtaattcattattctctgccatttcataatcctttctaccctatggtgtttgattatgaaaattaagatttatttgtatgtgattaattaagccaatggaaattaattgcattactaatgtttaattaataattaatttttcagcattaggacagcttaaggccattcagcttcttgatggatcaaattacattgaatggagaaataatgtgcttattaacttagccatgttggattatgacttagccataagagaggatcctcccgaggaacctcaaccggccgaagaactcaatataattggggaagaatatgataatctcatgtgggcctacaataagaagttagccaactgggagaagtccaacagaatgtgcttaatttatgtcaagggtgccatctctctagaagttattggagaaatcattgactctaatgacattaagacgtatctggcaaacattgaagaaagttttgaatttgcacctgagactcatgccaatacgcttgtaaatgagatgatcactagtcattacgatggcaaaagtggtataaggaagcacatccttgagatgactcatatggcaaatcaactcagatccatggatatgaaaatatctgatggatttttagagcacatcatcatgagatctcttggtcctaactatgatccattcaaaataaaatataacactcagaaagaggagtggaccatacaagaattgatcttacactccgtggaagaggaagagcgccagaaagctggaaagcagaaggttaaagaccggctaaacctcactaatgcctttgataaaggcaaaaattctatcaaggggaatcctctaataagaatagcaagccagagggtgagcagaagcaagaagggatcaaggcctccacttcagctgttcctttaagcacaagtccctactgccacttctgtgcgtcagatggacattggcagagcaattgctcacacttcacagtgtggttagtcaagaaaggtataaatgaaattaaataaatcccttgtgatgaattttcccttaatacttagtgagtttgactcaatgccgctgtgcatgtttctaactcattacaggaaactcgcactgtccaaacggtagcaaagaggggagtgaacactcagagtaactgatggagtgaagatgaaagtgaagggttgttggagacctcacacttagtttctccagcagttgcaataatgtctcatttgttcactctattaagagaaactttactagtttaattatttaaagtcatgtgagaaacgggtcatgtctgttatttttccaaatagaacatgatatattaagtgtgataataaagtgattggtcttgtccttgtgcacgacagtcatatttgttcttttggatgaccatgtgactattataataattgtttgtaatgacaaaagatgagacgtcattgaaattgtgacattgtcattgatgtcacatttctaggggaggttagaacgtctcataagttggagattttctttcccttggattaattttaagtaatttaagctttaagggaagcttcactaagttaagaatttagccaataaataacttttggctatgtttacccataaggctatgtttactcataagcaacctccgatttccttcaagaaatttaagattgaagatactaatgctaaaataaaatgaagttatgagatcggattatggtggtaaacactaaataaagcttgttcacccgatgaagacattaaaaataagcgttcatccaaatggttttcgaaccatgtaagaataaattgagattgatgaacaaaataagacattaaagtgttcatctaaatgttttttcgaaccatgtaataaagaatttagtaaaagtttctaaatgagtcaaaaataggccatttaagtgggttaataaaattaagcctgactctaatggaaattttcgaacaattcaagtgaggtggacagctgcatgaaaattaaaggtgggaaatttcattcaccggtactctatactaacgacattttattgtcaagcaatccatattgatgttagaaactaaggaatttttccatgaattattttggtctgaaggagtactgggcttatatcagtaagtcatacattgacataaattaaagaaataatttgagagaattcagttaaagttagtcaagctgagattaaattctaaagttagactcagctgacagaagcttgagattagttcaaatctggatgcatacagatttggcaatcattttgctgggaatcttggcagtattaattaaatccagactagacggccactggtattaagaaagttttgtattatctgcaaaacaattttaagtaacatgctcatatttctaaagtccaatgatctcagaagtttagagacatttggacacttattttgtgagatgtgtggatatttataaagattattaagttaactaagattaagctatgtccacacataggggagcaataaccatggaaaagctccaaaataatctcttactgcatagtcgacgatgcagttagattttaaagcatgttatgattaatcataagaatatttcccagaaataagagtggtaaatagcgctcataaaccactcaaaaggtgtaaaccacccaaaatatactgtgttataagttgtgcactaattgaacacagttttttattctagtagcgacatgttgtgtgttttctgcctaacacattggtatggttgtgaaagatatgtcccaggatcgaattattaagctaagcatgtgctaatggatccatactctaaaggctcataaattaagattaattaagattatgttctggccagtacatatgtaaattagagccttactaagatcctggatgagggggacttaatttttcaatcagcacccactaagttaagcttgagtttatttgagtactatagtgagctataggtcttgttgtctcagtgacgcataatgttgttgaagacacattgccttggggagctat

SEQ ID NO: 17340 - DNA, 8160 bp, Oryza sativa
tgttggttgattttatcgacttatgtcgataagggttaggagaggatctaaaccatcggtttccttatcctaacaagaaacaaactaagagacaaattcattttcttgtgtgatcggtacggaaaacgaattctaaactaattgagataacccccgggccccaccagtgtcgtttatataaagaaagagaaggaaggaggcagatgacgactgatctctctctaatttcaaaccctaattaattgcccgatcaatcaaggcactggaaggggttcgtgaggcatctctagaagaagaagaaaaggagaacagcaatggcttcaaacacaggtcagtagatcaattatttttccgcataagtaagaggtgattgtttgtagactaaagcctaagatcctgtaataagaactccaacaatctttccaatgatgagcgaattaaacttattaagatgagacagaatagatttaccttctggtatgcgaattgtgtaccggcattctttaaggcataatttgttggcaagacttttcttcatgcctactcggtagtctgagtatatgaaagccatgtatataatcatgaaatttcagttgattaagtcatctagacttggaccaagaagatcaatcaacatgatattattgtactccccctccaccccaaacttcagatgaggacttccagctgaaatttgtaaccaaaactcaatattaaaatgagtgaacaaatatatttgaatgaataaaaaatttctggtagagaggatatcagtctctttgttcaccttttggaaatcacatgcaggaattgagcatatattacggaattcttaagccatcagctaaattctaacctgctacggattaagatttatttatttgttgattgactggtaaagagtaaatcaaattctgcacggtatatgatggctgctaaatagtaaatcaaattctgcacagtatacgaagactatgccttgcagtatattaataatagcaattctacggtccttgaggaggtaccatgagataccaaaaatttagtgtaaaatttggtacctcatggtaccttatagtacctaggtacaaagagttaccaaatttacaatagaaaaagtggtacctcatggtacctcctcaaggaccgtaaaattgctcattttttctattatatatccataccaattgaaaagcatttgggtagtaactttctattatctcggtgatgactgaagggttatttattagatttctgtactgttaaactgtatccaaatctgaccagaacattatctttatcctgaaagaatacatacagtcatctttatcctcgatatggcgtttctgatctgctacttgccttcccccacatcgtactgcttaagtccatgacccccatatatatcttcaccattcacggtcgtgctcgtggagtcctcgttccgatcgtggccggcctcgcgctcccatctaattatctcacgatcagaagagaaagaagtgtctcgtttctatcaggattgagatcgtacgaatatagggaaattaccggacagacatggatagatagatacgatcgatggcctatcatgtacagtatatggattgaacggctggcacattgtagttagaggcagagcccgcaacattagtgtaaaatcaaatgtgtttttgattattattctatgataaacaattggcattgaagattgttggttttggtatttggaatttattcacgaagtggttttggagatgattggatttcacaggtgatctacagaatactgctgaattgcggtccggtcaaaccgggctagtgcggccggtcaaacctgaggtatatgcgtggtcagaccggcgcagcccgcggtctgaccggccgacgctatgtcggtttcggtttcggattgtttgtttggatatccgtgattgtttcatgattatggcttctagatggatactatacgtatgtaatactgttgtttgttactaatgagtcaagttggagatagcttggtcttggaatatgatttctttgtttatttcatgtgtaggtgacttgatgccttgggagagtatttgcggtgatggaccgggagttggcttggggataagacgacgtccgtggtggtcagagatcatgcgggatacttaggctagagttgatgcacatggttgatggagattccatatggcatacgatggaggtattgtgtgcgtatgggatgcggagtcgaatttggaaggagtccaaatttggtatgattggttatgtaaagtttgtttcttgtactagatggtttcctaaggtgtttaggacttctagtatgagtttggttcgtggctttaggctgcctacctcgggtataaatagagggagagcgtgaggcttcccggtatcgcttttgagagcaattgagttgagttttgagttagggtttcgagtttagtcgaaatttttgtaaggagtgttgttggtgcactttgtaaacacagagagaatcaataaagtcgtcatctattttaagagttcttcgatttgtgtttcaccgagtttcggcggtctaaccgacgactcatcggtggtcagaccggtgggagaaaggcggtccgaccggcagcggcaacaggcgcggcaagtgatctcggtggtcagaccagagatttaacctcggtcagactggcggctacacttcggtcagaccggcagattaatctcggtcagaccgatctccgtcgaatttgagggtaacttttatttccgctaaaagttttcggtttttgggtataccaaccattcacccccctggttggcttagctcttgtgtttgatcctacaattagatcattgtaggatatacggttctgattatatgatttatctagtttttgatacacaccgcaattggccataccggcctatgccagggaaggggaaaaaaacaaagtcaaaaaacaaggaagagaaaaaggaaaaagaaaaactcgaacgctactccaaacaacggagtgggcagagccacgctacactcccaacaagtccccaaaggaagcaacgcccgctaacgaccacaaccggccctccgacaggatggactcttggaccattgagaccgaagagagcgcggagtcaaacaccctggagttacgttccttccatagctaccacgagaccaggaggaccagggagtcaaagctggcacggaggtgattaggtaaaccagccttggaagatggccaccagtagggatggcaatggggacccgaacccgatacccggcgggtaaaacatctattaggagctgcaaatgggtcaattttcctccccatggggctcctaacggcaaaaaactccccccgtcgggtgagccggattcgggggcgttccctcccagaatttgtttcgtttttagattttttttttaatatttatagaaataatctatcggcgagaaaaattgcaaaaatagaccctgccgcccaccattggggcggcaagctgacgtggcagacggtgggtagaccgcgccgtctgctgccgtcggccaaaattccgattaggcccttgccgcccatacagagggcggcaagggtctaattgcaattttggctgccctccaggagcttgcggctgtactttttgcatctgggtcccttgccgccctaagatgtaaaaagtacagccaaaatatttttctatgtaatgttaataaaaaataaagaagtatttgttggtaaaacttgttaatattgttataaaaatgtattgaagttggttgttgcgcaatttcatatgttaagtgagatattattttgtaccttattcgacgtattagtactcggataattaatataggcctatcgcagtctcggtcgtagaaacattatatggacttaaacaaggagaattatgtaacatgaagaaatagtagtacaatttgaacatgatacaactatttcgattgcggttacatagatgatattagattcgaactaggagggaggtagtgcaatagttgaacacaacgacgatgtagtaatgggacaaggaagcatgacagtagaaatttcaatatgccaagttgtccgataatagctaacccctacgtgaggatccctctcctctctcaaaccgcgctttagtaaccctgtattgctctggtagttcaagctgcacaacacggctaggtggagttagaacccttctggtgtctatccattctctgtattgacatctccttggtggttcctgggaggaaagaatagatgtaaagcgagcaaagttagtcaatgttgtgagaaaataaggattaatgtaatcaaaatattcttaccatgaaatcgtcgtcaagaatatttggacaaacaaagaaccttcgacccaatgttgtaggatttacggaacgaagaacctgacaacgatcaccacacctgcatcttggacgggcttcccatggagggagtgccgtagttagcacccgccagtcgctctgttgttcacgacattgtcgttcataagccgcttttctctttaagtattgctcagtactttcggatgcgaaataccagcgaccttcttgtaaacaagtggttaggtcaagaacgggattttctgtatcgacccactcgatgtatgcgcaagccgtagtgcggatctgccgaatagagtagtgttacgaagaaaaaagcgattgcccatacggaatgaataagcatttgcagataataaaatacctcacggtcatagttagggcacctaaaaaagcaccttcctcgaatatcaagattcctcgaagccattagttggcatcgatcaccgcataggcagagtggacgctggcaccaaggtggtagtaggtatacacaaggatcgctgcgccagtttggatcctcaacaccccggcgtcaagccattgacgaaagccggtaggatttgtagtgaagaagtggggaagagagtactgaatgtgactgagttctgaaaaattgtgaggcctcactcgttaaggcgacttatatatgcgcaaaaaatcgagtgatatccttgacatgtgaacgtggtggggcatggtgggtacgcctgattggcgccgaaagttgcattcttgatcggcgtcgaaagttacgttggtcgtatgcagcaaatggcgggcaaatactcgtagagcacgcgaataaaggaggctgcatcggtgcgggagaaagtagtcgtgcatgcgccgaaaggtatcgtgcatgcgccgaaagatatcgtgcacatataacaacaacgtagtcattacacaagcatacagtactggaaagtgaagcaaataaacaaagagaagactgctctactggccctgccccgcgccgcgaccacgcttggtcctccgggcctgtgctcgcacgtggtcctgggagtaggtgaaacgatccggtggcacagcatgggtagcacgagtgtcaggtggaggagtggcctgcgcctggtcctgcgtctgcaccggcggtgcgcctcccagctgtgaggggccgatgacgtcctctgccgagcctgaagcgaagtcaaagtcagtgatgtcgaagagcacggtggaagacagcaagcggtccgacgaggtcccagcatggtccagtggtggaccctgactcgacgtgccggctgcctgtgacgaagccccagtgtactgctggaactacgctgagtgcgaggtcgacgcagctggctgagacgctgaccctgcagcgtgggagaagtaggcggcctgcgtcatagcgaactgggcgaaggtggggtgctgaatggtgcacgaaaccctgaatcaatcggcaagtgaaacggctcacatatatgtgcgaggcatgtacagaaaaatccttaaaaatacttacctccgtgcggagggggagtcggcctaggaacgtgcgcagctggacggggaccagtcggtacgggtggccgccgtacagctgcgtctgcccgagcaacgtcgtctgcacgacaggtgagcactcggagaatcgagcgcatcgactccaccatccgcgtgtacgtcgtcaggtgctcctctacgggtaccggaatccccgcgtctaaacgttggatcgtcgttgaaccgtcaacgacgacccggttgatgtcgtcgacctgcatggttaatttgttcatacatattcgtaacatttgacgatgagaaagacataaaaacataaaggaatggtgcgatgcagggtactcacacaacgagcgaagtcctggtcgcggtgcctggcgtagaggtctctagtgctcgcaatgtggggctgctgctccaagggagcgaaggtgaccctagtacgggtgcgtggctggtaccagcgtaggtaggcctggtacgcctcctcagtgtgtggctctccctcgtgctccacgacctcctcggttgcgagcaaccagtcctcaacaaaagtcgccaacttggcgggccagtcgccagctaactgctgacccttccgcgtgtacctgcgaattaatgtgtaatattagtgtgaatcgagagatgttacaagttattgtgaacaggtacattttaatgcaataacggaaagcgtagtgaccgatcttaccggtgaacagcagctgggacggtcgtcggaaacggtactggaaagggctgatggaagccgaactgccgcatcacgcggaaaggggcgtgaggctcaacgcagatgtcgaagaccatcggaaccgtagtcatccagtacgcctggtccctggtgtagagtgtgcacagacccaacggcgcacgagcctgggtagccgcggcactgtagggctcccacacgacgtcagtcagcaaaaggcggtcgaactccataacaaactcaggatacgaccgcctaacctggacgtgagcccatcggcgctgcaatacgagacgatcgatttgatgtataatgaactgagcaattaacttaacaaagctagaagatcgatgcaacgtacctgacgacggcaccacagagtacccatcgtagggtagtcgacctctggtcgctcctcgtacagtgactcctcgtacgcgtgctagtccacctccgggcggccgatcgcaatcctctcagctgcccagatagaaagaaagagagggcacccaccaaaggtcgcgctgggatacgtcttcgtgcaagcctcacaaagtccacggtacagagccgcgaacaacgcggaaccccagctccactgaggcacctcgcctaccgcggcgtcggcgatgctcctggcgtagtgcacgagtcccttgtcgaccgcgtgcccgtgaccgccacagaacatcacccagccaaaaagccagagcaagtacgcctccaaacagcggctgtaggagtactcgtcggcctccgcctgtagctgatcgacctgcaagcgttagttaaaatgttaggaaccttaacatgtggaataaatatgtagtacgcttgtcatttcggtacaaaagcactcacggtgaactgaagcagccacctcttcgtaggtccggtgttgcggtggtgtgccaacggctggagcggcaggtgcggtgcgcgctgtactagtgcgaaacgtgccgtcagatcgtcctgccagtccacagccgtggtcactagcccaacagcgtctcccgcgagcggtagccccaacaagtacgatacgtcctgtagggtaagggctacctcaccgcacggcaagtgaaaagtgtgcgtctctggcctccatcggtcgaccaaagctgctaggagggacctgtccacagtccatcgtctggccgggtccgcgtggccggcggcagcctccaccagccgacacatcggtaggaggccggcctcacgcagcctgcaataagaaattaatatgtcattacaaaaaatattacagcgcaactaatttatagtaatatactgttcatacctctcgacgaaggagtcgtgaaccgtgagtagctcaccgcacgtccgtgcccggaacgtcccaagctgagccccctgcaccgcagtaaggtgagaccagtgtcggagatctatcgccgggtccaacagctgaggtgtatcctgacgtgccatctctgaaaaatatagtgtttcgtgttagaacaattcaaaaagtagtaatgtaaaacaaaagatgactcacaagttaatgaaatagtaaaaaaat

SEQ ID NO: 17341 - DNA, 3493 bp, Oryza sativa
tgttagaacaattcaaaaagtagtaatgtaaaacaaaagatgactcacaagttaatgaaatagtaaaaaaatcatgagaataattacgtacaacaagagtacagcctatttaaataaagcaaacgttactaatggtacataacgatgacgtgcaatttaacatatatgtagagttcgataatataacataacataacataacattacgtgtcgaagtccgacatacatcagcatacctaaagacactaggtgccttagtctgacgttacatcacgagacctaaagacataacaagccgaagtctgaaattacacgacgaaacataaacacatcgataagttcgaaacaaattacaagcaaacccacatgccaacatagaacataagaactacaccatgtagccagacgtggcacgacgacgcctaggacgtggtcgagtggaggtagtgccttcacccgtagggcgagctccatctgctgctgatcctgatagtcctgcctccgccgcacttggtttctccttgtctttaggacaatgcttgtaggtgtgcccacgttcatcgcatttgctgcaacgcttcaccctgccagcctccgactcgtccatattgttgcggaagcgacgagtcctcctccttccagccttgcctcggagcttcgatgggtcaggaatattgagtacttcatcgttagtctctatgaactccccagctatgccgaacccgtaaatctcgccgctccatgtatgatatattgcttgcttactgaagtactgcgacacatatactgcatctggtatgccacactccgctgcggcagcattgacatgggtgcatggcctgtggagcagcttcggctttgaacaagagcaatgacatgtgccgtcggctttgagaacacactcctgcttcactctcttgcggtagatacccctgcctgccttatcttgacatagtatctcgacccctatgttgttgggtaccatgcactagagctcgatgtttcattgcctttttacgcaactcctctagctttttatgcatgaaagttccaaacaaaatgctgttgttcggcatagagagaagaactgcctggaaccgatccctaaaatacctgcatgtcccatgtaaaataaactccactatgccaactagtggcagtccacggacaccgcgcatcacccagttgtaaacttctgccaaatttggtgtcattattccacatctagcaccaccggtgtcatatgccttggcccatttctcttttggttcatgcagaatccactgagaaaatttccgaatctccaatccagttcttctaaccaaagttggactatccgttgggagaggtccaagagcttgaggatggtcatcaacggcagtcgatggagccgctacacgctgatcactgcatttggctgtcaactcatctaatctcttccaaagctcattgaattttttctcctggttctgattgcacagcctcttgaacatgttcatgagctccttgttcttgaattgcttgaagaaattagctcccatatgacgcatgcaccacctactctgtacatcgtcccaaacaccagggtatcctcgttccatgctcccaaactgcaactcttctatcgctcgcagaatgccagcgtgcctatcatgtatcaggcacacatttggcctcataccaacaacttttgttttaaccaatttcaggaaccagtaccagctgtcggtattctcactctcaacaaaagcaaatgccaagggcaatacctgattgttcccatctacccctattgctgtcagtatctggccccgatactttcctgtcaagaatgtcccatcaatgcagagaactggacgacagttcacgaatgccattttgcatgcatgtagagctaagaacgttctttgcagcacactcttgccaggatgttcaattgatgggaatttcttcacttcgtaagagctcccagggtttctttcctcgataacaccaagcaggcgtggcaaattgtcatacgaggcttcgtatgttccaaatctcatctctattattttctgtttggccctccaggccttggcatagctaatagtatacttgtatgtctcctcgatgtgtcggattattgaccttggttcgtatgtgagattatcgatgacatgcgcatacatctcagatgcgacaaatgcacatgtaatgttcctgtggtatttctgaacaccaggtagaaaacatgtatgcttgttaacgactgacactgtccaataatccttccatttccccttatacgtgtgcactctccagggacaaccatctttttccttaacacaccgaacttcatattgcgaccggttggactaggcaacccaaaactctctatgaagtgacactgcaaaatattttaccgcctccttcatatcttctgttctactataaatcgctccctgaataacctcattttctttgtactcccatctcacactatcctcttcattgacgatcagcccaaaaaaatcctgactagcccattctgctggattaatatccgtctcctcatctgacgaatcaccttcctctacacgctcattgtcagaatcctccctctccatttcatccacaatggctgcgacagtctccccctcgtcggccactccacctggttgaatgcccactggagctactacgcccccgtccactcctgcgttgacctcctccacagaagtctcatttactttagcgcttggtccctcgccatcatccatgttcatctgcacacctggatccttcgggtgcacaaacggaaccaaagctagaggccacccacgttgcattgcattttccacataccatctccacacttgagagttttgaactggtattagttcccaataaaaaccctcagttgcccgacttactataacattgattgttatgtcacttgtctgtggatcaactctcaagcccctcattaatcatccttttatagaaggtacactcctctcagtcggtctctcaattcccctttctgatacaataaaatctgacagatctaccccagttggcccgtaacggacgtttcctggtccatggtaaacttggaatattggtttgttcgacatatctgtcaacgaattaaatagatcatattactctttcatacaataaacatctacaacgtaatatcttcttgtgtaagccaatgcaacggtaaagtattgattccaaactagcagatctacgttgttaccgatatctacaatacgcacttctaaattagtacaactaaaaccataaaaatataatgcatttattcaaacaaattttttaaaaatacacactatttaactcaatagtcacatataggatctacgaatattacctgaaatcggcgtctgaatccggcagggcttcgccccttcgtctcttctcctcccctctcttctttttttttcaccggatttgagaggtgaggaatgagggctgggggctgggc

SEQ ID NO: 17342 - DNA, 2346 bp, Oryza sativa
ccccaccagagggcggcaagggttttcatgcaaaaaaacccaccctccgtcaccgcccgtcctcccccgtttgccacgtcagcttgccgcccaccattggggcggcaggatctatttttgcaatttttctcgccgatagattatttctgtaaatattaaaaaaaatctaaaaacgaaaaaaattcttccctcccatacacccacgggcccccgtgtattgcaaatatacacactaacacacatctttgtaggccacacaaaccagatgaaagcccaaatactaaagcccagttacttattcacacatatacaatacactagcaaaaaccctaggtcacactcgagaaaatggacatttggccacgttcacaacagggtttcgctattatgccattctcaaaacgtgattcgataaaatgccaatacgaagtacacgcttaccgccatattgccatttgtgccattttattcatttccgaaatgattttagctcatccgcccgatgataagacggaaatgcccttgctttgccaccgcatctcggctaccgccattggaccgagagaggaaaggtggcggcatggactactactgggagagtcagggcgcccccgtgtcggaggacgctggagcggaagcagtcggggagcgaccagagaaccgcggaggagtgtgagtcggtcgccagggtggcgcgaggacagcgtctcgccgacagcgagcgggcctcgcggttgcagccatggaagatggtgcctcctcctccccctttacccgcgcatcaccaccacttcctagtccacctcgacgcgcagtgccgtcaccaccgcctcccacttcaccgcatcactccctacttaactagtactactagtactccccccagcagcaagcaagcagcagataagcatcactccctcccactccaaccaccacatcaacatcagcagcacatcgatcgatcgccatgagcgtggtgatcctggacgggtcgacagtgcgtggcttcgtggcggacgacgacgccttcgcccgcagtgtcgacgcgcgcttcgaggcgctgaacaccaacggtgatggcgtgctgtcctgcgccaagctccgccgcgcgcttgagtccttcctactcctctacggcgccggcttcggctccgcccagctggccccggtccccgccgaggtctccgccctctacgactccatcttcgagcagttcgacgccgaccacagcagcgccgtagaccgagccgagtttcgcgaccggatgcgctgcatcctcggctcgtagctgctccaggtcgccgttgacgacgaggggggggcttccttttagtgaagattaagcttcctaatcgactccgtcgccgacgagcaaagatgagggggagcagacgacgagagagaggaaagcacacccagccggccagcaggggcgatttcgtctcatcaagccatattccagcgaaaatgaaatcgaaaatggtgaaaatggagaaaatggcaaagcggctatggtggcgcggttcatattggcattttgaagaaacacgttttcagaatggcattccagcgaaaccgtgttttgaaagtggccaaatgaccattttctcgtcacactcacacacgagcactcccgtccagatccaggcctcagccgcgccgcctctaggctgcatcgacgttgtcttcaggccggacggcgcacctcaccgagctccttccgttctccacgacgacggtcgccggctacatcaagccgtcaacgccgtcgcgcgcctcctctaggtcgcgccgctcacgcctccgactggactacatccgcatgcctgtatctgcttggcttcttgtgttcttctttgtcctgtttgttgcttctctttttcagtttttctcatgttgatggcttgatgcaactgatgcttgcgaacagaatcgtgtagcttgtgattgactgatctgtgtttgtggccgactggccgtgttcatactgttgtgatttggaaagattcataatattctctctcgatctgttgcttctagtttttttctacaccaggtgcgcagccccgtcggagccccgtggcccccgtgggtctcggggacgggagaaatctagccccgacgccggggacgggggcaggttgcgggtagggatggcaacggggccatccccggcggagagtgctcccccgtccccgtccccacacagtcaaaaatcacccgcaacctaaaaaaatcaaatacataaatcctaaaaaatacacacaaatcaaatacatcgcaaatcctaaaaaacacacacaaatccaatacatgacagattatacatctcaaatccatgcaatg

SEQ ID NO: 17343 - DNA, 13707 bp, Oryza sativa
ctgtccgcgcgtggccgccgacaccgcccgcgcgtggtggctgcttccgccgtcgtcgctggctcgccgcccgcgcatggccgccgccgccgccgcccgcgcgtggccgccgccgctgtcgtccgtgcgtggcggctgggtggggtgggaagggaaatgaagataaggttagagaagggaatagatgaggaattagggttagactagatgggccttttgggcttataatatgctagttattaatagtctaatatgtatcctccggggtcccgcgggtcacccgcgggtggatgtcctcacccgcccccgcccccgcccccgcccccgctcatgaccggagccccggccccgactccccgcaggttgaaatccacacccccccccgtaggggcgggtcccttgcgggtccccggccccacgggggaatttgccatccctagccaccgaatgggaagtgagcaggggtagaagagggcagcaggagttagatctgtgaagaggatagggatcggatctatgaagtgtaggagaggataagggatagggattatatactacgtattaaattttagtcccggttggtgagctatggtgtttttaaccgggactgaagatcatttttagtcccggtttttatcgcgatcgggactattgtggattttggccgaccgaccatagatggtttctccaccagtgatggctacggagcggaaaggaagattgaagtgcgccagatgggaacacgtgtggaagccttcgtaccgttttaaactcgaacagctgagcatgcttggaacctcaacggccgtgccatctatgatggttgttgctggctggacatccagtgggtacggtgcagccgctgaacgacgacaacaccaacaataccctggcaccagcaacaacccttccctagatcgcccaaattcaacaaccatcccccagatcacgaaggaattgaaggaagaagtgttggaactgaaggccatgttgcagatgatggactcaatggcaaaggtggaagaaaggcgttcaaagcaggctgagagacgtagcgaagatgcggtgattggcacggtgctttctaggccagccgttgcacaatcaactccgcaccgcactccatcttccctgcgccccgggcaaagcaccgtcttcaaggggccttaccacatgcgacatcaagcaaaacgaagccttacgtccatcgatccaatggctgcctcaacaacgtcgctccagtccgcggcggcgacgacgcagaggacacaggcgagcctccacctcgtgcttggccatggcaacggcagcgccaccaccatgctcgatggagtcggaggcggcaacgccgactgatgcggcggggtgggtctcattgcagtatctggttcgttggaggcgacgcaatttccgggagacgcggttcggtttctttgggcagcagcgcgatttcagggagaagaaaagaggtcaccgcgagtgcgacgcagctccatcacctggcgctggaggtgcggcttctgcaggcggtgggaccggcactggcgcgattccctggcgacccgagagggtgcgcgtcgcgtggcggcgcctcctcgtcccggatggcagcatagatcgatcaggctgacttatgggtctgtgggctcatggtcatagaaggaaacaaggacctaccgctaataaattttgggtctactagtatgatgcccgtgcgttgcaacgggtcttaaataacatgaaaacataataaacttgtgcaatattgttctgtaaatatatttgtgattacaataatagttactctcaaaacattcaaatgatgtcaatcaactataacactatgaattgtacaatctaaattgcaaagcatatacaatggatttaatgattaataatagattgcctttggggagggaattatagaaagtatgcaattagaatatagtcagattgtatggcaaacaaaattttgcagttttatggtttggatctaaaacttgggcttgtgcaggcctgcgttttgagataaattaagctagtaatgtgtgatgtcatacataaaatgttctggactttaatagtcttaaacttgcacatgtattgattctgaaatctgaacatgggcatgcaattttttgtcaacctatctgcacagatagctcccatcctctttgaagtaagatctgacgatgatatactacagtgcatctatcattgcatattagttgtataacagaacacaggtgaacatacaactgcatggatcaacatcctcccgttcaccgagatgatctccaagctttatcaagtcccacaactgaagatgtccaaatctagcactgcagcttatactatacctgtgtatcacgtgataaactatgatatatcagattataacatcggacacaattgtttgagggaagcaaaacaaaatagcaaatccaggattcaagggaaaatcccgatacagtagagcgcaatgatgctatttcatctgggctaacaccagcatccatgacttttaacccatgaacagaggtagaccagctcaaatttacagcatatcccacagtctgattaaatattttggatacataaactcctgcttatatcccattactccaagctgattttagtgcatgtgtttaaaaccatgaaaataagaatcaagtcaaataataaccatgaatataattttcaaacaatcacaaaaggatcttgagtatagtacatctatgtaagtgttgttcttgatagccggccctttcaccgtgatagcaagaattgatggcaacatagattttattttataaagcaacaactaagagtttttttacctcaagcagtggaggcagccattcattaagtttcagaagaagcacaagtacacgcccttgtttacctaagtattggagaacaatatcaaattcatcacaaagaagaaaacaaagtgcttgtagcacccccttcactaataactatcgacatagcaatgtatggaaatgtacctcagtaataaggtagaaattttattcaaccagcttctcgttaaagttcctcacctccatacttgattaccgagaaatcagatgcctgtaaaaagcaataaatggtcagcatggtcaaaatctcttatcaaagcaaaacactataatgaacatatagtgggcagactattgttctcatgttgacctacgcctccacaccatgccgccttatatcaaaaaatgtattcatttgtacaacaattgtgcactacatttttgggaacatcaataagatattaatattaccctcattcaattcatatccacacaaaaaataaagaatctctgcatctctttaacaaaatgattagctgcttgctcatcttgttcttgtaaatagattatgaaataggaagagaactgaggatatacaaaatgatatgaacatattaatttagattgcagcattaaaacacactatatctagtgttgtggctgacaataaccacctaacatgtgccttatggaattggaaacaatgaaccaatgagatcaaatcagtggtggaacaaaattagttgatcctaaacagttataagaacaaaactatatataaattattacttctagaagcaaccaagtatgcatactgtcagctgaaaagagttcattactaaccttggatattattgaaagcactattcagaaaaggttaatcttttaagtgaggatggattatagttggactaaccatcttcctttgtcattttgatacaatatagtttaattgttgttgatctactgtgtcaaatatagtgcatgcgacatcatgtaaagaatacagccttaccctctgagttgtcattcaggtaatttctcatataattctattaggatgattttcaactttacgtgatgcatcaacatatattaattgttattttgaagataaaacatggcagcatatgcatttagcagaacttacctagcactatattatattggagaggtagatggcatgagggatgagtctagtcgccaaccaagtcgcctccagccgggatcgattcgcagtcgccggggagagagtggagaggcgatacggtgtgcgacggtggtggaggtggtcgaaggggagagagcggagcggagatgcggaggaaggcgcctactttgaagctgctcaatcaatttatccctagacaattcagaggaaccaaaataatcaattgtaaactgaaatgagattaaaaaaacagtgcacatggaaacactcagacatatccaaggagtggatgctgtagcagaaaaagacagattttataacgatggcatcaaatgtactgacaaacatccacatatgaaatgtattctccatcagctcaaattacctcaatactggatagaactatagatagagacgcaagaaagcatgcattttttttccgtaagagacagatgaactattcagatatatagggaggatttagcactattagacggtgaaaccaaacaatgtccatcagctttaagttaggttggacaccataccaggtggaggtgcaggggaggggggcagcgggtggctcccgtcgatccatcggtggcgcaggtggagcggcggcgcagccaatggaggaggttggttgtgtggctccctatgacggcgcaggtggagcagctggcagctcccgtcgatccggcggtggcataggttgagcggcagcgcagccgatggaggaggtcggagtgcgtaaaatttcaggtcaacgcattgtccctcatctgccaagcaaaagcataaaaacttgaatgtataatataagcagcaaaactgaaacaaagatagaaagcaatatggaccatgagtatgtctagataacagaggaacctactcagatttgctatttaaatttggttcagataaatgtctagtacaaataattaagaataattaagggaggcagagctgaggcaagcattagttaacaggttatttctacttgattgcaacgtcagtatcactacgaagaaatgctcaacatcgatagtgagctgtgcagcccagcatctcagaaatcagggtacattcaatttcatccaatggaaaatcgcatcagtagttcagtatttacagccgaaccttagatttggaaataacagcctcaatctcctacgggggaaatcagttactctatttgcttcaagtgactttagcatcagtctcacagaaatcaacaaggcacagatcgttcaagcgtaacaaaaccaaagctattgcaagaacatagattgaaactaaaagggagagaagatgtaatctagggtttgggtgacaaacacacacctcgagaacaaacgaatcaaaacttgtcttctcgttctcaatcctgctcctgtgaggaaaaaaaattgaacacccgattaaaaaaaagcaaggcaggaggcgcctcgcccactccaccctgctcgggcgacacgatggcgagacaacactatggcaagagcatccgcggcggcgcgtgaggggaggagaggaagagattagggtttggggagggggttggcagcggcgttggcggtggttgcgggtgggcagcggcagcggcagcgtcgccggctggggcgaggtgaggaggcaacgcaggaagcgatcgcgggtctggagaggaggccggcgggcgtggctggtgaggaggcgacgtgacggcggggtgaggaggcgacgcagggaggagggtgcaggagggggcgtggggaggagatcgatccgagaaaggagcgagcgtggggaggagatcggtcgttggatgtggcaatcggatggtcaagattacgcgtgtctatcagatgcatctgctgtgccaggaatcaagaccactactacagattttttaagtagtagagatgacagacgtgaacgtgggctacatactctcttcgtccccaaaaaaaaagaaaaagaaaaaacaaattgtctccaatgtttgatcgtccgtcttatttgaaaaaaatataagaaaataaaaaagacaagtcacgcataaagtattgattatgttttatcatctaacaacaatgaaaatactaattataaaaaaattcatataagacgaacagtcaaacattagatacggaaaccaaggtttatctttttttttttttgactgagcgagtatgttgcttactatgcctgtttgtttgggaaaaaaattactccttaaatgttccgtgatttctatattaacaaaatcgtgatttctacgtcatcaaaatgtaatttccgagcctttttcaaaccgtgatttctatgtcatcaaaatataatttccgagcccatttcaaataaaaaagtaagttctaatcagctaaggcatgttgataaaatttagtaaaattacttgcatattgccctagaaaaatcccatgtatattactccatccattaatactcgtagataacactgttgacttttgaacatacctttgagtattcgttatattaaaaaaaattatgtaaatacataatatataaatcatgcataaaatatttttgtgataaaacaactcctaacaaaataaataatagttatgaaaaatttaaataagataaataattaaatatatatttaaaagttaacgacatcttctattaaaaacgaacgtagtatcttatatcaaaagaacgaatgaaaaaaaaaacagccaaaagatacggctcggtgagattggctcgactccaaagatgctctctcgctgcagtgtggtgttggacacgcgtctctcatgcgcgtggtgttgcacgggaggtcttgtgcggcactgccgtagagaatttttttccgtttgtttggctggccaagaggagttaggctttttttccgtttgtttggctagccaagaggagttaggcctggtttagttcctaaatttttttcacaaaaatatcacatcgaatctttagacatatatatagagcattaaatatatattaaaaatagactaattgcatagttaggaggaaaattgcaagacgaatctttcgagcctaattagttcatgattagccataagtgctacagtaacctacatgtgctaataacggatcaattaggctcaaaagattcgtctcgcggtttccatgcgagttatgaaattagttttttcattcgtgtccggaaacctctttcgacatccggtcaaacatccgatgtgacacctaaaaattttcttttcaaaataaaaaggcccttaatctgattgttaagtacgtaggctaccggatcagctcttttttggttactaggccacggcgtggccttgttctttctctacaggcttctgggtggtggaaaagctagttaacgcgcgtgccggcggcgcgcatttcaggcccacaaggcccagcgccgctgcgctggcgcgcgcctcctccacgttttttttttgttttttttacctttttttccttttatttttccacttttttctgtttttttttgtctttagcatgttttgtgtttgaaagtttttaatttttgacttgaaaattttcaaatctgaacttcagagtttttaaatctcgagttgaaagttttcaaatctcgagttgaaaattttcaaatctgaacttgagagtttttaaatctcgatttgaaagtttttgaatctcgagttgaaagttttcgaatctcgagttgaatgtttttgaatctcaaattgaaagttttcaaaattttcaaatcttgacttgaaagtttttgaatctgagttgaaagttttcaaatatcaagttgaaagttttcaaatctgagttgaaaggttttaaaaattgactttaaaatataaaacttaaatcgaaagttttcaaatctaacttcaatctgttagtaaagaaatctccaaaatctttcctaattagtacaattagtgttgagtatattaactaatatagttatttaacactgcagggggaggagtgctcgctgctggcgcacacgcgccagctagcagccccctctgggtagggccctctgttttctgacaacaacttgtattggtgctctaccataatattagatctatttattattttagttcacaacaatatagcaagctgagatataaaaggcttgaattatgttaggaaattatctacagtttgtgttgcagctcgaggaatagctgctcaaaaggaggggtataatgtcatgggcattgggctagaaggcaaatgcccataggcagcctatatcaattaagttagagataagattttccttaattagaggccaggctataccatctatataaggattgtatctattatcattaagtaatgaatatcaattagtctaatctctccctcccaataatgttcttttctctagcctaaatctacacccttctccaggagccaatgccgcctggctatcctcccggtggtagatatcccgtcatgtcctcgagtcatgacagtaggacataatgttactatagattatgcttatttgtgttctttaaaaaacaacataaaggctagaatccatgcaaaggatccgatgctgtccagctatcctcccggcggtagttatcccgtcatagtctcgggtcatgacagtaggacacaatgttactataattatgcttatttgtgttctttaaaaaacaacgtaaaggctagaatccatgactggtttgttaatgtccattgtccgatcattgatactgagctttgactacccgtaaccctccactgcaaatagcaattggaacagaaatgcccatatatgcgggcattcagccggcttgcttgccaaccagctgaatagttctgattatttccagtaagacagttacttcagccttgaatgagacagctaatcagatatgtgttcttgtaaaatggaggacgttaagctgaaattatgcaacaaaaatgacaaaactgtaacaaagagatacgtaccatggttagaacgattcgaaagtatacagctcttccagctggcttcgaagcgaattaggtacatgaagtcgtggagaagactttatgcttagtttcttgagggaagtgaagctggcaagtgtatcacagtactgcaaattaggacatctcagctggagcgatctaagtgaaggcaagtaattcagtgactgaagacagattgagttcaaggtgtttgacgaaatcgatagttcttccagcgtcaaatgtgaattcgccatcctgtgaagtatctcacgtttgaatggatcgtctagatataagatggtgagcgagggaaagtgaccaaatgtaacaaagcttggacaattgaacagatgcaatgacttgagtgatgggagggatgtcagttccttcagtttctcacaaatcgatatgtttagttcctgcagagtagctgaggcaggaaaagtaacaagatttctgccgattggctatcgctcatctaattatgttttgtctttcttgctggttacatgatcaaaccagttgacacgctcttgacactcgagacaagccttgaacttgcactggagtgaagcaaatctcccatgctgccgtgttttccgtcaacactctcatgcaaagacctagctccacaaatgttctatgatagatacattgaattcatggtgagattaggagagaaagggaaagaaatgtagctaacctgatagctaacatattatacatattagcttcaatatgagcttatagctagcagttagctatcactactacagaaactctaaagggtgctggttggaaaacctcctttggtgccggttttcccaactggtacctaggaggcggcactgattacccaaggtcaaaggtgccggtttcaaaatcgacacctttgaggcgcccatgagccaaacaaaaatcggctcaatgcatcgacgtcaagccgatccaatctaatacccgaatccccaaaattcctcaaattcatgaacacaaacatagtcaataatcctagaaaatcaacacatcagcatcacattcatcaagaacacattcatcaagaacacacattcatcaagaatcaaacatattcatcaagaacacacattcatcaagaatgaatcggatcgagtaggaggctatcttcatcaccaccgccacttccggatggagaggaggagggcgctgccaccaccgctgcagctaccgaggaagcggccgtcgccacctcctgccgccgagccaccgtcgccaccttccctcccaccagatctagcggaggggagggcgccgctgttggaccgccgccgcctcccctcctgccgctgacccaccgccgccgcatccccttctgccgtcgggctgctgacaccacctcccctcccgccagatctggcggagggaagggcgccgcccgccaccgccgcctctcctcccgccgccaaccgctgctgccgtcgcctccctcccgccgccacaaccgccgcctccctcgggtgcgagagagagagagagaggctgagagagaaaggatagggtgagagagagaggtcacgggtgataggataaggttgccccctcacctcccactcggtgagtggataaggtcgtctctcggctcggctcgtttggtagggtgtcggtttttaaaaaaaccagcacctttaatatattataggtgtcggtttttaattgaccgacacctataatatattataggtgcctattttttaaaaaaaaccgacacaaaatataataggtgccagtttttatttagaacggacacctataattacttaaaggtgctggttttttacgatttcatcccgcggaggtgggaaaaggcctataggtgccggttttagcactaccggtatctatagtggcgacatctatttgatgttttgtagtaatatatattattaaacttactctaagacaatattccctctgtccctctctgatcatcacataattaaggtttttcaactaaacaaaggaaaacttaactctcctatatttcatttagtgcgataatatggttgtaaaaaaataaaaaatatatgcagactttaactcccacgaatgcacacgaaacgataacttaatttatatgcatagatgcaataatgctgtatgtcaaagaaagaaaggccaggattatgtgatgatcgatttggaaattctgattttttgttatgtgatgatcaatctgatgaagtagttggctatagacatatatatatattcaatttcaaccatgttacccgggcaccatggagtaccaaacaaatttaattaatatatatatatatatatatatatatatatatatatatatatatatatatatatatatatatatataagggcagagccctccatttccattaaagaaacgcatgagttcttacaaaaaaggagtcttggaaaaccagagaggaagaacccccaggtgctcacaaaagaaacagagacaaaatgaaatccagctagcacaggccttagagttttatgcaggccttagagttttatgctatctctccataactcatctcatttctctccaattcaccattgcgtcctcaactaccagctaatcaacagcctcaatagagcagccaaggctgactcctataagactagctaagttagcaagagaaatacttgaatcatgatgaagaggggatgagccctgacctttgttgaggaatgcattttgtgcttctttcctattcattgtcatctctagagtcttcttgtcctccctgtctctgaatctcttgcttgcccttctttcctcctcttgacttcccatctcctctttaggtagcaccactcccaagcttttggcaaaggcatcctcggaatcttgtgaatcaaaaagctcttcactgtctcctagctgcagcttcccttcctcatcaccttccacttccacaccatcctcacaattgctagcaaactgtccttcttgtgtctctcgagctactgacacgtcatgtggagcagacttggaggccttctcaaactccaacatgaggtgttcaggtatgttatcttcagcagctttatccccactgaactgacctcttgcttccttctcttgcagcaccagtgccaactccctgtcttgtataatctgcaaagccttgttcttatcctcctcagccaacaactcaacctgctctatactgggacattggatttgactgcattctcccctttgctgaaacattgctagctgcccagctgtctcttttgtctccaactctccatccctcgcttgcctttggtatcagacttctgatcttccttgtcttcaatgtttgcctttatgtcatgctgtttttcaagctgttgtcctttaaaccagcccatttccaccacattctccatagtaaaacatgcctcatacatcaaagcctcaggagtagataatatcagcctaaatggaaattgcttgatatccatcatccctattttcattctgacaatatccttagcagctagcaaaggcataaacacttccatgaccacccccaaattagaacccacctcatatagagcctagtaaaccttcatttcatcagggagtccttctactattacccagacaacatgcatttttcctatagctgcagattcactagtccattcagagacatttacctccaccttagtgcccttcacattaaagtgatcaaaattcgacatctcaaacaagagacaaccttaacttgtttggaaaggtgccacttggttgtttcttagccctccattcccaattccatttgaactgttgtctgaatccttctatccttcttccaactctgtttcagataaatcctctccatagataattttcaccattgccatggggtttacatgctctttaggtggtgcagatttgatattctgaatcaaaatgcaaccaaatcccggagccccatatccaactagcttagcaaccggcctgggttgtttgtcatacaaacagtcttcagttttgtatgaaggtttggaacaattagtacagaagatttttgtacagcaatccctagcaaggtgccctctctctttgcatctaagacaaacttctgactagagaacacaccaggatgagaaggattgggaatatgtggctgacctttttgctctgcaatcaccaacccctcccctttctgcccttgatcattctcctttggcttgaccgggcgatattgctgcatctgcttctccataccttgctgaggacttttggattcatcacccttttcccccttagctccatccccttgaaatcgccttggaggttggaattgttgaggttggtttgggggattttggaatcctcctccttcccatcttcttccacctccacctcctccatggccaccccactgattgttgcaaaaatctggcctgacttgatttcgctgcgccagccaccaccctgagccgcatatctgtgccttggatgaccttcgcaaaacggcgggagtcgtccgagactgtacccccgtcacctcccaccaccaccgcccaccccaatccgctatcccctacttcccgctctcccagtggccgtgggctactccttcctcgatcctcctccgcttcccagctcgccggcgacgacgaggatcgccagcgatgagagttcgcgtcgcccctcgagacacccctcgcatcgcccatctccccagataatttcattgatcattggctacatatatatag

SEQ ID NO: 17344 - DNA, 5402 bp, Oryza sativa
ttatgtcatagaatgtaatcacttataggcaaacgcggcaactagattgatgtccattttaccaagcttgagaaatgtgtgaaggtcgttaaaatagataacgagcatcccattaggtccactaatggaagcgttatccgggaccttcatagtaatcatgtcgagtccctttttagatgccttcaagtaccaatcatgtatcaacctcatctcccatggtagattttccatgacatgccatcactggtggagaaaccctttgtagtcccggttcgtaacccccctttagtcccggtttccaaactgggagtaccaatccgggactaaagatcgctatctttagtcctgggtgaaataaccgggagtaaagatcgatctgagccatctttagtcccggttggtgttaccaaccgggactaaagatcgagctgacctttttttttttttcatggccctgttgctgcatggtttatatatatatatatatatatatatatatatatatatatatatatatataaaccatgcatatatatgtttcaatacatatatatatgcatacatatatatatgtatatatatatattatattatattatatgtatatacatgcataatatatatgtatttatacatatatatatatgttatgcaaatgcatatgtatatagatatatatatgaccaaaatatatttacattatagaaaatgtgtacacatgcatatagaaacatatgtagtcatgtattaattacaatccattatatgtcctagctagctacgatttcgacgtagtattagtcgctgctagctcagaagctaaggaccggtgaattgtgtttccgtcttagtagaattcacccttgggatcaaggatttcttcgttgatgaatcccatgagttgtttttgaaccgccgcgataaattccttgtgtgtggtcaggttatccctcatgcgaataaactatatgaatgtatgaaattgattagtaattaaacaagaaatcgctacgtaatgaaattttgaatttatttgtacgtacatcgagctctcttgtggtgatgatttggtctgcaaggcagtggcaatactcgcacacgtaatagccgcacaagttagttccctgcttttgctttgcgcactacaaataaatgacaaacaacgagagatctaattaatatacacttgtatgtatttgaatcggagaaatataaatgtagagcatgtgtactcacaggaaatttgaacttccgcctaagtctttttctccatttgccgcggaccaaatgacggtaccgataccaagccctacatggagtttaaagctatgattcgtagtagcaattaacataacaagattttcttaattaacaaaggaacttatgacggtacctgtctataagtttgaaaaccttgtcaaacgtagactcttttttatccattgagtcatatacgttgacggtgcaggcctcagggtcgaagagtaaaagcacccagtggaatctgcaatgtgcgtgggatgcattacatatgaaacacttagcaagttcgtacaggaatgaaatttggtatgtaggaagacagtaaaattaaactaactctgtgttgtatggcaacagtatgaacgtcttgtaatgctgcgccttcaggagatggacgagattgtcctctgtttcttgtggatattggtcgagcattgcgacgtttactttccgagggtcgataaatccagtatcgaaaaccctccgccgtcgggccctttgaatctccattctacaacgataaaagggagtatattattttctatagtctacttatatacaaggacctaattaattaaaggagacgtatagtaagaaatctaactgaacgatatacttacaaaatccagcaactcataatagagacgtcgagggcgtccagctggtatagttcgtagattcccctgaaattgatccagagaatgtcatctccttgcaagaagtccgtgtccctgatcctcgctccgatcatctctctaccggtggcgctcatctccatgtacagctgatggaacttgtacatttgtgtgggtagggactgcagcagctcaggcttgacaagcggtttaccgagttcgtacatgtatttcacttccgccttttcgattggtgcaactcctagcaattgatccgtagttagaccggtgtcagtaataaattgttctatcgtcatttctttaccggtcaccaacggctcgatctcctggtttggttgctctccaagctgagggactggtttggactttccagaagatgctttcttcagcgttcgctcatagtccgatagcttgatggcctccttgacagatgcagacatacccctgaagaagttcctgacactggggtctataggaatcttcttttctggacttcgaggcttgaattgtctcttgacttctgatgcaacgtaagcgtcaagctcctcttgtgtgcaatcgtaccccgggtccttgttcttggcggcgtcaactttcgccttcttcgttgcccttgtgtgggcaggcggtggagctggggggcccttgactttgaaggtgccggaagaggagcttgcgggggagtaggtgtaggagcacgaggaggagtcggtgcaggatcctgaggaggagtcgatgctggagcctgaggtggagacggtgctggcggagcatgaggaggagacggtgcaggatcctgaggaggagatggcggagccggaggagatggtgcacgagacgccgcttgtcgcccagggaggatgatgtaccgcctgcgccatagaataatggcatggcatgtgtctcgtagatgcgtctcaccgtctcctccagggtaatccagctcgaggtcctcgtacgcgccttcgaccaactcaacttcgaccttcgagtatcctgctggaatcggcctgcagtggtaagtacctgaagggtccgttgggatggccatgcccgatgccacctttatgttgtgagagattatttattagtaatcaacatatataagcagcaactagcggaatggctaaatcttacctttattgataagttcttcaaaggaatatgcagctcacatggtgtccgctgagtgatgtcatcaacgggacaggtcgattcgtcctgtgtttgcatggcgtccatgctctgtgatcctacctgccccgttgaggcgcagctgctacggtttcctgacgggctcaccattgcaggaggaatggtcggctgggatcatgggaccgatgtgcggccatgcgttcatcaaccttccttgccacctcctcttgcatgttgagttcgtagctcgatacccggaactctaggtctgcaatcttcgcctcggtatttctcttgctcctcatccgactcctgtacgtgtggatgtcctccttgaaaccaatcttccaaggaatcacccttttccctcgtgttcgtcctggatgctctggagtctgcagggcgagtgtcagctcgtccctatctatgtctggtcggaacgtgccctgagaggaggcttccactgcatctgttagtcgtcgcgcagcctctcgtatctgatcgccgaagaccagtgagccatcagctgggttgagcgttccaccatgagcatagtaccagaacttcgattgttccggccaattggctgttgccggttcgatacccctctcaatcaagctagcctccatctgctcccacttcggcatcgcgacgctatagcctcctgaccccaagtggtgatggtacttcttcttggcggcattttctttgtttctttccatcatcgcctgcccttgttcacctgtcttatatgcaacgaactcgtcccagtgatcccttagctttgggaatgtatcgaagttcggtgtctgccccttcagtatatacttctggtacagatctcccttgaagctctgaaactgttctgccattttcttcagagtccaccttttcactttgtcctctgtacccgcaggaagggtgaatgtctcgagcattgtggtccacagcatctctttctccgaatctgggacaaagctctcatgatctccgcgtgcccttgttcttcgccagtacaccgtactgacaggcacgttatcccgcacaacccaaccgctgtgacgtacatagttcttggcggcttcggccggggcactaggacgtccatcttcttccacttccgttatgatgtgccgaccctcaagcttcttcgctgcacctcgttgcccacgtgccctcttctgtccaacggagggttgactaccactagcctcctcctcctggttcccctccacatccctttccacgtgcccctgctggttcccctccgcatccctctccacgttcccttcctcgttcaagtactggtttggatcctcgttcccctcttcttcattctagtactggctgcttccctccgcgattgtatcgtacaatatctgttcctcatcgcggtcagccatctgttgatacaagaaacatctgctaagtcacgagacatttatgttttaacaatctaagtcatgtatgctaagtgtaaatgtcgtacattagaaccctacacaaccttacgtgctaagtctaattacaaatcgtgatataagctaagtctaggtgacgtatattatacaaccctagctagtaaataattatatactaagtctaattacaaataaaataatctaatattaaaactcaaataatattacatgctaagactaaaatagtcatgtatatgctaagtgtttcgtgcgtatatgctaagtctaattaacactacaatagtcaattgctacttgtcgcaccaattccgtagtcaataattacatactaagtctaattacaaataaagtaatcttatattaaaactcaaataatattacatgctaagactaaaatagtcatgtatgctaagtgtttcgtgcgtatatgctaagtctaattaagactacaatagtcaattgctacttgtcgcaccacttccgtagtcaataatgtcatactaagtctaatttgcaataaaataatcttatattaaaactcaaataatattagaacactacacaatcttatatgataagtctaattacaggtctaataatcttaattaattgcattacaaatataacaatcatttatattattacgtcacttgcctgctccaattccttctagggctagctcttccactcaggcttgacggacgactccgacaacacgtcttttctgcaagatacaaaaagatgtattaggataaatgcgaagtaacatatatatatatatatatgtatatatatatatatatatgtatatatatatatatatatatatgtatatatatatatatatatatatatatatatattgcatttcacgttaacgttcgtc

SEQ ID NO: 17345 - DNA, 2323 bp, Oryza sativa
agctcgagacgacggcgagatacggcggcgtcggcgcggggatttgccctaggcagtggcggcgaaggagagaggccgagagagatcgatcggccgaaaacgtctaagtgttggtgaagaaaacgagggcgcaccgggaatatatatacccccgtttttttactcccggttgttcagaacaaccgggactaaagatatctttagtcccgattgttgagaacaaccgggagtaaagaaaagatctttactcccggttgattatagcactgcatatgatttttgcttacatatgtgtttataaaatacaggttaatgcattaacattatttaaagtacaaagattaatgacaattacttcgaaaaattatttttgtctgtaataaattaagtggataaatcgtaataagcaaatatatgacttataattaataaaaattccaatatatatatatatatacttagcatatatatgaatgatattattatattggtaaaaactctaattaagatatgtatgtacatactgcatgatttaaaattaataaaaattataatcatcatatatacttagcgtaggaattatattaaattaaatgctaaaaactctaattaacatatgtaaatgccacatgcatgatttaaaccttttaaaaattcgaatagtcatatataagtagcatatgaaagatagtaaattaaattgtgaaaaactctaatatatgaatgatagttttaaaaatatattaaatttaatagttttaaaaattctccagtcaattataattagcatatgaatgatagtaaattaaatgttaaaaactctaattaacatatgaaattgctacttgcgtgatttaaaacttttaaaaatcctctagtcaattataattagcatatgaatcctagtgaattaaatgttaaaaactctaattaacatacatatgaaattgccacctgtgtgatttaaaacttttaaaaattgtaagtatcacatataactagcatatacatgatttaaacttgttgaaacctctaataatcgtgcgtaattaacatatgccatacatcaattgatttatatggataatcaatacatccaaaatagtttacatcgtgtacacaataattacggcattacatcggcggtgacggttgaccgcacgtactttctcctcactattgttccctccttgtgatcgctgcgtgagtaaggggtgtcttcatttgataggaggatgctagggtcaatcgtcaccgtgaaagggggttgcccatccaactgatcgtaatcctcgtcagtcttgtcctcaactccgacgatttttcttttgcctgggagaaccacttgacgcttaggctcatcaggccctctgcccttctttcctttgctagacatgtccttcacgaaaaagacttgcgttacatcattggcaaggacaaaaggttcgtccgagtatccaaccttgttaaggtcaacagttgtcatcccactgtcatcaatcattacgcctccaccagtcaacctaacccattggcaccggaacagaggaaccttgagaggaccatagtcaagttcccatatgtcctcgatggcaccgtaatacgtggcagttgttccatcgtgtcccatggcatcgacacgaacagcgctgttttggttcgtgctcttcatgtcttaggctctcgtgtagaatgtgtacccattgatctcatatccctggaatgtcgtgatcgacccagacggtcccctcgccaggaaggcaagttgttggttgatcgactcgttacccatgagatgttgtcgtagccacgcggggaaagtatcaatgtgatgccgtgtaatccatgcatcggacttaccgatgttcctggcgcgaactagagccaagtactcctcgatgtaaggagctaccaatgaagagtgttgcagaacagtgaaatgggctttacggaataaattgttgtctaccgtcattattgttttccttccaagagttccctttccccgtagtctcccttcatggcgtgattcaggtaccccgattgggcgaaggtcttcgataaattctacgcaaaattcgatgaccccctctgttccataacccttggcgatgcttgcctctggacgagcacggttacgaacatacttcttcagaacgcctatgtacctctcgaaaggaaacatgttgtgtaggtacataggcccgagaatacggatctctttcacaaggtgacaaagcagatgcgtcattatattgaaaaatgaaggtggaaatatcaactcaaaactgacgagacattgcaccacttcattctgaagggc

SEQ ID NO: 17346 - DNA, 4919 bp, Oryza sativa
gctacaaattgccgtcattttttaagacctgtcctcttgtagagcaagtaggcctctaagtcgtcctggccttaggataccatgtaagctcacaagacaagccgataaggcaacagaggagagaggagatgcaaggcaataatgagtgaagaaatatatagacaaatggattaagaacaaaacaaataatataactcagattgtggactattagagcaagtgtgctggtggtgtgtactgtgtatattatcttatatctactgagtaataatgtgtaaatgatgtgaacaaaattagagtgactatcatatcacctctactataatcatcgtcgtagtatttagatctgattggaaaaacatggacacaacaccatatatagtacgtattccctctgttcataaatataaaaggttttcgccctctccatttggtcataactgtagatattttagagcactaatgttccatcaatcacctcttactcaaatctttccctattacctcaagttgccaaccattcctcctgtatatctctattctccaaggaccctcctatttcataaggatcatatcttttatatccattgttaatctccctcaagagatcataaatataactcgaatagttattatttttatatttttatatttttatattagtgaatatagatctatatgtgctttatatatgtgtccaaattgatatgaatactagtgaatctaaacaagtgaagagaccaaaacatcattttataatttgaaatgggggcagtttttttccctaggtgcttgggaacgctcaggcttagagcaggtacaatagcaggctataagtcagctataaacatattttgaagagataaaggaagaaagagaagagcagcgggctacagatttgtagccaactgcagcacggactcgaagacgtaatgtgtatatgacaggtgagaccagatattaatagtataataagcaactattgtatgaattagctattacatttgctatagatgatttggagctagtagtgggttatactattaaacttaaacttgctcttattgagctccacctcacaaaaatgcacataacagtgtatagtaggtatggtaattaattttagcatctccttagggaccgcaaaaattctttttttttacatgtatcacattgtccctgcaagtcggttgttgcagagctagaacggaaacaaaatacggtttgccgattgatcatatgtgagaagctaataactacctcaacgaaagaagcatagcataaatggttgggttctgttgtggtataactagtccatccagattaaaattcttaggtgtttttgtcctagacaacgctcgtggacaacgacatgttttttttgacttcattaatattaaattatgtcgctctagtttttagttacaagtgactcacagcataatttactttcctagggaatgataaaatgaaaccattgtcagtttattaacaggcagggtgtcaggctcggtgttttctcgagaattgaacgcgggccgctagtagcaagacggctactctttgtcatcttgggacagagagtatgctcctacttgtaagtcttggatggtgcaatgaaaggtgcgctctcactcaaaatctttgataagtagtactaccttcatcacaaaatattataagatactactattaaatttgatacatattttcaaatggagtgagtgtttatttggcactgtggtgggagctccaaaatccccagcatggatccctaccaaattcctgaaaactactttggaaatgtttttttgctagtgtatggtacggctagctgatattaaaacatttcagatactcctataatttttcttttggagggacccatttagtggctacacgctgcgtcatccgagcactgactataaaaattcaaaatattgcagactagaacatgcaagtagtagctgctatcgtgctagtatttcagtattgatctcagtagcggatccactgttagggctggttggtgcgtcagccccaccgctaatccctactcctaatctatctatctattatatactaaaagtccattaacctttctacaaacgatcctaaactgccatgtggcctcctacaaactctcataaactgtcacatggcgttctaataaattagaaaaaaaagggtggacccactaattttgccaattaaatcttcatctaaaagaaaaaaatctggtatccccaccaccgtaagcacgcacgtacacgtactcccctccacaccctcccaactctcccctattctcctattttttaagctaacttctcctattttatagctaacacttaatatataaaaatgataataatcaattatctaaatctacataattctcaagttacatatttttttctcattttttcaactgttgtgctatttatcaattaaataccaaattcaagatctatattacccatattttgttatttaaaaattaaaaattagatcatgtgacctctatctaattattgagtttttataagattttgtcagttaaaaacatagaggaggtgaggagtgagaaggacaaatagatacgtacgtacatgcacgtctcacgtatgtctcacgcctttttattttttaagataattctaactatataaaataatgggtctctcatctttaagttaaaatcgatggttagacctttttttttagaatttttatgattttatctgatttattatactgtcacatgatggtttattagtgtttgtagaatcacacgtggaatgtatgtgcttggcgctctaataaattagagaaatcctagaaaatcagagaaaaaaaacattcaaccttcaattttcacttaaattggtggacccgttattttaaaccgttggattagatctattaaaactcccacgctgctaatctccatcccgaaaaagaataacgtacgtacgtatagttcggacgatcatctcactttctggaaaaaaaacttaattacctacatcatatactatggagaaaaacgataaatcaaaaaatatatcaatagtaaaatcaaagaagcactaattaatcaagaaaaaaatcatcaaagccggcagtctggcacttatgtgttgtcaatagcctttaaactacgattttgttaaaaataatactacacagaaataagtagggggcaaaaattataactatttttatcacctcctcctcctttttgtccctctccgtccttcaatgcagggtatagtatttactatgctatcgtaaatattgcaagggtatacgtatggttgagttaaggtggcatcagtgaaaagattactgtaggcaatgtatataaagggacatactaactaatagaatcatttgtgggtgtgccaatagtgaattaagtgttaaatgatgctataggctggtctttgggggcatggctatgtcgatgtgggactgatgttccagggcattacataaggaagccttggcaattatagtcgactttatccgttagagaggcattcatgtctatttttaacggtgttattgtattattcgattcaaatggtatgtttagactatttatacatagatgtggaaataagtgatgaacaccaagttaaacagtgtagatgatttttagtgtattaataatgtataatttattttagtggtattaaactattaatgtcgtcttattaaaaaatgcacatagcttttgatgcaagaacaatagacgagtttatatatgaccacgacaaagggatttttatttaaatatgagagatattcttatttttatcatatttagtagtatattaaaatctaccatctattttacggtaaatatattgcttttttttattgttagataatttacatttccttaattacagtatatatagtgatgtatgatttattttaccattctttttcttaaacaacaaatattctctggcttatatcccacccttatagtgtttaaaatacagccctacgatacatagtcgcgcgaatgcgcgggctaccttccttgttagtcattaacaagtctaattagtattcaggaaatttctcggaaggcaaggatttaggctgcctcactgcttctcctgcccaaacttatagaacagaacttactccgagtatacttaacaatatattgacagatatttgtgaatattttaatatagtcacaaatcaaaattcatcatatgcgcgtttggttttcattgaaaaatactttagttgatatatttttatttattttaatcatattatatttttacactaccactcccgatcaacttgcatcctggattcgtcactgattgatcttatcgtgaacacccaacacaaaagcggcagcagccggccggcgacggcaagtttgtccacccatgagctcaccggagacgacgacggatcagagcggcagcaacaagcagcagcggcggcggcggcgccaccacttcatcctggtgcacggcgtctgccacggcgcgtggtgctggtacagggtgaccaccgcgctctcctccgccggccaccgcgtcaccgcgctcgacatggccgcctgcggcgcgcgcccgggccgcgccgacgaggtgccgtccttcgagcggtacaccgcgccgctgctcgacgcggtagccgatcaggacggtgaggagaaggcggtcgtcgtcgcgcacagcttcggcgggcagagcctcgcgctggccatggagaggcacccggagaagatcgccgtcgccgtgttcgtcaccgccaccatgcccgccgccggcaagtccatgtcgttcgcatttaagcaggtacatacctacagcaaaatcacccaaaaccttttgtgaagcagtgtctgaacttactctgaattgtacgaactgggg

SEQ ID NO: 17347 - DNA, 4922 bp, Oryza sativa
cccccccccccccccgaaattttttatttttgttttatttgtttgatatttttttcacgcttagggacacacaaaaaccaaccatagaaaaattgaactcaaatggacgtaatatgtgacctgtaaaatttttcctctcctctcatctctctccgaactagtgcaaaggagagatgtgcaacttttttatttttattttattttttgatattttttcacacttaggaactcacaggaatcaaccatgtaaaaaataaactcaaacggacgaaatatgtggcatgtggaattttccaaagttctaccgaaaaacttctctgctcgaaaacacaatcttgcaagcagaatttggaggttttaatatcgccgaactcggcaaagctggggagaatcggatgtaacattttctgtagatgtccgtgcatatattatttgcctgattccgagtccgtatgagaaagttacgcctattttaatagatgacatattttgtccgtttcggtagagttttggaaaattctacaagtaacatattttgtccgtttgagtttattttttatacggttggttcctatgttctcctaagtgtgaaaaaaatatcaaaaaaatgaaataaaaataaaaaaaattgcatctctatgtacagtttaacttatatatgtcatttcatgtggttatattttgaattagattaagtaatttcatatagtggtagagtgcattatgtttaacatgctgatcaaagggttttactaaaggaattatggtctaattttagtgaaggtgaaaagtagactaaatggtatgctagctattttcagacttagttaagtggtagttcgagtttaaattttttttgtggttggttgtatcgtgatcctaagtgtgaaaaaacatccgaaaaaataaaataaaaatgacaccgttgcaactccatacagagaaacaggaatggaggcggcggcgccagcatggctggcgccctcctcctgccacgtcggttcgcgtgcgccacggtggcaggaggacggcgccagcctctctggcaccgtcccgttggatgacggtgccagccactctggcgctcaaaaaaggaccatttctgggataagttttttcaggggtctatttgcgaaataagttttttaaaaggaccaaaatgtgaaaaatccaggtacttggcacggcgagtgtatcagctcagcccacccgaggtatgcaacaatggccattatctgttcctctgaatctctgatgtaattaactacacgccttgacattgtgactgacatatgggacccatcacctacaggtctacttccttcgtcccaaaaataatatattctctcctattacaataaatttgaataacacctgttcagattcattgtactaaaatgtcacatccctttcaggttaagtaggtttttttaggacagagagaatatatatcaacaaccacgtttcggtgattttacataagagcccgatcccgttcatggttcctctgacggtgcaactcttgcaggacctggccctggcaatgtcgacggtgaggccgtcacgacggttcctgaacgatgccacgatgaacggggatgtcctgacggagggcaggtacggcacggtgaggcgagtgtacgtcgtggcagaggaggacgagtggaagccggcggagatccagcggctgatggtgtcgtggaaccctggcacggaggtgagggcgttgcagggagctgatcatatgcccatgttctcaaaggcgagggagctctcagaattactcatggagattgccaacaaatatagttgagattttcagaagcatgttcttcagataaaacgttactggaacatatatatatttctgaaaaatggatatagataacaatgccttagactctacaaaagaaatgcaaaatcatagtgataaataattggctaacgttgttaacagtttggggttggacgttcggtgttttgaaagattgatcaagatgtttggatatgaacagtaaaccagaaccagtaatcgcaaattcagttcaaaatttcggaccccaccggcaaatcaatatattgaccgaaatattcatgttttctcaaatttttgttggagttggtcaaagtttattcaaattcagtaaaaaactatcaaaatttcagaaaatttctttccaaaaagtgctgaaaaatcctgaaatcaccgaagtttccaccgaaatcaccgaagtttctaccgaaatcaccaaagtttccaccgagatcgaaagtgtaaaccctgaccggaacattgaacagaaacaccggatcattcccagtttgaacagtaacagtgcatttcagataaaacgtcatggaaatgcatccatccatctatctatctatctatctatctatctatctatcttctattatatactaaaagtctattaaacttcctacaaacgttctcaagccactacatggacatccttcaaacactctcaatccgccacgggcgttttagtaaattaaaaaatatcaaaaatttctaaaaacataccaccattgattttcacttaaatccgtgggtctattatttatgtcattagatctattatagataacacaaaactaattaaatatatcaaaaggaaacaaactctcctcccacccctccagccatacgtgcgtacgtacattttcctccctcctcactctcccaacacttattttaactaatttttattggaaaaacaactaataatttaagatccatatctttactatctaaaaaactaaaatacattatttgaacagatcgcaacaaaacagcatccgatttttaatttatttgaacagtaatttaatttatttgtaattaattaattaaatcaacatatatatcactattttgctatataaaagttaaaatacattatttgaacataccggcaacaaccaaacaaccacgaaacattaatattagtgtcatcttaaatcattctacacaataaagatttatcgaccattctattaagtcaccacgtgtgatattttaaaactagaaaatacttcttagaaatttgagcatcgttagtttctacttaaatcgatggcctattatttttaagcactagaaacatatcatgtcttgaaaattaggggaaaaaagagaaatttgagaaaaaagtcacccgatcattagatttcacttaaatcatttaggaaaatagaaaaagaaagtcaccttcacctccctcgctcatctgcaccatctctctttggcccgaactctatgctcttcattaatcataagctatcaaagtgaaataatcaataattataagctacatgcgcgatgtctaatctaacttttattgtattataatgaaaagaaatgcaagcatatgcctatattttgctatataagaaatatgaaatttgggaacaatgacccgtgcactttgcaggtcatccaaatagtaacgaaatactataaataattatcaacacaaattacgacattatacatccaagtataaaacaatatttttttgacggacaacatccctgcccttttacatatcgtccaaataataaaataactatgaaataattcagcaacataggatgcaccatcatatattattttgtaaacataaaaactaaattaaatatacaatgcctaagaaaaatatatcaaatataaaaaatcggtgggacatataccattggccttttacatgtcatccgaattgccataaaagaattatgaaataattcaacaatacaagtggcgccaccatacgttgttttgcacacatgaatagctaaattaaaaaaaaagctttaactcaaatacaaatagtccaagtcactacataaaaaaatccagtggctttagtagtagaaaaaaaaatccaattacttcatgttttctgaaattaatgcggtcaaataatccgagtaacgaaagcgctctaaacaatctaatagatttttttaggataccatctaattgattttagatggtgtttaatgcactttggtatatctgtagatattcaagcaggtattcataataaatcacattaaaaaatgtgtgcacaattatatttagccctccatgtgtattcatgctaggctatatgaagcctcgcacgctctacataaaacattcacagataggatgtttcccacactatgcaatcatattggactctacgaattcatgcatttagtatagtctcatgttatattcaattaatagtgagaagctatatcggtcttacatcggtcttacatgcttatacaaaaggtagctcatttattttttaaaaacattgacataaaatgtgtaaagctccatcactatttaacatatcacagagtttgaacataaaataagaattgtataaaacaaaacagaaaatagaaaaaaatgccaatatgaactgcattaattgaactaagtggaaaaaatgttattatttattttgcttcattcttgtacttaaattgaaacaaccattgccataaccattgcatcattttttattaagtgcttagatattaatgatttttctctatcatacatcacggtattatgatttttctccacatattattgcaagtataagcaaaaatactaagattatagtatatagtttatttagaagttatatttataactattaatttaatttttaagggtcaagttgattagatttttctttttaaaagtagaatggatcacacatatcatagggaatcgagacctaggatgtatgtatatctcctctgtcttattcatacgtaagtaataattaaagtgcatcaatataaaccaaataaaaggagggctagctaaatggtacaaataaaacacatttgtcagcaatcatagtcttttatgatttgatagagaaaacatagct

SEQ ID NO: 17348 - DNA, 18601 bp, Oryza sativa
ttgcttcattcttgtacttaaattgaaacaaccattgccataaccattgcatcattttttattaagtgcttagatattaatgatttttctctatcatacatcacggtattatgatttttctccacatattattgcaagtataagcaaaaatactaagattatagtatatagtttatttagaagttatatttataactattaatttaatttttaagggtcaagttgattagatttttctttttaaaagtagaatggatcacacatatcatagggaatcgagacctaggatgtatgtatatctcctctgtcttattcatacgtaagtaataattaaagtgcatcaatataaaccaaataaaaggagggctagctaaatggtacaaataaaacacatttgtcagcaatcatagtcttttatgatttgatagagaaaacatagcttttaatttacatttaatttgttagatatgttttccgaacaaactaaatatgtcatattttaagtgatgaagaagattatagataattgcttaaaagaacattaaatattataaaaaaaagctcacaaacaggttaaaaatttatctaagcaacacattctacgatgtatgcgcgggctaccttcctagttatctactaaaagttcatcaaactttcaataaatgctgtcaagccgccacgcggcgctctaataaaatagaaaaaatcctagaaattctagaaaaaggcaaaacatccgaccgttgatttttcatttaaattggtgaacccattattttacaccattagatttatcacaagaagagaacaaccaaagccacctctttccatctgttatgaaatatttgggtgatctcatccatatatatggatagagtaacaaccaactcagggacacgacggttggtcgtgccccacacctcttctcgcctcacggcgattctagcaacggacgcgatggttcccaaaccatcgcgcctccagttgccgcctctctcccccctgtatattgtaactgttatcaataaagaatccgctcattcattccctctacattcttgtgttaaaatttctctctcgctcaatcaattctattcacaatacgttatcagcactttcgctctcgcgaaggagatcacgaagtgaaagaaggaagaaactacatcattttttatcttaaggaaaagtgaaagaatcaacaggaaaggtacgagatgtttacctttaattacttgatcgatgccgttcttggcggatcgacgccgttcttggtcttcctcgccatgaccgagaccgccgtctgcaccaccttctccatcgttcaaggagtggccaccacaccactgccaccatcaccatggcgggcgccggcctagggttagtggccaccgccacaaccctcggcgccacatcaccattgctgctactcctccaaccccctataaacgctcctaatctatcgactatcatgtcgtagcatcatgtaaacactctcgagtcgctacatatcactataataagaccatcgatttttatttaaattagtggacctattgattttgattgtacgggaaaacaaaatctccctccgtccattcccccgcaccgtacgtaatatccatccggaagcgtacatacgatccatccgcaatgtacctaccatccatcagacctccatttcttttttcttcttttcttaatccccacataaaattaacaacttttttacaggcctaaaaagaccatcagcctagatctagccagctcttcctctatcttctcctaataaatattctattaaatatcatataaatatttttaaaatatcttctacatatgtcctattttaaatgcatttttaaatttccgtgtccaatgcctgtctgtccgtcttatttaaaaaaattataataaaattaaaaagaattagtcatacataaagtactattcatgttttatcatttaataacaacaaatatactaatcataacaaattatgacggtcaaatgttacacataaacaatacaaaactacggtcctttttggacggtggtagtatatagcactcttcatcagagaaaatctaaaaagaatgaaacattcgaccatcgatttacattattttagcttataagatatatctttttcttaagaaaaacatcccaaacctccttccacgctcccatgcggcgttaaagcccattaaccatccttataaatgtttctaaaccactctatgacacttataaattagaaaaatcataaaaaattaagaacaaaacatccaatcactggtttcgacttaaattgatggacatattatttaggctgttattagatttttatttaaaaaaactgtcaaacctcctttcgtccctccccgcccctgcaatgttaaagattttaagtactttaaacatcctataaatatttctaagccactacgggtctctcttaagttaaaaaaaatcgtacaaaattacgagaaaaaaaacatctcactgtcggtttcgacttaaacatccaacatattattttaggtcattagatcaatcattttcttcaaagaaaaacatcctgccctccatgtccccgtgcggtgtgcattgttccatttatcttatttttatatttataatagttgaaattaaaataatctttatggggagaaaaaccccaaatgggacctccacatattagctagtctagcgagctgccccactatccattttcttctctttctcctcttactagtacttataggaacaatataaataaaatagttatacccttttaaatcacatattcaacttatgatctgtttgaactattattttttagtgaaatcaatattttattatctatattaaatatatttaaatgctaacatagaaatttgcattccggacccacttctattttgaggcctccactaaaaaaaacatatttatcataaaaaaatcaacatatctcatcttaatttttaataaagccagtagacccattacttatatctcgttagacctctaacaactttatatcaacttgattgatttctcacaacatgtatgtgggggctatttaatttagctatacaatttaattttggtgcttttatcaataacttgtataataatacctagcatatactcccgccgttccaaataatagggcggtcttgtcttaaggaaaatcgaacttcgtattttttttactaataattatactaacaatttctaggttaagtgttatgaatgttatatcattatatttgtactttaaaatactttcatgtgacattgattttataggtgttgataacataatatgaaataaattagtggtcaaagtatgttattgatgaccgtgtaaataatttataggtcttataatttgggacatagggagcatatggttagtataattattagataaaagttaccaagtttgatttttccttaaaaagagtgtgccttataatttaggacggaaggagcagaaaggacgaacgacatacaacatttacaaataccttccatgtcacatcatccagaaaatgcaactgtgctgcaagagctttgggcattccgtaatattcagttccttaagggaggtgaagccggaaagcccatgacagtactgcagattatcgctgctaaacttgattttcctgagcaaaggcaggccttgtggctcaagagatctgcatgtcatcaaattgcaggtgattgttaagcactccagtgaagaccgaggttattcagcagcctgcacggcttgttatatatctttgaatggacctccaagacgcaatgtggtgagtgatgggaaggaaggaagttggtccagattaacgcacctacaaatgtgtagttgacgtaggctgggcgatgctggaatcgcagtgatattgggacaatctgtcacttgaaaagaaaccaaggacagaaagggcgctacaggaagagacagtatgttatctgcacatctgatggaaagcctgtgcaagcgcggaaatgcaccatcatccaccccagaccactctgaccactcgggcatctgcacgaatttcagtttcttcagtgctgggaagcccttgaaaccatggccatggctgcagaactcctgtcggatgtgttgcagaaacatcatttcacggacatggagaaactggagggacggtagctcaccaagcgttggaagtcgctcagatttacagaacaagaactttattgttgtcaagttggagaaggaaggctcacccaaccaagagggatatttggaactctcatatctctgtatgatcagttttcttaggctgttatatggtcgcaagttgtcaagcagcagctcgtgagacactgtaattgcaggttcgctttaatttgtaccgtgttttcactgtaatctgggctgtcatccaaatcaatggctctactgaagtccaagtgtaaggactgaaggtgctttttattatgtagccaagcttcttttgcatcctccttgcgatctaaatctgccagtcctcttactgtcaactccttaattttgttcaagctcttcagttctcccatgttacaaatgttacgaccgatatatagttgaggcaaagtatgcaggttaattaggctgtgaattccgtgtagctcaagcctgtagtaagaaatatcgtaccggttatctagcaggcattcacaatgtaaatggcgtagtaattttgcactgcccatgaagccctccaatgccttgcttagaaagaactccttctcgtaaaagacaagagctctcaacttctcacaaccgaggagcaatgcttctggattttctatatacccagatgctctgttcaacactatgatggctctgagtgaatgtgaggcaactgacatttcacgcgatatacaatgaatggacaggtacctaacatttggtggaatttcaatgcatccatcatctgcttcgagcctaaagaactcatctgcaacaagaaagcatgcaagatcgtggataagatcatgcatgatgtgaagcccttgaatatcatgcacttgcagaaatgagcggtcaactatttcgttgaaatatagtcttgcggcactattatgtcgaattgtcgatcacattgaattatatcaagcgatttccacagtccaaacacctcgcttctatcaattaaatagcctttgggaaatagagaaagggcaacaaaacatctcttcaggtgtataggcaagtgtctgtagctcaattccaaggctggtagaatctccttttgtggtggctccaagtcccatatgtcactttctaagacatatctccatctcatttcatcagcttcatagcacaacatgcttcctaatgttttgattgctaacggcaagcccctacactttactccgtacaataatattcttgccaatcttatccaggtctgctggggtgtcatcttgttggtcaacagaaaatgcagcttgttggaacaataaccagctgtcatctgaacttaagcagtctaggtagtagaaaggcattgtctgcaccaactttgccactgcctcattgcgggtcgttaccatgatcctacatacacttgaagcaaataatggcatgcacaacaactcccatgtatctcttcgttcagtccatacatcatctaggacaagtaaaaaactcttcccctgtagtttttttcccagcacctcctgaagatcagccagttctgatagactggagctctcctttgtcagcgaagagatgatcttttgtgtaatgttcttggtatcaaagtactctgacacacaaacccatgcgcagagatcgaaagattggttcacccttgggtcattgtacacgagttgtgccagagttgttttgcccacaccccccataccaacaattggaaatacagacatacaacatgcatgcaacgctgctgctttctccggacttcatcagcctttcgataattatctccttctctcgctctcttccaataattctctcttccactacaaaagagctggtttgccgcacagtttggaagtcagggacaatccgccgatacccatcatttttggacagactaaaactatcatagtaatgtttcatctcagtaaacctctgtacaaccttccttgctctatcagccaactcacttggaactggaactacgccaggtttaatgcggtagtgctcgtcatttaccttcagaataaaacatatattagctaagaaggagatttactaatttaacactaatttctacatgcattttcccatttttcaagacaaaatcatacagacaacttacggtttgtttacacaagttttagattggaacgatcaatgtttttgcagttatatatactaaacagtaaatttagttacttttctgagaggaaagtagtaaactaaataattagtttttcatgtacacacacagatatataaataatcattacatatggactgcattgatgaaataatgactatggttgtgtttagttctctccaaacttccaacttttccgtcacatcaaatgtttggacacatgcatggagcattaaatatggatgaaaaaaaaatcaattgcactgtttgcatgtaaattgcgagacgaatcttttgagcgtaattacgctatgatttgacaatttggtgctacagtaaacatttgctaataatggattaatcagggttaatagattcgtcttgcaatttacatgtggaatctataatttgcttcgttattagtctctgtttaatacttcaaatgtatgttcgtatacatcaaattttttttaccaaaacaactaaacatggcctatgtaattatgtagtattgacttagttggccgaaataattaattattacatgcctacagaagaatcaaagacatgagaggggagagacgttgaagacgtaccatatggtcactactagaaaaaaggtatttgcaggcgggcaaaaatggtcttcccaggcagaccggcgttccgcccgtaggcaatcgccggtgcttacgcttgccgttgcaggtattaaggctcctctcgaacacctccgtactgacgcggttcgcctcgtactcgtactcatccaccacatcctccgcgtcgtaggccaattccttgagctccgtgagccgcactttcgccgactcctccctgatgatccagtgctcctccgcgtcgtgcagcgtggcgtggatcctgcgcatcgtcctctccagcatccggaggtcttccaggccctcgcttgtcgtcgacggcgccgttgctacttgcaggcttgctggcagcaaggacgagagcttgtcaagtgcccatttcacgctcatggatgcgaacaattcagccatctttctctctgatgtgtcaactagagtgcaagctgagagaaaagcagctaaggcaaggggaagggaatgggaatgggaatgggaatgggaatgggaatgggtgggtgctttgttaccgtcgtacaaaggttagttcatcaaaagcaagagcaaattattgttggtggtgtacgtattataaaaaaaagatcattatggtgtacgataataaaaagagataaaatatttgttatggtggaccctggccatatgaaaggattaataaattataggtgtgatcgaagtgagcgtcgctcaacatgttagattttttgtggtggaaccaactcacccgagtttaaattctaaatttgacatgtgtgttcgcatttacggttaattattctttcagtggtaagctacgtacaagatatgctatcccaggggtaggatgtgtgtgcgtgccttcacaaggatccgtgtgaacgtgttgttgacgcctgcgtttgtactgtgtttctaaaagaaaaaaattataggtgtggcggatgcacaaggctgaatatcacaaatgattttttaatcaacgttatagactatttatatggtaaagatcatcagacaaccaatttcccatttcaaatgtacagatttcaactaagttactgccttacaatagtactaggatgtatcatatttagtattagattgtttatgggacggagggagtacgtacagtactctctcttcgtcacaaaatattatagtacaagatactactattaaatttgatacatcttttcaaatggagtgtgtttatttggcactttggtgggtgctccaaaatgccagcatggatccccaccaaaatcctgaaaactagtactttggaaatgttttttgctagtatatggtacagctagcagcttttaaaccatttcagatactcctataatttttcttttggagggacccatttagtggctacacgctgcatcatccagttgagttgtgatccaacttcatttaccttttagagtttcacctcatatatatacctcttgtaagccaccgtgcagcgttgtaacctcaccccgatatagtggagatattttgctagctggcgttcgtggttttttctctcttgttttagaagggtttttcacgttaaatctcgtgtcttatatgattgatctatttgttctttatcgtttgttttcctatcgttttgtaacacatccgagcaatgacgataaaatttcaaaatattgcagactagaacatgcaagtagtagctgctatcgtgccagtatttcagtattgatctcagtagcggatggttggtgcgccagccccaccgctaatccctgctcctagttagtcattaacaagtctagtagtgaagaaatgcaaggatgcaggctgcctcactgcttctactgcccaatgattgatggggaggttaattagagtattgtttttttcccgtcctttttagttggtaactgaggctgagaacgagctgccatgccattccctcccttgcagccaattgctactgcaacagaagcaacacacatagctaatcaagctggtggtcaaaccacagccaaagaaatggccggactgttcgcatccatggcaatcgaaggtgcactcgacagcctctcctccctgctgcaactgcaagccaacaatccaacgcctcctccggcgacaacggcggcggtgccgccggcggagacgagccacggtagcgtgaagggggggctggaagacctccgggcgctggagaggaccatgcgaaggatccacgcgacgctgcgcgacgccgagcagcactggagaacaccagggagaagtccgccaacctgcggctggaggagatcaaggagctcgcctacgacgcggaggtggaggcgacggccgctcagggcggcgacggcgccagcagcagcagcagcagcagcaggaagcgcaagatccacaaggtaaattaattggtagtccgctgcacctaggagatagaaatttaaactaatgttactgtagttaactatttaatccgtaccattcaagtagatgggacctcgtgaaactcaataggagatgataaaatactctatgcttttcaaaattttagctgttctaagtttgtactcgctccttctatacacaagttacttctattacttttatcaccaagtttaagaagaaattgactcatcttgcatataacaaaacttaagaagcgcatgcacgcatgcaaccaatgagtattaagatatatatctcctcgggttctaatgaaacatttaatttactctctatttaagtcttgatatttactctctatataattcatatgctgttaactgtatgaatttttataacttgttgatcaaaaatagatatgtttgacttgtaacaaagctaaaatgagaattactttgaaacagaggaaataccacatttaatatataggtgggacctcgtgaaactcactagatgataatataccacacttaggctgtgttcagtagcaagaaattaattcgtcccgcacaaaaaacaaaaccatctattagcacgtgattaattaactagtttttaaatagatcaatatgattttattaaacaactttaatatatatttttttcaaaaatgcaccgtctaatagtttaaaaagcgtgcaggcggaaaaagagggaagtgggttcctaactactcttgccgaatgcagcctaaattagtgtagtagtaatttgtgtgcttctgtttaatctcacaaagctgctgcggattcggttcgttctaaaatataaaatatatgtatcttacatttatttatttcttttataatatattatcaataattacaaaattaacatcatattaaaataatttcaaatatgaatctaataatactacatgtatgacattaaacacatatactttactccaattactctctcatttccataatataaggcacaactacttttttcagatgctccataatataaatcgtgcatacatacatgtaattaattaatatatcttctctattaaattatgactttttaaaatactctacccttaagatctctaattctattgggtgcatgcattttatttattaggatgatacaaatttggaggtgataataattattttttggtcttagtattaagggtggttgtgccttatattttggaacggagggagtattagtcaaaattttcaaatgtgagtttgtaaaaaacacagggagttcttttatctatccccatcaaatcaataaaagcgtctgaaaccctcaagaaatccctgaagatggatagtcgtattagttgacttcctttttttttctgaaattatacatgatgagcaggtattagggcatttaagcttctttactagctagtctgactctcaagtctgaacccttaacaaatcccttagggaaataaaaataaaaaagtaaactgtcagcatgatactagtagatgactaagagtccccctcttcgatgttttttgtattatttgtgaaaaggtacatgacgaggattacttcattgaggctggcataattccagtgccaaaagagttgactgtcagagcaaggaaagttatacaaagatttggtgagatcgaaggctactatggtagtttcaccttgtctgagaatgatggggacagaaggattatccctgatatcaatagtctgaggcagactagctcttttgtatttgcgcctataattgttggaagagaccaagacaaggagaacgttatcaagaagatgatgaccttggaaggaagccgcattggaggttgcatgtcagttttggccattgttggcatgggaggattgggtaaaacaacgttagcgcaacttgtttacaatgatccaaaggtgcgtcaagctttcgatcttttcggatgggtttgtgtttcagagcatttcgatgtgaataacataacgcggaaaattctcagttcaatagcaaagagaaactgtgattatatacaatctagtgagctccagggtcaattggaaaacctgataaaggacaagagggttttccttgtcttggatgatgtttagaatgagcaaagtgattactggaagtcgttgtgtatgccgatttttgcctctacgcgttgtgacattatagtaactactcggagtgaggcagtggcaaggttagttcagacaataccattctacaatttagactacttaatcctgatgacagctggttgttattcaagcaaacagcgtttgttgagcatgataatgtcagtccagcaaacctagtagagattggccagaggattgcaaagaagtgccaggggttaccgttggcactcaagactctaggtagcgtattgcgctttgaaaccaatgtaatgaaatggagagatgttttgcagagtgaactatgggacttggagcggtcacagaacgaagttttgccagccctggagttgagctacaagcacatgcctatgcacctgaaactttgttttgtttccctttctctatatctgaaagatacttacttcgatgaaagtattgttgtttggttgtggaagtcacttcatttacttcagtgtgacggaactgataacagcaatgaaattggaggtttatattttactcaattagttcagcgatcattgattcaacaagtcgatacccacggacgcatggctatacatgatcttgtccatgatcttgcgtgctttctagctggggaagagttctttagactcgaggaagatggatatgttgaaattccaaagggtgctcggtgtatgtccataatgccacatccacaatgtaagaggagtactcaaatatcaaatgcctcgcaatctctcagagtaatcatattgatcaggagaattaatatcaaaaatccagaagcattgtttatgaactgtaaaaagtttcagatcattcaagtcatagatgacagttttgcaaatgtgttgcttgacttcatgggtgacatgaaactactacgtcatttcaggcttataagaagctgcaacgaggtaaagttagtaatatctgattcaatgtcccagcaattcaatttgcaaacactgaactgtgaagcatatagtctacatggaattgggcggctagctaacttgcaaaatttgcctaatatacacctctggaaatgtggttgctacttaagggagctgaggaatatgaacaaaataaggaggctgcacatatatggactttgtaatgtatctagtattcaagatgtaaatgaagctcatttacatagcaagaaggacctcgagatactagaattggactttgagagtggagggatttgtaaagttcacaaagaggaagctgatgttaatcaagcaattagcactgtatctggtggctcaatacttgagagcctaagaccacatcatcagagtcttaaagtactaaggatgaagaatttgaatgaggtaaattatcccagctggttgggcagtgcttccttttccaaattaacaaaattgcggttagagaattgtcaatctcagcaccttccaacgctaggtgagctaccttctctcaaatccattgatatccgccaaatggagtacgtggaaaacatcggtcgggtgttttgcagccttgatccaagcgtcaaagggttccgctccttagcacacctgagattccaagacatgaatcgattctcagagtggtccgaagtgcatgatggcgagttttcgtccctggaaacactgctgatctggagtgcctctgaattgagctctcttccatcggttccattctcaagcttgcgtagcttcgaactatgtgattgcaaaaatcttgttacttttcctgcatcagctacccttcagatactaagcatctcgtcttgcgagaaactgaaggaactgccggctctcccgtccctccgttcactgaaactgagtggctgtgaaagcttggttgcagttggtcacttcccgtcactcaccgtcttgcatatgagtactgaatttgaagaagaggtacttcacaagttgatgaatttacacttaaagctggaagaattgtcaatttcgtctgataccatgaagttaatcaatcttgagccacatagcctgcctttacttagagagctcgagttagtatgccctaacttgcagaattgtgatgcacttgccagcctcagttccctcgagatactatgcgtaaatcgttgttctccccaacttcgggtgcctaattcacttcaaagccagctggaaaaactctacagtccttgatctttgtaataacagtcctctttttaaatgtactattttagttggtacttctgcctttacatggccacatatcttaattctccttttgctatcgactctgtagaagcagaacatcaattcaaagactgcaatttttcggaaggggattggagggagaatgcaaaacagcttctggtgtcccactcccaccttaacactgggacacggttttctttttcttgatggaactgtgggactagaacaataaaggaaaagcgaataattacacaattactaaagaaaaggattgttactgcgataatcatcgcatagattgattgagagatcaatgttagtacaactagaaaggtggcctgcgcgcatgaaaggtaagatttttattgtttgttaaaaaaatttgtctcatagattaagggaaaactaaagtttggatactattattttgtaataattttttaataatttaagggttctatttttcttaaggtatcttaaaaatccattcacaaatttttagtacttacgacttttgaatcatgtttttttctcgagtaaataataaactattgcttgtagtatggctacaaatgaaaaatgcgagagcaagatactcaaaattcttgtgattaaatcgtctcatgaaggcgcatgatataataagaaagggagggaagcgtatacatggagaaaaagaagaaagggaaaaatgaaaaatgtggaggggaagcgtaggtacccacgtacgtaggtgtgtaccgaaggtggagaggtgggacatcgtagtatttagtttgttctaagatcaatttaatctaatggtttataatattggacccaccgatttaagtaaaaatcaagtaatagatactttgcttttttttcttagaatttctaatattttctctaatttattagagcaccacgtggcagcttgggggcattttaagaaattttaatggacttaccacatgtgattacaatattgaccatgtaatatatatgtatgggatatatgttaatattcattccagcttcgtccatgtttatatacatgtagagagaaattaaatatgttgctagcaagccattagaaatctaattaatagcaattaattttgacacttatttacaattgttcatagtagctcttatagattcatcttacgatcttgattatgcgttgatcaccaatttactgatcaccatgactcgcatgaaaaaaaatatgtactacttaaggtttaggacagctgattgatgaattatctgatttatgtgatagctatttgagattataaatgaatgaattaacttctgaaaagttaaaaagttgtttaaaaaaagcaccatttaggaacttgaaaagcgtggagcgtgcaaacaaaaatccaaaagatagaatcagggaaaaaatagggctttaaattcccttataacactcttgtcctagtaaaagttctattctattgatattcattaatattgtgctcacatttataacataatgatatctttcaattgtacgaacaaataatgcaaaatccaaatacgatataacacaatacattataattattatgcaatcaactcttggtttcagcttaaatagagttaagtgttggaaaaactaaacccacggtgcttaattcttctctcgctgcatcacacctttaattttcttttcatgttattaacaaaattaatcatctccatatatgatttgatgtgtggcaaagcagtagcgctgcagcggtcgtgatccttagatgccttagacacgacgctttgtcacacgtgcaaaggtcaaaggtgcaattgtgcattctgcagcaggcaaaaaaagagaacttcggacactttatttattaacaatagatccgttgattaaaataatgggtccaccggttcgagggtaaatgtaaattagttaatatagatttaaattgttgatttaatgggtacacaatataatagtgtagactttatttttaaaatagagtattatttgagaataatagtccaaagtaataaaaaataggtccgatgatttaaataatgggtccatctgttaattgcacatataaagtagttaatatggatcttaaattgtttatttgataggtacacaatataattgtgtaaattttattttaaaatagtgcattatttaaaaataatagtataaagtaatgagtacaccggtttaagtggaaatattcaaagggtaaacatataatggtgtaaattttatttttcaaagattgtatagctaatttagttccctatgtttataaagagttatatgatggtatattcttttgtttggaaaattatgattatttaaaaaatatatatcaattgtataaatggaaaaaagaagaaaaaaaggaaaataaatggagggagccgtacgtactacatacccatacccatgtacgtacctgacctacctatgcacgatagaaagaggagaggtgagacccatagtattttgtttgttttattatcaattttatctaacggtgtataatattggacccatcaatttaagtgaaaattaaggggtagatgttttattttttcttagaatttctaggattttctctgatttattagagcgccacgtgacaacttaagaacgtttaatgaacttttagtatataatagatataagtatgagcaactttacagtccttgagaacatagcatgagataaaaaatttagtgtggtacctcgtgttaccttctcgagtgctgtaaaatttctcatataactatactctatcggttgccttacatccacaaccaatttaaagaaataggattgggagagataagcacggtcactaggatgtgggaccgctagacgaagcattgacaggagctggacccacgtcgagagaaaggaaaccgacgacccattagtatatcacggccccgcagtcaaactggctatagagatgttgactggtactaatttgtactattataataactaagaaggtgacccacgcgatgcacgggcatccgtactatcatgacgtaccctctatttacttctgatagtcatatttcatcttggcacacaggccaaggataagtaattctacttatcatctatttaaacatgctactagtcattcctcgtaaacaaatgattcattaatatttatatttctcaatactcatgtagctaatcatatatggaagaattgagagtcacgcattaaatccgagaaagtcattaagatgataggttgttcgattgaaatatgtctatcaaaaataaatttttcagatttaaaaatatgactatcaaagatagatggagggagtatcattcattgacttaaaagatagatcaaggtcgggcatatctaaaaacaattcattgacttagattatagatcaagatcatatcatatgacttttgaattgaattttggaccgagtgagtaaatatcatgtataccatttgatcacataccatacaatattgctacaagtaaaaattgcgatagcaaggaactcaaagtacgttgtgatcgaatgtgtctcatgaagatgcatgattttgtggcaaccaaactaaggatatattagcggttggattgtttttcctttcgtagaagttcaaatttttcatattattttccaaagttttaaagaatttttgttaggacacaaatcacttgcagaactgcttggttgggtagtgcaaaatatcaacaattgtttgaagctattctttttttcttgtttgcatgtttgattgttttctttgaaacaatatttgtttgaaattagagtagaattatataaatttaataggtatgtattgtgtttatcggtagacatgatcaccttagccaggagttataagacgtgcgacagatacaaacagaagttggaagaaaaaatagaagcacaagtgaagaaaacaattatactctctggctgcacaaaatccccaagccttcccaaacatatttcccgagccctagcaacagacagttcaggtgccaagcagtgtcggatcggttgaaacatcaccatatccagtggatcttatcaccggtccgacgccgtgcagcctcgtcgtgccaataggaagggctgggaagagaaaggtgggaactggactagcaataccaggttgttagttccacaacattccaattccagacgattacgcaagagtgcaagtagccaaggtccatgcggagcatacctcattagagctagatatcccagcaccggaaggaatagaattgtttggagatgcggtgaaccaatttatattgtggcatcgtcgagatatcctctaggtcggtcagcaaccttcaacaccaactccatcgggacctaagactactactgctcctgcgctgctttctccaccagggccagattcaccaccaaagcggccatattccccacttccttcgtccccaccaaagcggccagattcctgacctcgttggtcccccccccccccccacaacatccaccacctccatctcatgctaaagtccccatagaaccacctttacaaaaaatggattccattcaccaatctcctccaacatgacagtcagctctagcgcaacctgttccacctcctcggaaagccactagtctcccaactcctactaaccttgaacctcgtcagcttatcccaaagatggtacgatccacgtgcgataaaaaagaaatggtcgtatacaaacaaaggttagtgtttcaggtccaattgacaagaagaaagatgaacctcaacagttgtcggattcacagaagttagtgaagagtcacaatcaatgcaatactcgacatttgatgaagtgccagaaaagtatgcgtatggaaagccattcttaccatgcactggtggagaaaccatctttcgtcggtcggccgatttccacaatagtcccggatgcaat

SEQ ID NO: 17349 - DNA, 1755 bp, Oryza sativa
ctaaagatcccggtgatctttagccccggttggtgctaccaaccgggactaaagtcccacccctatatatatgtcttcttcctcctccagctgcccgagcaagcttcaaaatttcttcaaaaaagaggggaggtcatgccaaaatttctattgaatttattttggtgattacatacaaatcggaggtgcctaaaaggtttgcaacttcatcccccaatgtttttttttgtcatactacatttgcacctatgttttgcacactttttttgtctccaaaatttagttgtaagttgatgagagagaaaatgtgtgtggggaagaaagaatatatagaaatttagttcatttgctaaacaaggttttataaaatagttgagaaggaaaactctagtgaaagttaatcttaaataatagaaaacaaactaaaatgaaaattaaaagaagtaaaacacattaaaattagtttaaaactttacaaatagtttttaagaattatttggtgtaatattttatgatttttgtatgaataaagatatcttataattattgtatgactgtcattattgtaagaataattatttgtgtacggtttttctgactcatgtagatggatcggcaatgtatgtacgctgaccggcggtccaaagagtttattgacggcgtgtactattttttgacagtggccgaagctaacaggcaaaggggttttatttgttgtccatgcaataagtgtaagaatcagggggagtattctgcatccaggactattcatttccacttgtttgagtcggggttcatgccaagctataattgttggacatcccacggagagcaaggtgttgaaatggaagaagatgaagtggaagacgacaatattccggactttgctcagtatgttggatttgaaggaaatcaaacgggcgaggaggaaatagctgctgatggtaacgacgttgcggatgatcttggtcagatgttgcaggatgccagggaggactgcgaaagtgaaaaggaggcccataaattggacaagatgttggaggaccacagaacttcgttgtacccaggttgcgagcaggggcacaaaaagttggataccactctggagttgttgcaatggaaggcaaaaaatggggttagtgacaaggcatttggcgatttattgaaactcgtcaagaacattcttccggggggaaacaaattgcccgagacaacgtacgaggctaagaagatagtctgcccgttaggactggaagttcataagattcacgcatgtccgaacgattgtatcctatatcgcggtgaggagtatgagaacctagaagcatgccctgtttgcaaagcactacgatacaagattagacgggatgatccaggagaagttgacgggcagctaacaaagaagagaattcctgctaaggtgatgtggtatttccctataataccacggctaaggcgtttgttcaggaacaaggggaatgctagaatgttgcgatggcacgctgaagagcgtcaacaggacgggatgctgagacaccccgccgatggttcgcagtggcgaaacatcgacagaaaatttaaagaatttggaaaggacgcacgaaacatacggtttggtttgagtacggatggcatgaatccttttggagagatgagcagcggccatagcacttggcccgttacgatgtgtatctacaacctccccccctgtctatgcatgaaaaggaagtacataatgatgccgattattattca

SEQ ID NO: 17350 - DNA, 712 bp, Oryza sativa
catcaacgagccaatgatttgggagtattctagttgattcctagcaattctcttgttcttgcgaagcaacaagctaggatcataagatgttggagaaggcttactatcaatgtagccaaagcgattcaagatcttctccacataatgggactgcaagagtgtaatcccattctcacctctaattagcttaatgtttaagataacatcagctactcccaaatctttcatatcaaaattttgagacaagaatgatttaacctcatttatcacctcaaggtttgtcccaaatatcagtatgtcgtcaacatacaagcacaaaataactccctcacccccaccatggcgatagtacatacatttatctgcctcattgactgcaaagactgcagatgtcaatgttttgtcaaatttctcatgccattgcttaggagcttgtttcagaccatacaaagacttcaacaatttacacactttgccttcttgaacttcaactacaaacccatcaggctgatccatatagatctgctcatccagctcttcattaagaaaagctgtcttaacgttccatttgatgaacgagaagaccatgtgaggctgcaagggaaagtagcacacgaattgtggtcaatctagcacaggtgagtaagtgtcaaaaaaatcttcgccttctttctgagtataccccttagcaacaagccgagccttatccttt

SEQ ID NO: 17351 - DNA, 636 bp, Oryza sativa
aagaacctgacacggatcaccacacctgcatcttggacgggcttcccatgaagggagtgccgtagttagcacccgccagtcgctctgttgttcacgacattgtcgttcataagccgcttttctctttaagtattgctcagtactttcggatgcgaaataccagcgaccttcttgtaaacaagtggttaggtcaagaacgggattttctgtatcgacccactcgatgtatgcgcaagccgtagtgcggatctgccgaatagagtagtgttacgaagaaaaaagcgattgcccatacggaatgaataagcatttgcagataataaaatacctcacggtcatagttagggcacctaaaaaagcaccttcctcgaatatcaagattcctcgaagccattagttggcatcgatcaccgcataggcagagtggacgctggcaccaaggtggtagtaggtatacacaaggatcgctgcgccagtttggatcctcaacaccccggcgtcaagccattgacgaaagccggtaggatttgtagtgaagaagtggggaagagagtactgaatgtgactgagttctgaaaaattgtgaggcctcactcgttaaggcgacttatatatgcgcaaaaaatcgagtgatat

SEQ ID NO: 17352 - DNA, 13993 bp, Oryza sativa
ttaactgcatatatcggtaaatatcagtgctgttgaaaaagtttctgcaagcaaataatatatttgcaaacacatatagatgtacaaatcgtggctcaaggttagcctatttgggtcaatattatttctgcttgttgctgcacctggtgtcataatgtaacagggggttgagctcagaaacagacacaggtttaatcctaagatgcccacaacagcttattaacttgcgcatgtttctctactgaatacatgaaccgcaatggaaatcaggatatacacccatcagctaatagcctcgcccataaaaaggcgatggaggcatttcactttcaattagattaggtaaaaatgtagtaaacaacagtatacctagtgcaagaacaaccaagactaacccatgcaagctgagagttggaacctaaaatgatcatacatttatgaacgaactgtcatcaccaataatattttccctacgagcatcacaatatgcaacctggtgaacagagaggggtgtagtaactaagaaggttggcatgctcctatacaattttgttcatacaaaacatgttcgcctctcttcctttcactttgatgtagatagtggagagcacaatgcttcacaaaagatggggctcacgttccataattttggctcacatagcacttgtgctagaaccacaaaaaagagtaattaacaagggatctccatgtaccatgcactataaataagaagttaaagatgttcacagggcagtgaagataaatgtccagctaacgaagcactctacgcatcacaaaattcagttcagttgtaaagaaagaaaaaaatccacatggaatcaggggcggatccaacttgggacatgggggttcagtcaaacttttgggtgaacaaacaaaaaaacaaacaaactgttactagctagttgtattaagagaggtttaaggctctcaaattaacaaggaggaggagaagagcttcttccagatctagaagagaagctagtagggttaacgaacgcaagcgaattcaaggtcccagtggggtgggggagagagatgaatcagaaagaggctcaccaggatcccctcccctactctcctcgccagatggagatcggcagccgcgactcgtcttggcggcggcgcaaggagcggaggaggagccaacgagacgggagatttctctcttttacgcgatatactcgactactgcccaaatgggccgcccggcccggcagcgcccaggcacgaccggacctaggcccagtcaaggccccttctctttggacagtgccttataaggctgcactaagtctattttgggtccccaactatttttctttgacttatataaggctgaattgagtctatttaggctggattttccggattgaaactacaaagcggtatttttgtttgaagctatgggatcaaagtccagtgtcctcgatgcaaactttgtctgatgaattgacaacaattaatcagataatacagttgcatatgaaaattactagttatgtatgtgcgcagataaagagatacaaaaccacacatcaagtgtttattctatccatatactgtcaggtttatattggctgtgtgtgacggggcaaatatcgatcggttgtgtgtggcggggcgactgatgactagagaggtggagatattagggatggggggagagaaaagggggaaggggtgaggtgacctttggaggggtagaacagttggtgtgctagcgacgacgacggagctcgcaataggtgtagggggccgagacggtgtagaggcgataattgaccgccacgccgtgcgtggctggcgttgattagggtccgggggcaatggagtcggggaggattgaaggcggcgcgcggcggcagaggagagatgagggcaacgataaaaactatggcgagctggcgcccttgacagctcttgcggggcagaggacgtacagtgcagcggctaatagggaggggagcgctgataagcatggcggagcggtttctggcgttagcacgtgcaggagcagaattggggagaggcgcaggggtgagtggggatgtggtgcacgattgagagaggtgggattgatctcgattgttgggagctgttgagtgatgaatgaaagaacgagtgatgagtgaaaccacttgctacactatatggggaatagatagaggtagagaaatgggagaggtttatcctctctttctcaaaaaaaaaaagaaaagaaaagaaaggacccaaccgtgatcaaccactgcctcgattcccttggtcctccgagaatctcgccggcgatggctgggagttggttactgcgccgcgttctcccaccccagctggttatttatagtgcggcggcactcctccattctcctccattccctaatttgtataatggttctctttgcaaaaaatgtgctggtgaccaaactaataggagaatggttagggagtctaagattcaggaggtctcttgtggataggaaacatttggaatgggttaaacttaatcaactttgtcagtcaattgaactgactggggaggaggataaagtggtttggaaactgactaaaaatggcattttcactgttaaatatttctataaagcaatgatgattcaaaacactggctttcaattcaagaatatttgaaatttaaaatttctcctagagagaaggttttcctgtggctgatgttgaaaaattgcattttaaccaaagataacttgctgaaaaggggatgaaaagggaaggaggcaaaaaaatgaaactgtggagcatctttttaaaatgcccaatttcaagactcatttaaaacatagtgagttgtgtgtttgatttgaaaccaatccataatatacatcacttgtttgggaggtggctttaggattttcaaaaaaaaaaaaaagataaaaactttgtggtggtgggaattgcaggcagctattgtttggactatatggaagttcagaaatgctgcatgtttcaaaaaataaaagaacacaagatcctttagagctgatatatgctgtttgctcctggatcaatctttggtccattttgcagaaatcgggggacacacaagacaggcttcaacgggacgcggctttgttaaagacggtggtcactgacttctacaacacaagatttggatagaatccatatgtgatgcggatacaggggataggatgaagatttatgccttctagtggctgcagtttctgttttttttttctctgctgaatcttgttcccttttgctgtaagactgttaaagactttgtattcttatttcgttaatgaaatgggagaggtctatcctctctttctaaaaaaaagcccaaccgtggtcaaccaccgctgcgattcaaaaatttcaactcaaattttaaaattcaaaactttcaactcagaattcaaaaactttgaaatcaaattcaaaaattttcaagtcaaaatttgaaaccttcatatgaaaatccaaaacttttaacccaataattattcattttttattaaaaggctaaatgataagattagagaagggattagacgacctaagcatatacaggagtatcgctaagcgctaggattagtgcgcgcagctagcttaccgttgtggcgcgtgcgcgcgcactggcagcccccgaggtttatcctttttttaaaaaaaagacaaaaaaagagggaaaaacaaccgtggtcaaccaaccaccgccgctattccctggcgcaccgggaatctcgccggcgatggccggtagtttgttacggcgcctcactggctatttatagactacagtgcggcggcagtggcactgatcccattctgcgtcgagctgcctagctatcgatcttcgtacgtaaatacgtctccctcgtctccggcgagccaccggccgtgagagatggcgccgccgtcagccatgaacacgtcgagggcggaggagaaggccatcgacgactggctccccatcacctcctcccgcaacgccaagtggtggtactccgctttccacaacgtcaccgccatggtcggcgccggcgtcctcagcctccccttcgccatgtccgagctcggctggtacataattcattcatcatttctccttctccatttcatttcatcgtccatggatgagtgttcgattttgtttttttttgtaggggtccgggggtggcggcgatgatcatgtcgtgggtgatcacgctgtacacgctgtggcagatggtggagatgcacgagtgcgtgccggggcggcggttcgaccggtaccacgagctcgggcagcacgcgttcggggacaagctgggactgtggatcgtggtgccgcagcagctcgtcgtcgaggtcggcgtctgcatcgtctacatggtcaccggcggcaagtcgctcaagaagttccacgacctcgtcgcgccgccctccgcgccgccgatccggacctcctacttcatcgtcatcttcgggtgcctccacctcgtcctctcccagctccccaacttcaactccatcagcggcgtctccctcgccgccgccgtcatgtcgctcagctactccaccatcgcctgggccgcctcgctccaccaccacaaccacaacaatggcgctgccgccggaggtgtggactactcgctgacggaggcgacgccggcggggaggacgttcaacttcctgagcgcgctgggggacgtggcgttcgcgtacgcggggcacaacgtggtgctggagatccaggcgacgatcccgtcgacggcggagcggccgtccaaggggccgatgtggcgcggcgtcgtgctggcgtacggcgtggtggccgtatgctacctccccgtggcgttcgcgggttactacgtgttcggcaacgccgtcgacgacaacgtgctcatcacgctggagcggcccgcgtggctcatcgccgccgccaacatgttcgtcgtcgtgcacgtcgtcggcagctaccagatctacgccatgccggtgttcgacatgctcgagaccttcctcgtcaagaagctccgcttcaaacccggcatgcctctccgcctcatcgcccgatcactctacgtctgtaagtgtgctagcatgcactaacacacacacacacacacacttgattagtgatccaattaattaattaattaccccctccaaaacgggagaatttaccttttgccatcctctcaaaataccagttctcaaatgccactctcctaaaatttcatttccaaataccacctgggtccacatgtcagcctcttttcccattcaaataaaagtgacgtgggactggatggtgtgtgaggctgatatgtgggcccgggtggcatttggaaatgaaattttgagagagtggcatttgaggactgacattttgagaggatggtaaaaagtaaattatcccctccaaaagtattttctattataatacatagaaatattaataaatatatgattttattgaagtacttttttaaaactaatttacacatacggttttcatatttttaagataaatattttagaaattattaactaatttaattaataattactctctctgtcctcaattataaggcctatattttttttacacggtttttaataacatactttaactagtatcttttccatttcatgatccaaacaaatataaaattagcatcacataaaagtactttaaaatataaatctattttgaaatataaatctattttgaatttactgatataacatgcataaaatttactgatataacatgcataatatttagtatagatatagttagtataattattaataaaactactaagtttgatttttcttaaaaatagagtgtcctataatttaggaccgagcgagtagttgtcaattagtctatcatatgttgttaattaggatctaataaatcttaatttgtactaattttggagtattgaatttcgcagtgttcaccatgttcgttgccatcgcggtccctttctttggtggactgctaggcttctttggtggctttgcgtttgctccaacgacctacttcgtaataatctctaccattaatttctttattattagaaccttcattaaaaatgtatataatttaaaatctctcgtgcgtattaatctccgttttttctaactgaaatatgaacaattgttttttcagttgccatgcattatgtggctgtcgatcatgaagccaaagaggtttggcttgtcctggtgcatcaactgggtaagtagtattatccattaattatttagcatgtgcatggtcaattaactaacttgataattatcctcatctgattgttaattatatatcttgttaattttaattctttatatatttttggtgcctcagttctgcatcatcatcggcgttcttctgtcggtgttcgcaccaatcggaggtctccgctcgatcatcgtgaatgcccagagttacaagttcttctcttgagtgattaattgagagaaaaggtgttttaccgttcaattaagtgtgttcttaattaattaggggattgttttagataatgcacagagttctatttaattaattagatgaaagagaaattcgtgtgtccctatgagacatctgtgtggattgatatagtagtcgatcaaatgaaggcatattatttatttggcctttgtttgtcgatctagtactctagcgttaatttaattcgtgtcgagtttatcccaatttttgatgatgtttgtgctctattatcacgtggtgtggcattcgttttaagggtttatgattggttcaaacttcgtcctagtttttacacgatttgaacttgaaatcaattactttcaattcgactcttgcgcgagtctcactaaaaaaagttatcgagtaagaatatcgagtaagaaaaaaaaggatgttgctgtaccacgggaaagcatggcagatggcgagaaccaggtacatgaacaattaaccaaaacatcataaacatcatatgtacaaatcagcacaaagaaacttcagccacgctacaagcagttcgctgggaggaggtaaagtctcttgtacactcaagtaatatattgcagtaggagcctctccaactgtttttccgtcaaaaaaaaaacctgaggagagccgacgctgaaacaaaatttgacccaacctcacacctctgggaggagagtgccgatgctgaaacagaatttgacaaggtttaagagatcacacgatttcaaactgaggttgacgataattgcgccccattcctttggtagggtactttgccatatcagatatccattgcctcggaggccgatgaagcattcttcttcttgttctttcttttcttgtccttagggtccttcccctgcttggcggaattgctctcctttctcgcagagggtggctgtgttgacaacaggtgctgatggatcgccgcaaacgggtcgagctggaactgcggattggtcagcacagcattcagttgggcagcctcccgttgcctgaaaggagagacaaagccagtcaaaaaccataagtggaaagaaagcaaagaacgcaagtggaggggcagatgaggcaattacactaaagcttgcttcgatttgcagttcagttttgcttcggtgtgcagatttgaggcatctgtttcaggaaggaactcagagagcattgagagatcatatgctttcagtttcttctggcggctcctctgtttagatttctgcacaaagaaatttaaataatcacaacccataacactgatagtgcaaagtaaagcaagtgtaacttccagaaaactacaaatggagtagcccagctgcaataaaaagaatcagttgtaaggaaggacagtgtggagagattaaaggccaagaacagaacggagagactaaaggtctcatttcagcatctacaagtatatttactctaaaatatagatgcattaacatatgaaatgaacagaattaatgttcgcagtttgtgtctagaatatatgaaaccacaagattgtaactatatgttgggaaattcatgagtcaagagccaactggtcttggcatttgtttttccatatggagttaggcacgtatgggtttcctaggatcctagtcatcccatcacagtaggagggaatacaggagacagtggatcatcagtgcaagtacaaaaagcatattagggttccaagcaggtcccaagtacaaaatccattctcatatctgtttatggatatggtgtggttattttgctagtcttcacatgtagacaagcatttggatgacaatataatactttcttacgcagataatttttagcataccacaaatacacaggacaagagactaaacatagctagcgattgagaaaatcagacttacaaatatatacttgaccaatacatacaatttggaatttatccttgaaatatctaagcattggttgcgttatacgcccacgccactcatggagcaaaacaataacagtaaaaacaagctgcaacaacagaagctacagaaaatattcaattgcaaccaaaggtgaaaagccatacacccatagaatctgctgaagtctgattcaagctagaggcatgtagatattttttgccagggcatggcttgtttctgtttatactttacagctgtcatgtgaacaagaaacagctggtctagttcacgtatggtggacaccaacacccctagtttggatttgttcagcaggtttattagatgaacgctccataatattttttggttcaattagtgaacaaataaggccccaaataaggaggacaatatgcttaatattattgcatagtgtaattgattccccttagctaggtgttggctgtgttgagaaggattcaaaggttatggtcatcaaggccatgttaaaaacagagaatagctcctgatttctttgctaaactttttgtggcttgtgctagtgatgcattacattataccagggttacaaacatgacaaaaaccagtgagtagtaaccagtgcttggttttcttgcaatagccatacccgctatagtgaactggaacctagacaagcaatttttcgtctcgtgctattagaggaactttttgttcaaataagttttgccagaaagtgcctggttctgctcagtactggatgggttggatgtgcagagcacattccttaagaggtaaattccacctagcaagagactagctgaagagtgcacccacactatttaaaaacccagtcttgcagaaattatttactattagtatccgggaggtcctatttctttcttagctacaacctacaaatgccacacagaggttaattggggaactgtgcacagtaatcagtcatgaagcatagatatttcagttctgagtgtaacctaaaaaatatgggattacgaattgagatctagcatgcaaaactggtgtattaagtcaatagaaacagaaacgacaggacatgatactaggtagttcgaattgtcaaaaatccattttttgggcaagatagtattcaatgtttgtgtacgaggaacacacaaatttgcaatgctgaagagaattaaagaacactataataataaacgagagggtctataagcaccttgcagatagtctttgtagcatttagggaggttactgcatctttcacttctgagaaacaaaaacaaaaataaatcaattatactataaaccacagtaaacaaaaaaacatgctattccgcaaaatatagtcaacgactcaaggtagacaagaaaaaggtaggaaaatgaaacagagtccagctagcagtaagcccaatcataaatcgtaatctatcaatgtttcgactttcgagtgcagtaccacaaactaagctactatctactttacaatatacatgttctgtaaacacaagtaatctacaaaataaaaggtatactaaaaaggctacaactatttatagaaaacaaaagaggttttattatcacaaaacactaaaaacaacaagcatggaacatgaacgaagaagtatttttattcatggataagatatttccaagctttcactattcaagaaaaaaaaaagcattgccccttttacagacatattaattttcttggaataaactaataattagttgtccttctttacaaaaatgaataacaagcatttcagaatagcagtgaagtaaaacataacaagccaataccaccatcctctggtcttttgaatcaatctctatacattaatcaacatttgccttatacactccctccatccaaaatataaggcctatcagtttttttacatgttctccaacattgtattttggaaattaaattatcttacaacatattatcagcaattacaaaggtaccgttgtatacgaaataccacatgcatgacattaaacatatacattgttagttcaattactagccaaagattgcaaatgttgatttttcctggaataagggagtacagccaaaaaataatggaaaggcacacctacttgtgtagaagctgagcttcttctcaagcttctgtttggacttcagttcatgcttcttaggtgacccagtcctgaaagcaggggcggatccaacttgggacatggtggttcagttgaacccccaaactattcggtgaacaaacaaacaaacaaacaaaatgttactagctagttgtattaagagaggtttaaggctctcaaattaataaggaggaggagaagagcttcttccagatctagaagagaagctagtagggttaacgaacgcaagcaaattccaggtcccggtgagagatgaatcggaaagagggctcaccaggatcccctcccctgccctccccttttgtgctcggcagatggagatcggcgcgccctgccctgtgtgttggcggcggcgcaaaggagcggaggaggagacaacgagagagagagacggccgagttctcttttcttttacgcgatacgagacgccagggcccaggccctatccgaggtggggggggcccgctgtgccgtgcccacaggctgcattcacgggccagtctatgcacaataagactctggctatgccagccgatccaaaggcacgatagtccatcgtgcttttctacaaaataagtctttttccgtctcttatctctttgggttgtgtcatatatgatggaataagtctatttatgtccttctctttggacagtgccttataaggcagaattaaccccaactatttttctttgaccatgccgtgctgggcagccccaccatgccaaggcattggcccaagcacggcccaattattgggccaagctggcacgagcccgacaataattgtgtcgttccatgcttggaccaggccaaatggtcgggctgtcgggcctcggccttatggccatctatagtctactccaactttatcttaatatttttactattttaaaactagttaatagtatttctttatgatgactggtgacccacatatcatcaaaaattaacaaacacagttagcgattgtgtcgacaacaaatttctcagaccactagcaaccactaactgatactccatgcaccgtcatcaccgctctttctcctgagccaccatcgttcctcctctttgcctttaccgtcatcaccgacatttctttttctcctccactatcgttatgcacactattgttatggttgcattgaggtcggggatgtcgggcgtgaagggactgggaggcaggagttgacctaacaaaaagcgaagacgctatatccgtgctccttcttgctatacctagcagttatcaaacggagggaaaaagaaaatggagagagagagatagtgtgcggagtgattgctgagtcatcagacttggagatggatataatagggtggtccaaattgaaatgtaaagttagctattgtgtaaaagaaaagaatggttaaatgatgacataatatgaaaacttttaagaatatttaagaatacatagtatggactgtaatttactccctctgtaaaaaaaggaatctagagatatgacatagtgtagtatagcaaatctggacataggcatgtatagattcgttttacttggatatgtcacatccagtactaggttggctttttttattggacagagagagtattttttttctctagcacaattaaagatgagttgtccattagctgaaagtagggatatgatctaaaatgtatcggatggttgaaaataaatgaaaaccaatggttgatatgttttttctcacaactttttaaataaaatacatctaatctaacctaatggtctaaattatcgggtccaccgatttgagtgaaaattgacggtgagattaggcattgccacgtggtggtctaggagcgtttgtagatgtgccacgtggaggcttgagagcgtttgtaggaagtttaatggacctttagtatataactaggaaggtagcccacgcgatgcgcgagcatgtattagagattatgtttgaaaaaaaattaaaatgatagaatatcaaccagatgacacttgccatttcaaaaatactgtttatccataacttatcctcatcagtgttgcttttataatttgtccaatctatttgttagcttttaaaatatataatatttaatacattcctataaacaattatctaacaatatgtagaaaagagttagatttaatttgtatggaaacatgtagtgttctgtcttgtttaataaaatgtttaggggctttcttttttttagcaaatcctaaataacattattgttaatgaatatgttttatttgtaccaccaagctagtcctcctatttggttcaattgacacaatttgttatatatatatatttacatataaatttctaagtagaccacccttccctgatatatgcgtgatctatagtatcgtttattttaaaaaagaaaatacctagtcaatatgagttagaacattctagtttaacaattaaaaaataacttcttaaccaactgtaaagctaactttgtgtggcttatatatgcaataatatgcggaggaactcataatgtcatgaaagccagtaatatctaagcacttaaaagatgttatggccatgtaacatgcaatagttgttccaattttagtgaaaagtaggaaacaatgttccttttatatttcttgtttaattttatacaactcttattttaagttcaaaatataggtgttatggatctttaaattgttggtttaattatgaatagagcaattagattagaaaccagatgtgtggataaaaaattgtgtatgttttaatattattgattatttctccttttagtttgagagctataaaaatatcgaggaagggcagaggggaaagtgcgagccgaaggggactagtagtgttgtgtttgtgcgcatgtgaggaggagggcaaagttttctgtgtgtgtgttgggggggtggttctttttttataaatgatttaagtgaaaatcgatgatctattgttttgtttctaaaattttcaaatatttttttttctaattattaagatgtaacacctagcggcttaagattttcattaaaagtagatgtaatggttgaaaataatggatctacatatttaactcgaaacatgtggtcaactgtttttttcctataatttctaatattttatttttaaatttaagatgtaatatgtgacatatgtgatactgttagtgctctatagataatgtacgagatttaagatgatatagtaattattatcaattttttatttttctatttttttgtttggttgacacacgtaggtgtctacaaatgatgtactatttacagcgaaatatgggtaatatggatcttgaattatttatttatttataaataaaacaatagttcaaccgaacttgaaaaccagatataacttaaaagatagtcatttagttttctaattgctgtgtgtttatgtattaagtttttaattagttaaaatt

SEQ ID NO: 17353 - DNA, 1125 bp, Oryza sativa
ttagagttcactttaggatcatctagctttagatctactcgggtagtcctcttgggtgtttgaacaaatatagagatgaaagagagggtttagagaccgaccagtaaaggtggaggaggagaaagtgccggccatcgtcgttgtcgtcgcgtgcttgtcgtggacggtggcgacggtgggcttgacggtgatggcggtcgtggcagcggcggtcgtagccgccgatgacgaggcatggtgcagcggtgatgcttcccgtcactggctacgccccctcgatcggttagggttttgtgggtggagttggcggcggaaccgaacctcatatcatgtgccgccccggcctccaccctctatttatatggcgcaaggtgacgggggcccaccagtcaatgggctgggcgcccccgatcagggcgcgggtcaaggtccccttgtgtcgttgggctcaaggggagggagatctatctaatattctcccccttgatctcactatttcttttagcttttttctattccatcatagatttgcacatagagcatgtttcatcgtcacggttaatcactgttggatttgacagctactatacacatctctattcagaaacatatactttaacttttgggccctgtagtccaggattcataaggcttctcttaaacccatgccggctacatgttccttgaacacgttgggtggtaggcctttcgtgagcggatccgcgagcatcctttctattctaatgagctcgagactgattgtttgatcccggactttgtccttcacaacatagtactttatgtcaatgtgtttggcagcaccacttgactgattgttgtgagcgtacattactgcgggttcgttatcgcagtataactttagtggtttctcaatactgtcaaccacctttaaaccgggtatgaacttctttagccagttcacctgccccgtggcctcatagcatgctataaactcgacatacatagtagaccctccagtgatagtctgttttgagcttttccatgaaatagctcctcctgcaagggtgaacacgtatcccgatgttgactttgcattatcttttgcaaaatcagaatctgaataccccactatctggagcgatt

SEQ ID NO: 17354 - DNA, 2413 bp, Oryza sativa
atactttttcctccaaatctccatttagaaataccgtttttacatccatctaatgtaattccaaatcataatgtgccaccagtgccattattatcctgaaggaatctttacaagagactggagaaaatgtctcattgtaatcaatcccttctctttgcgtgaagccttttgccacaagtcgcgctttaaacttttcaatattccctctggagtcatatttggttttgtagacccatttacagcctaatgttttggctcctttaggaatctcttctaaatcccagacatcgtttagtttcattgatttcatttcatctttcatgtcttctaaccattcagatgagcgtgcgcttctcatggcctcttcatatgaggtgggatcatcctcaatatgtgactcttctatattataaacttcatagttatcacggatagccaatcttctgactctttcagaccttctaggggcctcctcatttggcacattctgtacctgagactcttgttgagcctcccgttctggcacattatctatttgaggctattgcagctcctcctctggtgtggcaataatttctgttgagtcctgtagaacaggttcctcattttcattcattgttgccacaggaggggtaacaacaggtgctggtaccgcaacgtcatgcattgcaggcacaacatcagcaggtagagagaagaaaggctcctaagtcgacgaagcgggtacagacacccgcctcttctcaagatcaatttctcgaactactgagctccccctaatcattttgtcttccaagaagacggcgtgtatcgtttagacagtagaaacgataaccctttgatctagaataaccaacataatgagattcatttacaaatgtaataatgttctcacctttctttgccatgatcattttcaggaagtcaggataatctttatagtagttccttttcttgcagtggagacactgatccttttcaactgtgaactgttgttgctgaggcagatgctgaggctgttttgcttttgaggagggtgtcttgtagttcttttccttgttatctttaacaaagttaatagagccaccattggactcttttgattcttttctcctcttgcacacaattagcgatgagcttttcaaaattccatttctttggacttattttgtagttgacaacaaagttgtcaaagtgctttggcaatgaggccataaccagatggatcagaaagtaatctaagatgcccaaatccattggcttcaacttggaagccatgttgctcatcctaagaatgtggtctcttacaccacctccatggtacctctctgtcacaagctgctttatcagctgtgtagcataaatctttgaagaaccagtaaactggctctttattattttgaggtactcaaagacggtgtcacactttgggattaagcccaatatagttggctcaattgtgttctttaccgcagccaaacatttcttgttggctaaggaccatttcgcatgctcaatgtcatacgacattatgaggggagcattgtccctctctctcttttgccagtcagcatctgactctttttcacctctgacaagtgcagcaggttctatcggatatggggtggtcaacacccagtccacctttcctaagataaaagcaaggtcgagtttttttttccattctgcgtagttatctcccttcaaggtcggaatatctttaatgcaacccataggagtagccacctgaaataatcatgtacagtgagaacaaaattaacattaaaatgttatgcattaaatctacatcaccgttaggcaaaaatagagataacacataaggccataactataacattgcaattaacaacgttggtcagaaaattacaacatcatagtacagaattaatgttcctaaaattaaattctcccgttggttcgaaatttaaatttagaaacactaatttttatcaatttcatctatttgcagcggaagatctatataaaattcatatgaacagtagcaaattatgttatttacactatgtaaaaattacacctttggttcaaaatttaaacagaggtaaggcatgcaaaatcgattaaaaaatctattgaaatttgcatgaaaatagacaaaataaaaagaaagtcgctaccgttccttttcttcattttggcccatcaaagaagtcggcccatcgccgggcgtgtgcgggcgcccccctccccccaggccggaacctgggcctgggcctgaaagcccgccgcgcgcgccttccatattgggctcaatttggcctggctgacgccggccatccaatcgctagggtttcgatcggatggccaggcggagagatcgggcggtaaaataaacccgacccccagccgcgcggcaaaaaccctagcctct

SEQ ID NO: 17355 - DNA, 7044 bp, Oryza sativa
cgagcgacgacgacggctccagatccgcgcgccgccggcttccctcctcgccgcttccgccggccacttcctctcctcccctccgtccgctgccgtcggcgcccgtggtgaggccggcggcggcgccccatggttttttttattttcctgagatgattttcacagccgggctgtggcccgcctgcgaaaatggtctattttcccagtcgagatggtagcggcggtcctctcctccgcctgcgaaaatggttttggaccgcctggaaaaatcttttttctagtagtgctaatctactgctgcatggacggtggagcccgggcaactgcccgtggtggccaggtcctggctccgccaacataacacaagctttttttttttcttttttcgcgatcgatcacacatgaaaattgaaaaggcagaattatgcatttttcatattagttttgttaacgtaaatctatgcaatttgatccctgttgccagctatttctgaaaggattccatggttataatcatgaaaatgatcctgcactggtccatactttttttctttggtctcaatcctgcacaatagtttctttacagagttttcctcctgacaaaagaaaatgatatataaaactggcacaatttattgacatttgcatcataattggttagtgccctaatggcaagtgttctactcaagggactgtcctgagtattaacttaagaaactctgaagttgccatcgattgcaactgttcatagtgaccacattcttaagttaatacatcatgagtttgttatatttctttccacttctctatatgtataaaaaaaatagtgttctctgaccatgcttttttgcgattatctgacaatatataaacaatgtaatgttttctgaagacatttgtatctctgtatccctctcccccatcctttttgttctgtggggtggatggatgggcctatcaaaaggttgttccattatcatttgaatgcacctataataagaactaacaattggcaaacaacagttttccttcagaactagggactgttgtttcaatccaaaaatagtcatagttttactgccatgtctcttatagcttttgctgctgtgcgactagcccatcatgatgatctgacttacaatgcttgtgtctcttgctcttgatctccttctatcagtcactctaggtgcagctaatttctgttcgtctcctgacatttctagggatgcaagatatcgaagatcgatggaaattgctgccgcctacaaggtgcaagaaatcatcacatccggcatttaagtgtgtgaaagactggttctgatttttttttttgctttgttgtgtttcttctctgtgccatagctagaagctagactgaaaacaactatggtatttttaggcttttttatcttagtgaattcatgtaaaaatatttagttatggttctatccagtttttgatggttgttcttgaagggtactagttactatttttagcaggagtgccataggagctaatttagctaaacttgttgcatcggttaataacaccatcgaatatttcatttgccaaccttttgtagacctgaattttgaaaaccaattagaaagtagacacgggctataatgagcgcctcttggcgcgctaattttttaagtatatcagtgcattcacatagtactcgatttttttaaataaatgttttgattcgtgcatgaatcactgttttgcagccataccacaagctgacttaaaaattgcaaattgctgaaaggtacaatcgtataagaaacaaaatgattttcacatcacttcgcaaactacattttttccctacaaccaccggaactcaatatagttcctacgcagcttcatcattcataacagaacaactagcaagttcaattcaatttaaagagatcgaatggtgattcacactctaaagcaaacttagactaaaaattaatagtatctttaaagattaaccttaagggtaaaaaaatctgcaatccctgcaaacaataatgcttgcttcaatatggtatacttagtcatatacatggacattctccaataaaacattttgttttttttgacgcaaataataaaacattttgtaatctacagctcataactcaaaccatattgaccatctcatgaaaagtcacattacacatcacaaattaattccagccacaacttttagttcatgtgctcacctattggatttgcatgaaaggggcagggctgagtagcaaattgacgcacagtaacagcagatgcagatccagtagagtgaagggagcaggattttagtgggaatcaactttcgtaactgtggcatttggggagttcatataattctaaactaacatggtaggttgtctgtagctcatatacaaataatctgcacccaaaccagtgccaaaatatacgaacaaatgcagaaattcgcttaggcaatactgcaaacaccttaagtgcgcaaaaaactgaagtaaatttaaacgatgtaaatggagaggaatgaacctgcagatgtcacagtgttcagtgcagatgtcgatggtggcaccgcgatgggcagaaggcgggcgggccgcagggcgctcgacggcggcgagtctctcccacgagctaggtcaccgggcggcgctacggcgcatcgatgggcaatgccgcagcgggcgacggtcggccgtcgacaaaatgcctccaaatgctgtacatcctgtagtgtctgaggatggtaggtgggtttggccaccaaccaggcaaaaccacacaattcccccatccttggccttgcgcttgcgcattagggtgagccaaaaagaaattaaaaaaaaaaacaactgaggtttctttccctcaacacataaatacccgacaatgccctagccgctcgacgttcataccgcagcatagagcacacgcttggtgtcgcggcggcggattgatggcagggaagacggatatcatccgcgatatcatcggcggctgggtggtggacgagacgtgcgtatatatttttgtctactactacattccctgattacagaattttctgtgttggagttagttttcttcttcttcttcttcttcttcttcttcttcttccaggtttggttttgctcttgtgattgatgggatttccgaggtacatcggtttccggtttccgagtaatcgctctactattttaggtcgactacgatcttggggataattacattgcttccttttttcttgatgatagagggtctatgtgaatgctgctatactatgaatatgattaacgtggacaacggctgatggatttgattcgatgcgagcggccgttgacatgtgggccccactccaacaatgactaaggttgctcattttggcccaggtcatcgtgaggcccattaagcccatctgcccacgttgtgatgcccagatgccctagttgcaaccgccgccgccgccatctctgcggcggtgtccggattcttcttcttcttcttcttccctcgtcatccgggaacgcggcgaggaggcggcctggctacaggacgtcttcttcttccctctcgtcttccccctcttctccaaccttctcttcacgggccaaaaaaaatctttggtaattggtacggtccgccatgcgggcggtccttgtcgagctcggaagacggcatgagtgctgtaatattggttggattcagttatgaaattaagtagtactgaataatgagattcgggttggatcaaatttattcgaacgggatcggttttgttcttttgtttttggaaagaaccgaatagtttctttttaactatttcctcattttaaagaacggtattatgcgattcaaatcaaatctacgcaagtcaaaatttcaacaaccagttgcgtcaacatgctttttgtctggttaaaagaactgaaagtacgtactatgctttttctctgctttgatgtgtgatcttagtccttttgttcctttcttgttattctctgaatttctcctgtccgtattctaaattggaaaattgcattgatcatgagcagtttgcgttgtgtgtcacaaaatcatgaggattcaattaattacttgttcatgagggtggtgtatatgccattgtgatttagctttctgaggattcaattaatctctcatttaggggataagaggatagattctgaaaatatataagatggcacctggatgtcattgtgatttagcttttaattaatctctcatttaggggataagtggatagattctggaaatatataagatgacaccttgatgtcattgtgaagctttaacattttttttaaggtatttagcttttacttcgatctgaatttctaaacccaccatttttttcgtttgtgttcaaccagagatgcggcattggctggacttcgtgtggcagagcgtgcctattggaaggaatttgtggacagagtattgaaagataccagcagcattgatataactgcgtcaaatatagctgttcccacaaggctacctgtcgagctgcaagtcctgatcaaggttatgatccaccagattcttaacactcagcctggagcaatccctccactagcatttcattggtgttgcaatcagcttcttcagcatttggtgaattcagtaagaacccaaggacagccaactgttgaaccaaatgtacatggacatcaacgttgcaggggtgcaggttggtcatcggggattcccgaacgattggccgatcgaaatgtttcagaagatggaggtattggaggagttgattcgaggaggaacattagagagatgaatggtaaaattaaagagacaaatgcaagtcgtgagtcaccccgaatcctcaagcctactggtgagccaaacccatccactggtggcatacggattcagaataatcggcaagagcaacctgcagaaatgaccattttccatccatggaaaaacattactgatagaacatcagcttatgagctaagccatattgacaacttggttaatcatgaagatgatgagacaaagaggcagaaagaacagagtgttcacatcactctgttgtatgagatcaacctcatcaacgaagagcttttcgataccgtgatcagtatcaccggtcacaaacatggtgggacagtgatcaatttcagctacaatgcagtgtctctttgcaaagacatggagctaccatttgcagcatacggaaccgtctctctcaagccgggaagcttatttgtcccagctgattatcctcgaagctccccggtgtacgaagatggtgatgaacagcaccagggaatgtacagcgtgatttcaggcatggttgacaaggtgttccagcgtgccctgcgtaaactcccggtgccaatgtcgatcaggaacatggcccggcagtggggcatctccgtgcgaacggtcaccaacggtggaggaacgttcagctccgggtatggccagtggaagagttgcaccgatgagtttgcaagtccatagtccatggatagacccatgaagttttgcaggaacaagtgatatgaagaataatgctgatctgctgttttgctgtagggcagatgcagaatccagtgtgagtgttgtgagagaatatttatatttttgttatgcattaagaggctgtgtggatcatctgtttttgattaaaccggttttgcttaaaaaatatttcttactacggttgtgaattgtgatatttatctgtttggactgtgtaattggaatgagcgaatttgctagtaaaacatgttttctgaaaactggttcgtatcttttaagatccaaacaaccacttagagtttttattggcaaatactttggtcgttaatcttgcacgtgcaggcttatgcaattattgtgcaacagttcatttcatacttcatactccgggcaagtagtatgaactgaaatgttgcaacgggcttatgcaagtagtatatatatgttcgtctgaaaatttttcacaggaattgaactgttttagttcgatgcaacaagatggaagtctgcaatgcatccgggtctgacattttatttgccacattctgcttgacacatggagttcctcatacagatgttcttcggctgcgtctgacaaagtttagcaaactgaaaagtgaacttatgcctatttagaagcgcacatatctcaaacaaattttgtgggcctcatcgtttgccctatatagaatcaactactactgccaaagtttaatttttaaaacttaattttgaagctttttcattgaaatttttagaattaccttttaagtcgttaaaaacatagagtatataaaagtttttacctataatttttagtccctccggacaacattattttttgtgaacaggctgtacggcgtattctcagtatatagtttttaagcagaagtttcagtctgatttctccatgaacctgcaagaaagaaaaatgcggaagtactgtccttaaccatggaatcctttcagaaataactggcaacagggatcaacttgcatagatttacgttaacaaaactaatatgaaaaatgcataattcttctatttccaagaggtaaagtgtttcattttaattttcatgtgtgatcgatcgaaaaaaaaaaagaagcttgtgttatgttggtggagccaggacctggccaccatggcagttgcccgggctccaccgtccatgcagcagtagattaggatttaattactgtgattactgaccttgcagccacatggagtacataaatacaatgcttaagcaaaggcaaagtgctataatcattgtgtattttggtgaaacataattgaatcatatggtaaaacattttggtgtagcgtttgaaacgtcaagtttcaattgttgaaacatccacgcagggacagatccagaacaaaaaatggggggagggggctcaattacactgcttctttaacctccagttatataggaacctttagtttattattcatggtgaaaaaactaaaggggtactccgggggtatccatagatcttgggggtgta

SEQ ID NO: 17356 - DNA, 4789 bp, Oryza sativa
atgtcggtatccacgtacatcgggacattcccatcccatcccctcctcctctcatcttgtttctcaagctacaattaatggtggatcctagcgggcgcgctctctctctctgggtcatgaatcttctgataaaattcctaccattgcagcttttcttaggctatgatgcgttacaccggtgagttgtacatggctcacctccattccataatgtgcttttatgcaccagcgtaaaatattggttgctcattgggatatcgacatatcgtgcttcgtttaggctgtgttcgatgcaggagttcccaactctccctctcattttccgcgcatacgtttttcaaactactaaacggtgtgtgtttttttgaaaaagtttatatacgaaagttgcttaaaaaaatcatattgatccatttttgaaaaagagctaatacttaattaatcacgcgctaatagaacgctctgttttccgtgtgtgggttatgggttcccaacacccaccactgaacacaacctaaatgttccctactacataaaagcacgtacagaccggcactataggtgccgtggaagtgctaaaactggcacctatagatctttttcacctctgcaagctgaaaacacaaaaaaaaccgataccaatatatagttgctagataattaaagaaccgacacttataatatattataggtgcgtataaaaactgagcagagctaagctgttggtccttatcctcttgaggcagataaggggaggaggactcggtctctccccggtctcctctctctcccggctctctctcgctctcctctctctggctctctctctatctatcgatctctctctttgtcgcttaaagtcaacaaatagttgcatcaaaagctttaattttgtctgctttgatgtatgatctcagtcctttacttccttctggattgcttcagtacttcctttgaaattggaaaattgcattgagcgtgtgtggtgatacattctgtgtgtaacaaaatcacgtgtttatgaggaatcatttaattacttgttcatcaggcaggtatagacatagtaggaacaggttctggaaacatataacatgacactaggtaggatctcattgtggcatcaattttttttgtcgacatttatctgaatttctgaaccctattctttttgttcaatcagagagaaattggcaggacattatggtgcagagttcaactctttgcgggcatttgaggacagggtattcaatgagaccagcagcattgatgattatatttctaaaatatcaacgaagatggctattttggagcgaccgcagtcttcttcaggtatgcagcatcaagggcagatgggaaatcaaacgaggctgcctactacagttatgcaagaacagccacagccacagcagcagccgcatttgatgtcaaataatcatcaccaaacacatggaggatggcagagcaatgttgcaagggtacagatgatcactggtgttggagaagtgaattggagggaggaaatgtttcagaagatcagcgttttaaagaactctttcttttccgagcttacggattttgaccgtttacttcacaattgccaaaaaacagaagaacagttgcagtcactacctaaaaagcaagctgaccaatacaagcggataacaaagctcaaggatgcggttaggagtgctctggatttattgcagctccagaagagcagcatcgatgaaggcatgaaggtgaaattctgcaagtacgaaagctccatacatagcctactcagattctacagggaaacaaaagctaaaattaatgagatgaatgcaaatcgtcataacaatcagcaagagcaacctgcaggcctgccgaggcaaagaattactgacagaactccatcgtcagctcgtcggcaaaaccgcaatgacaacgtgataggccaatcagaggataaattgcgatgcagggttgaatcagttgtagccaagaagaagcccatcgaccgcctaatcaacgctctgcggcacagtgtagaggatgaccgtacggacgtcaagaggcagaaaacacggcatgttaacagtgccctggcgaacgagatcgacgccatgaacgccaagctgatcgataccgtggttagaatcgccggtgagaaagatggtgggacagagattgaattcagctacactgcagtgtctcttgcactagacatgaagcagctatttgcagcatatgggacgtctcctgtcaagccggtgaaactattcgtccctgctgattaccctcgaagttctccggtggtctcgaacaacaacgatgatggagatgaacagcggcgaggaatgttcggcgagatctcgggcatggtcagtgcggcttttcactgcgcgctgcgtgagctcccgccgtccatgtcagtcaagcagatggcctcggagtggaattcctgcgtgcagatgatcatgaagaaatttgcgatacggcacggtggaggaacgttcagctccaggcatggccagtggatggattgcaccgttgaatgatttagtaccgtgaggtaccgatacctcgagatactttttgttgtaccgaagcaaatctcttaattattacatgaggatgaagtgatacggagaaccgtatttgatctgttgtattgctgctggagggtacatgcataatccgctctgtgtatcatttgttttgattaagctggtattgcttttgatatttctctgtctggattttgtaattggaacaagcaaaatcgcttgtaggacatgtatttctgaaaatggtaactatctatctttgaagagcccaacaaagcatttagagttttattggcaaacaataggttgagctcgcaggcttatgcaatggtggccaaacagttcaattcctaccatatatttccttctgaaacttttaccggaactgaactgttttagctgaaagcaacaacatgggacgtctgcaatgcagacaatcaactaatcaactaattaagcgaattttgcatgtgttcaaaataccggaaagattttgtgaggagtatgaacagatggtgagaaatttttggtagggacatgataaaggagaacggaaggtacactcgattggttgggaaaagttaatgagtcccaaactattccgaggacttggttttcgggacattagatgctttaaccaagccttactagcaacgcaggcatggagactgttcgataatccagataatttatgtgcttgggtgctaaaggtgaagtactatccaaatggatcactaattgacacggccttcccttcaagttcatcgccgacttggaagggcatcgagtatggactagagttgttgaagaaagacttgatatggatagttggagatgggcaccaaattaaaatctagaggagtcaatgggttgcacatagggaaaacccagtgattctgtagaagaaggcctggaatcgtctcacgtatgtacatgagctcatgttgccggaaaccaaaacgtggaatcagcctttaatcagacatgtgtcacgcccagaaattcactagtaatttccgaactaatttgtgcattaaatcctcgtccaggaatcagccaaggtacacaaactgacaatttaatatacagattcatcaaattaactaaaacgataaatacttacttaagaggcacttagttctcaccatgaagaaaactgcagcggaaaataaaatctagcgaagctccggctccactcccacaggcagctcaactggggtatgagccaaacgtcttctccttctgaatcctttttcttcaactgaggtttgatggttattgcaaggtgagcatatgacatactcagcaagccacacaacaaatatgcaagtgcacaaggataccaaagaatggtataatatagggcttatttgcaaaagcagcatttagcaaacttttgagaattgtaaaacagtagagcaattaatcatcaatattaatcaacactgtacaacacacccatgctgcacaggcccaaccatcctgaacaaccatacccggctgtacagatctatctccaaaccaggaatgtaccattccaaaccaggagctaatcaaattattatcagttatagcatcttttattatggtgagaagtgtgagactaatcacgaaagacattgttagacccgcccataactgcgggcacggctattcgaatagttttactctggccagaggtgtaccactgtacccacaagacacagccccacgacatgtcaccatgcgcctcaataccaccacggtacctcggaaaggagctgtgacagtacccctcgcacaacacaatccaccacagtgcaccgttcctggatcataatcacccccttataaacaaggtatggactccccagcgacccccgtgggcttatctccgccacttctcagtctagtgctccgcaatgaaccatgctatataaaaggtaaagccgttgcccatactggcttgtggttggcacggttaatgtttcacaaccgaaactcatgaaccggtccttaattgtcatgagcacgaccatcaaaaccatgtgctcacaacccaccattatcaagttttagttgacaatttaattaattaaccaatcacgattgaccatcgtgagcttccattaaatatccataagtgatagtgaagcatgatttatcccattaatgagctaatgtttctaagcacggctaagcgggtataaataacatctagctgaaccaatccaatatataaggtccatgctagtcaa
